United States Patent Application Publication US 2009/0018031 A1 - sequence listing, part 12

SEQ ID NO: 6037 - DNA, 6000 bp, Homo sapiens
tttgccctgttggccaggctggtctcaaactcctgacctcaagtgatccacccgtgccaggccttaattgcaatcatttaaaattgctctttccattccaactttccctgtcagatttcccctcacactgggtgtcattggagtggtggtgaccatttttgggatgaagctaagggaatgctgaattggaaacacgttcatttaggcttagtgagatatatctctacaccttgcaatcagttctccatagagttaagttattgctcactgttccaaatgaagaaaaggtttccaggtgtgacacaaaggtgtcacaggatatgtgtcatcacaggatatgtgtcgtcccggtattctagttcaagaaaaagctgcctctcccttacctcaaagtttctgaccactttggtattttgtaacattttttttctccttcagatttgtctctcaaatggagtgttttaaacatatatgacaagtaagaattttctttaaagaatctaagtgtaatgtttaccctttggaagctgctcaagcctccaaagcggggcagggaagtgctgggaagggaagggtgtggtccctggcgagggttccaaccccatgcctgtgcccagggacctaggtgaggacaggcatttttgttttcctgcccaaatgttgcatttcccaagaccacataatgttgcatttcccaagtcatacctaaactaattatttaagatgaaaacagaaattctaaatagcggtaatgaatagacccctgggaatgtttgacaatcaaattaatgaagagaagtgaatcatatgaacatattggggaaatatttatatttttggctcatttgagacaaaatgctgtcattgatgaagacagtataaaacttataataaattacaaactagttaatgaattttatcaattcaagagatatttaagattagtcactgaacaagaaaacttgaaatccttgtaacctgagagcttatatatcaaagaaatttgataaatgtctttctaaatttgacaacaacccttaaaagtgtaaactgtactaataccaataaataggaaaattttctaaattatctataatgaaaaacaattttcagttattttgaagaataaactggatcccagattattttttttgattctagtatcttcatagaaaattatagtttaaaccacaatgtgaagaggtactcaaagagaatgtggtaaaaaaaatacaaaaacaaatattacagaaatatgcagttaactagagattattatttaaatttttaatttttgtggtgtttataactactaaagaatttttaaattgttgtgatttattttctaagtggatattcacttttgcaattaattttttattctttctcttaaagagggactccaaattgtataaacttcaggctccagcctttggtaccgtgtttgatctgaaagatgttgccagataaacatactttttttgttgttgttggccaggcaaggcataggctttgcgtttgctgattgggccatgaaaaagagtgtttgcatcttctgggaacctctctttgggttgagttggcagaatacctccaaaagtgtcattagcagcctcaagcaagagcttctcctcaataagcaatgctgtgaaatatgatgcaacattttgtctcattagaatattgttttctgtgttgctggactaggagttaggaaatatatatttatgacactaagaaatggtgtttcgaatttcatgaatctgggcgatccttgaaatagttttattttatttatttatttttgagacggagttttgcttttgttggagtgctggagtgcaatggcatgatctcagctcaccgcagcctctgcctcctgggttaaagcgattctcttgcctcagcctcccaagtagctgggattacaggcatgtgccaccacacctggctaattttgtatttttaatagagacggggtttctccatgttggtcaggctggtcttgaactgccaacctcaggtgatccactcgccttggcctcccaaagtgctgggattacgggtgtgagccaccacacctggctgaaatagttttattgagaggcttatggtccatgaaggcaaaggttattagtgagaagagcaagtgagtgacaaggagccagaaaaaaaggagacgaatcttagttccattgagtagtcaatgggcaatgaatgccatgggcaagggatattactttccacttcacaatctgtgtggtccctagaattagctatttcagaaccagaaaaactgcttgataaagtggcttcaaatagtcataaaaaatatctattgaacctctactgcatgtctggaattgagccaggtactgggaatatatggatgacttaggttatggtctgtccccttagggagctaaacaactagtttggaagacaggaaattgacaccagaatataattttaagtttaactttatgaaattgcctttttattatatgtcaataatggttatttcatatgattggcaatttcgtatgattgaatatcaatagtctcacatggttcaacatgaatagctacagaggtaatatttttccctatagtgggccagtacctggttaatgaatgcaataagttatcacccagtcagtttgataactgatcaagcaaactcttccatacattgctgaatacagaaaatgagagtggaggggatggtggtgaggtgtcatctctcatttcaaaattcttgcaatttttacagaaatcaattcaggcttggttgactgaaaaatatccccagaggaggtgggacttgagctggaaactgaagaggagtgtggactcaattaggtggaggaagtatgagcgttcattcttccctgtacacttggaaaagtgaacagggtggaatggaattgcaacagggttcaggtagggaggaaaaggaaagaaaatagggaagaatagtataattttggtgaagggactgaggataggaaggggaacgtgggctatgagccagaaataaaaaatataaaaatttaaaaagtagattcaaggtcaacccatgaagatccttgagtgagcttggatgttattctgaagctaatggaccaggtaacggtaattttcctggaaaattcagggaagagtgtttcaggaaatctctattaggttcttgctttctgcattctatactcctcttggaatcggcgttctaacaactgcaaacctgcccataggcaggtgaacttgaaaaccctggagacaaattattagaggggcttgggttggctgttgtgtatcaagagggcacagcaactctggggtgcttcgacacttccccaaagtagtgaaagatcagttctaactcttagaaaaatagaaaaccattactgagaaggaataatttgcatgtgaacacactctatttgtgttttcacacaatgcttatgtgttcgtgtgtgttaaatatgttagattcaaaaattaagcctgagaaaaaccaggaaacagaagaattactgtagctcagaagtatgagtagtctggtctacaggacagcaaaaacatatctgatggcttctacagactaaagttccaagccactaggtatatccactcacacagccttctctcctgtgcgtttgtatggccgcttctcaggaatgctggtgagaagcccatgatataaccaatatgaaaatgttccaccactgtagtattctagatatttgaaaagacaatggatgagaatgaaaatgatgcatatacaataatattaatgttaaaagtaaacaatactacaggtggtgataagggctattaaaatataaaagagttcaataggaagagaaatgaatggatgtttgccttttcaaagagggtgggtttgtaaatgccaggaaatccagtttcctttagggattattcacgggcctcaccatcttctcttctcaaggcatttaaataacaggatccactttaataaaaaatgtcaaactcctcccgccttcactagcagccagaaaagcacgcgtatggtccatactatacaatttagccacgaatgacacctgctttgctttgttttctattgtgttaggcgtcagcctcgtgtgctcagatagatcttaagctccttgaaggcaagaaagaacccggtcccagactgcgtccgacacacagaatgctcgtaggaagcacaggctgatttatggaaaatacagcaagggtcttcaatttcgaactacagctccgccttggagatgctttccgcagcccgcgggccgcccacggggggcactgtctagctcccctcgcccctcagccgctctccgtcggtgctgttccccgctgcggccgggaggaggcgccacggactcgggctaagcttcttcccccttccgtcccccttccatccaccttaccaccccacttccccagcacatgacgtgggaagctgcctccgccagagtcttagcaagaggagtgagggggtgcaggggcttgggggtggggtggggtggggggtgtggagaaagaggacacgcgcgctcacacccgcccctgggagcagaagcagtatcttccccagcttcgtgggtttctcctccccccggagtcagggtgtgcgaggtagggggtgtgtgtgtgtctgtgtgtgtgtgcgcggcacgtttttgagtgtgagacccaaatccagaccaggcaacctgcgttccccgcgcctccccccgtccccggtgattaatacccatttttctgacgctcccctcctcccctcctgctctccctctccggctgccgcgcggttgacttgcacagcctgcccccgcccgcttcccttcccccggctccgatcctcaccaactggaatctgggctcctgcctctccaccccccacctctttttgagaaaggaaggttccccccaccccctttcaaaaaccacttcctccggcttcttcacctctaggaaatctcggggcttcgctctatcgagagtgctcgtcaagggtgattcttgatcaccaccatccagtagtgctggcgtccgaatgcatatccttttgccttgcaaagaagagtcatgaacttcaaaacccccgagacggatcattaatcctgctttgcaggaaaggaaaaccctccattcccagccaccggccacccctctccgcagactgcaaccgcggaggcgctcggagccggtacgtaaagatgggctttggagtctctcctttgaatgtaggggtttgggggtgtcaggcagataaagggtcgaagccgtgaaatcgtgaacgaatctggcatgaggtaaagctctgaaatccagcagaacccggcacttgctaatttggacgtggcttttttaaaggttttttttttttgtgggggagggggtgctgtgactgggtagggctgtctctggtcttttggggggtttcatcccttcacctagcagaggggcagggcagcggcgccccgggccggacccacgcgccgagcccatccgtccaatcgacacgttgcaggtgaagccccgtgcgctgcacctcagcgcggcggcagcgtgagtgtgcgcgggggtgagtgtgcgcgggggtgagtgtgagtgcgcgcggggcgcgtgcgcgtcgggggcgtgtgtgcgcgcgtcagtgtgccccttccaagaaatgcccagtgtgcaccccgtgcacaatcagaacccattcagcacaagcccggggtgggaggcggcgctgctgctggaggcgatggggagagcgagcgagacaagtcagcagcaatgcagatggggctgggggccgcactcgctggcgagttaagtgggaattgtgtttctgcgtgtgtgtgagtgtgtgttgctgtatggtgccgcttctcccccccttcctccttccttcccacttccctccttcgctcgctccctccctctctcctcttccattcaggttggctttcccacctctcatccgtgcct

SEQ ID NO: 6038 - DNA, 6000 bp, Homo sapiens
aaccctgtcttcaatcaaagtgataaacttctagtagtgaacttctttttttgtttttttttttgttttttttttttttgagacagagtcttgctttgtctcccaggctggagtgcagtggcacgatcttggctcactccaagctccacctccccggttttatgccattctcctgcctcagcctcccgagtagctgggactacaggcgtgcaccacttatgcccagctaattttttttgtaattttagtagagacggggtttcaccatgttagccaggatggcctcgatcccctgacctcatgatccacccgcctcggcctcccaaagtgctgggattacaggcgtgagccaccatgcccggccaacttctagtagtgaacttctaagtaaactgccaggggactagatgaagagtggcatttttctggtccatcattttaaatgaaagagaaatctgtaccacataagggcagctgaaaggactgttgtcttccacagtgggcagcccccagtgtgaagtggctaattagctccaagtagtaagaataaagagttgcatttaactaagtaactgattcttatcctggaaaggatagaagtgaacagggaaaagtgaagaaaatttagataaattaatagaccacaaataaatgggttgtcagaggaagttaggatgtttgaagttttgcagatgctttttcgtagcatatcccgctctgtcaaagataaactaggaaagacgccagttctgctgtcttctgcagactgggtcagcaaacagtgaccgctagacactgaggtcaccaagatgaatacgcctggtctctgtccttgtgttgcgggaagtcagggaccccaaacggatgtatacgtacaaacacacatacatcaggataatagtaaataataataataaataatagtaaacagtggtaagtgcagagataggctctccctaggagggtggagtgattacttccgtcatctcctgtccgcggagaacaagaggcaggaagaccctttgcactcataaccctcatcccatggcagcccctctggtttcacttctctccctgcagccgtgcatattttatggccacaccacagggttagaggatagctggtgttgggaggggaaggcagccctgggttggcgggaagggctggggctctgggggagtctgggggtagtcctgggaaggcagggggtccttccaagacagagtctacaaagctcttgacttcttatagaacaaaactgtacttctctcaaagtcagagaaggagaactgggcttggaaaggagtggcctggttttcagtctgaccccacccctaactcctgggtgactgtggccaagtcactttgcttctgtgggcctcagtcccctcatgcatgaagcagggggctagatgcaaggtcagctggaaaaagtctttgtccatctgggttgccttacccaccccttcttgccctttcattttctcaggtaagatcaccggggcccatagaggtcaagtgcctttctcaaagtcacatagtttaaaagcaaaaataggggctgagtatggtggctcacacttgtaatcccagcactttgggaggctgaggcaggaggactgcttgagcctaggagttggaggctgcagtgagccatgatcatgctgctgtactccagcctagaggatagtgcatgatcctgtctctaagataaataagaaaataaaagcaaaaatggaagttgtagaaacatacctatagcatggtctctgtcataaaaaagaactatatattttgttttttaaaaatacatgtaagtttataaaggcacacaaaaagatatagacagatatacaaattatggtggctcccctttggggagggaaaggaaggggactaagggaagctctatatacttctgtattgctgaaaaattgtactgtgacaaaaacatatttgtgtattatttgtacactttaaaagatcatctttaaaatggacttctgaccaaagtccaggtctcagatttctattttcctcacaacaccaagcctgttctagcccgctccaggtctagaatgctgcagcactaggctcgcattgccactcccatacccggcaggacgtggcagggtcaccaccctttggctcagcccagaccaggcattgcaattcttctcacagagcccttgatatgaaaactatttgccatgctgccttaagctagtggttggatttcaggcatgagctggcaaatagaaaaggcagggaggtgcttttcagaacctttgagatcaaacagccagggtgctgagcaccttattgcagggaggaccatgcccaatgtaaggacctggctcaagggagactggagtttctaggggtctctgggatatgtggggcagtggggacagtgcagagaccttttcacagagccaaggagataacccagcacccagagagcagacgaatccacgggctctgtgtgggagtgagggaggccttcccggctttcacatccaggtgcacctgagccccgatcccccatgagtctgtctcaggaagtaaatggcaaaagcgctaagtagatagccccagaggaggaggagaattctgaattctgtttatagctctgctcctattttgttttctaacctcagaaaactgatttatccttgggaagggtcagtttcttcattaggacaatgaagaaaaatccagctgtcccttccaaggggaggtatcatgagcagtatcaaggtaagcaagggaacctggtttggaatcctggttgacaccggctttcactttaagaagtcgcaagagactgccgcaagagaggaagccacagaccaggttggaccctgagcctggagtactgccttttctcttctttgcctgctaaactccttgcttgtcaagattcagcagagatgacaccttctctgggaaggcttcctgagtctcctgcagtgagcccctaggctcccctagcccttggctcttatgtcttatctctgagaaatctgagatctgcacttttgttagaagtccgttttaaagacaatcttttaaagtgtacaaatagaaaccttatcttattgtattgcaggcctatctcctcccccggtgtgtatcaatgctcaggctgggcctttgtctgctggcttgtggagggaggcaggacaagccagtgaccacattcctgcactctgggctgcctcctgtggggcccgtgaggaagcggcagccttccctgccgcgtgcagggcctgggttgtgtgggtggctctcccgagtctcctccagccctttttgggtctgattctctgaccctcctctctctccttgctcaccacttggcactccactccttatccttttgctgcattaagtttggaaagagattttggagaaaatatagcccatcaacgaatttctcctcctcccagggcctgtctaggcgtgtgccatgcccaccctcttcctttccagcgctggccacatcctccctgcaccttcagtgcctgctttccctgcctcttcctgggctccgggtctgtgtccacagtgtcctgcgtggccctcgcgctgcctctggttgcccacattcctgcaactctgtgaccacagcaggggcgattacacattcctggcctggcagccaacagtgtaaaaaagaacagaatgtcctagggccccgcctagcccccagcttcacctgggcccctcccgggtctggacaaggttggagggggtggcgaggaatcagcaggaaagaggagggaccaggaggaggcagacgcatcccacctgagtgcgctgctcccacttagtgagcggggaggagacctgcagagacctcttctctcttctctgcagggcctgagggtgaggctgacctgtgggtgcccttggagggctgcccacttgctgagcctctagctcctggaagcacacttgggactccccccttgctctccttcctggagacagactccctttggtgctggctccttctatttgcccccaccactgccccccacctgcctctactcactcagtgcccctcctccatccctatctctctgtccttcgctgtccctctctattgtctccctctttctgccctcctgtcctcccggttccccacccaggccctctcagcctggctggccccttctccttgtgttgccctcctagctgtgggctcaggatccttctacttgttcagatctttgcccctcacctgccatcctgtcccccagcctccttgcctgtctgcgtctaaagcccctgcccagagtccgccttctcaggtccagtactcccagttcacctgccctcgggagccctccttccttcggaaaactcccggctctgactcctcctcagcccctccccccgccctgctcacctttaattgagatgctaatgagattcctgtcgcttccatccctggccggccagcgggcgggctccccagccaggccgctgcacctgtcaggtgagggggaggagaggtttggctgccagattcaactggaaaggaaccagtcccagtccagccgcaacctgggagtgggaagctggaggcagcccagacctcctggagccctgcagtcctggggcagagacagaatcaggacacagctcgaggtcagggccagaggctggagctgagggcctagagtgagagggggcaaggcaagggggggagaggaagagaggcaggattagagagaggaggcaggccagaaagaggagagcaggagagacccaaagagaaacagaaggcagatagagagggagtgagaggcaggagctgagacacagatcctggaggaagaagaccaaaggaagggggcagagacagaaagggaggtgctaggacaaaactcgaaaggtggccctatcagggaagcagaggagaggccgttctagggaagcccagctccggcacttttggccccaactcccgcaggtctgctggctccaggaaaggtggaggagggagggaggagtgggagaatgtgggcgcagggtgggacatgggcatggccaggggcagcctcactcgggttccaggggtgatgggagagggcactcagggcccagagctcagccttgaccctgacccttgctctccccaatccactccggggctcatgaaggggaacaagctggaggagcaggaccctagacctctgcagcccataccaggtctcatggaggggaacaagctggaggagcaggactctagccctccacagtccactccagggctcatgaaggggaacaagcgtgaggagcaggggctgggccccgaacctgcggcgccccagcagcccacggcggaggaggaggccctgatcgagttccaccgctcctaccgagagctcttcgagttcttctgcaacaacaccaccatccacggcgccatccgcctggtgtgctcccagcacaaccgcatgaagacggccttctgggcagtgctgtggctctgcacctttggcatgatgtactggcaattcggcctgcttttcggagagtacttcagctaccccgtcagcctcaacatcaacctcaactcggacaagctcgtcttccccgcagtgaccatctgcaccctcaatccctacaggtcggttagtccctctgccccttccctggtgcctgcgcctggaagggtggtccagggtgctgaggtgctcactgggcaggcagagcctcagacctgagggtgggaactgacacccctgtcccaggtagagctcactgctggcaaaatgaggagcctccagcttactggactggcgtccctgcccagtggagccatcctagcaccccaggctcacccagagtgtggttgttggagcagcattgccctcccctgccctctcttctccttccctcccattcccttctccctcctgcaagtgggagggagtgcttgcaaaagggcaggggtgtgctcagctgcatcccttttctggagc

SEQ ID NO: 6039 - DNA, 6000 bp, Homo sapiens
ctctctttgggttgagttggcagaatacctccaaaagtgtcattagcagcctcaagcaagagcttctcctcaataagcaatgctgtgaaatatgatgcaacattttgtctcattagaatattgttttctgtgttgctggactaggagttaggaaatatatatttatgacactaagaaatggtgtttcgaatttcatgaatctgggcgatccttgaaatagttttattttatttatttatttttgagacggagttttgcttttgttggagtgctggagtgcaatggcatgatctcagctcaccgcagcctctgcctcctgggttaaagcgattctcttgcctcagcctcccaagtagctgggattacaggcatgtgccaccacacctggctaattttgtatttttaatagagacggggtttctccatgttggtcaggctggtcttgaactgccaacctcaggtgatccactcgccttggcctcccaaagtgctgggattacgggtgtgagccaccacacctggctgaaatagttttattgagaggcttatggtccatgaaggcaaaggttattagtgagaagagcaagtgagtgacaaggagccagaaaaaaaggagacgaatcttagttccattgagtagtcaatgggcaatgaatgccatgggcaagggatattactttccacttcacaatctgtgtggtccctagaattagctatttcagaaccagaaaaactgcttgataaagtggcttcaaatagtcataaaaaatatctattgaacctctactgcatgtctggaattgagccaggtactgggaatatatggatgacttaggttatggtctgtccccttagggagctaaacaactagtttggaagacaggaaattgacaccagaatataattttaagtttaactttatgaaattgcctttttattatatgtcaataatggttatttcatatgattggcaatttcgtatgattgaatatcaatagtctcacatggttcaacatgaatagctacagaggtaatatttttccctatagtgggccagtacctggttaatgaatgcaataagttatcacccagtcagtttgataactgatcaagcaaactcttccatacattgctgaatacagaaaatgagagtggaggggatggtggtgaggtgtcatctctcatttcaaaattcttgcaatttttacagaaatcaattcaggcttggttgactgaaaaatatccccagaggaggtgggacttgagctggaaactgaagaggagtgtggactcaattaggtggaggaagtatgagcgttcattcttccctgtacacttggaaaagtgaacagggtggaatggaattgcaacagggttcaggtagggaggaaaaggaaagaaaatagggaagaatagtataattttggtgaagggactgaggataggaaggggaacgtgggctatgagccagaaataaaaaatataaaaatttaaaaagtagattcaaggtcaacccatgaagatccttgagtgagcttggatgttattctgaagctaatggaccaggtaacggtaattttcctggaaaattcagggaagagtgtttcaggaaatctctattaggttcttgctttctgcattctatactcctcttggaatcggcgttctaacaactgcaaacctgcccataggcaggtgaacttgaaaaccctggagacaaattattagaggggcttgggttggctgttgtgtatcaagagggcacagcaactctggggtgcttcgacacttccccaaagtagtgaaagatcagttctaactcttagaaaaatagaaaaccattactgagaaggaataatttgcatgtgaacacactctatttgtgttttcacacaatgcttatgtgttcgtgtgtgttaaatatgttagattcaaaaattaagcctgagaaaaaccaggaaacagaagaattactgtagctcagaagtatgagtagtctggtctacaggacagcaaaaacatatctgatggcttctacagactaaagttccaagccactaggtatatccactcacacagccttctctcctgtgcgtttgtatggccgcttctcaggaatgctggtgagaagcccatgatataaccaatatgaaaatgttccaccactgtagtattctagatatttgaaaagacaatggatgagaatgaaaatgatgcatatacaataatattaatgttaaaagtaaacaatactacaggtggtgataagggctattaaaatataaaagagttcaataggaagagaaatgaatggatgtttgccttttcaaagagggtgggtttgtaaatgccaggaaatccagtttcctttagggattattcacgggcctcaccatcttctcttctcaaggcatttaaataacaggatccactttaataaaaaatgtcaaactcctcccgccttcactagcagccagaaaagcacgcgtatggtccatactatacaatttagccacgaatgacacctgctttgctttgttttctattgtgttaggcgtcagcctcgtgtgctcagatagatcttaagctccttgaaggcaagaaagaacccggtcccagactgcgtccgacacacagaatgctcgtaggaagcacaggctgatttatggaaaatacagcaagggtcttcaatttcgaactacagctccgccttggagatgctttccgcagcccgcgggccgcccacggggggcactgtctagctcccctcgcccctcagccgctctccgtcggtgctgttccccgctgcggccgggaggaggcgccacggactcgggctaagcttcttcccccttccgtcccccttccatccaccttaccaccccacttccccagcacatgacgtgggaagctgcctccgccagagtcttagcaagaggagtgagggggtgcaggggcttgggggtggggtggggtggggggtgtggagaaagaggacacgcgcgctcacacccgcccctgggagcagaagcagtatcttccccagcttcgtgggtttctcctccccccggagtcagggtgtgcgaggtagggggtgtgtgtgtgtctgtgtgtgtgtgcgcggcacgtttttgagtgtgagacccaaatccagaccaggcaacctgcgttccccgcgcctccccccgtccccggtgattaatacccatttttctgacgctcccctcctcccctcctgctctccctctccggctgccgcgcggttgacttgcacagcctgcccccgcccgcttcccttcccccggctccgatcctcaccaactggaatctgggctcctgcctctccaccccccacctctttttgagaaaggaaggttccccccaccccctttcaaaaaccacttcctccggcttcttcacctctaggaaatctcggggcttcgctctatcgagagtgctcgtcaagggtgattcttgatcaccaccatccagtagtgctggcgtccgaatgcatatccttttgccttgcaaagaagagtcatgaacttcaaaacccccgagacggatcattaatcctgctttgcaggaaaggaaaaccctccattcccagccaccggccacccctctccgcagactgcaaccgcggaggcgctcggagccggtacgtaaagatgggctttggagtctctcctttgaatgtaggggtttgggggtgtcaggcagataaagggtcgaagccgtgaaatcgtgaacgaatctggcatgaggtaaagctctgaaatccagcagaacccggcacttgctaatttggacgtggcttttttaaaggttttttttttttgtgggggagggggtgctgtgactgggtagggctgtctctggtcttttggggggtttcatcccttcacctagcagaggggcagggcagcggcgccccgggccggacccacgcgccgagcccatccgtccaatcgacacgttgcaggtgaagccccgtgcgctgcacctcagcgcggcggcagcgtgagtgtgcgcgggggtgagtgtgcgcgggggtgagtgtgagtgcgcgcggggcgcgtgcgcgtcgggggcgtgtgtgcgcgcgtcagtgtgccccttccaagaaatgcccagtgtgcaccccgtgcacaatcagaacccattcagcacaagcccggggtgggaggcggcgctgctgctggaggcgatggggagagcgagcgagacaagtcagcagcaatgcagatggggctgggggccgcactcgctggcgagttaagtgggaattgtgtttctgcgtgtgtgtgagtgtgtgttgctgtatggtgccgcttctcccccccttcctccttccttcccacttccctccttcgctcgctccctccctctctcctcttccattcaggttggctttcccacctctcatccgtgcctgtcccaggaatggtatagccagaccttttctgaattatttatagaccggtaccagctgttttcaattcctctcgtgtgcactctgtgggaaatgcggggtttcctcccccctttccttaaaacgaattgatatctttttcggaatgcatttttctcaccctccgggggacacgcgaatcaagccctgaccgcctctttttcccccttaggaaggggacgctttgggaatgaccatgctccaccgagggacggagccggcccccagcttctccacacagagcctcctccactaacgctccaaaaaccaaaaaccgtaattgccagaagaagcgttaaaaatctattccagccactaacctcacatgcacacggaataattactctggattctgcattgtgagctgctctccataccctgaattacctttgaattaaatctttttttttttgaatttgcatctcttcaagacacaagattaaaacaaaatttacgctaaattggattttaaattatcttccgttcatttatccttcgtctttcttatgtggatatgcaagcgagaagaagggactggacattcccaacatgctcactcccttaatctgtccgtctagaggtttggcttctacaaaccaaggtagggcaaattctattttattttttcctcacctggggtagggattcctcattttatctatctcttcgagtccctcaagtggatctttttggaagaaaaggtcacaagatatgaaaataatgctgttttgggaaaaaaggcttattacaaagaaggaaatctcccatgttttttctttttcttctctcatctaacaggttttgggcttttggggggcagtgggggtggatgtatgcaggcacaaaagatgttggatggcatcaggggaatgtatctatatctatagacatagccagccaggagacctgtgtgattttccagttaaatagcattttattcacccagaactaaagctccgatttttatgggaatctagaaatcctttttttttttttttttcaggttggctttattccccttgtcaccttcatgcctctctccctgtctcctgtctttacctttctaggcatcctttctatgccctttaaaacagataaaaataatgattgagattactgtgattgttgccctgaaatccacttgctgtctaaagggttgacaaggggcccagagatcccgggaggcctattgcagaggggtaggtctaggtggggatcgggctggtctcagaacacctggaattgaaggatgctgcaggttaaacgacttaaatcttaagctcggaaaggaggaattctgtcaatattctgcttttaatttgtattttttcctgtgctattatttttgagctgtaaatttctccttctgtctacatatctatttatacccacacatcctccaagcaaactgttacttctacactcttgcaaaatggctatcttgcagagttctaaaatgctgtgcatgtggaaggggtgcagaattcgacacgtgagtctttgtgttaaacaaagagatgtgctgt

SEQ ID NO: 6040 - DNA, 6000 bp, Homo sapiens
atttcctgcctcaaagcttttacacttgctcttgggctgcctgaagcactctttcccaagttgatcatacagttgattctttattcaaatgtcactgttttaaagaggtcttttttgaaccctatctaaaactgtcatctctggccctagttacttttgatccttatctcaatttattttctttatatattttaccactattaataattatgtaatgtattacttgtttgctaacagctttctccccaagaatgccttggagcagggatgttgttttgctcacctagatgcaaatcaaagggtagttattgttgtgagtgcctcctttcctgacctttctgattcacacctgtgagcttgctaaagtatgaggagctgagcttgcaaagaagaaatggggtgaccttatttaaaacagagtgatgcttttctgcacataaatagatacatatctcaaaaagaaatgttctccgaattcactggaacaaataactgagaagagttatactgtcattcccattccatgataactccaaaaaagtaagtttataacatgctgttttgattactagtttatgtaacaattttattaagttgattccaaagcaatatgttccaaagtggtttatacgaggacactagtaaagcagcatactaagcaaatagaccaaccattatttgttcagctaacatgactcgtttccattgccattttgaagaccctccaaatttttaagtctaatatggctcaggaaatccaagagtttgaagtctacaagtcatgtcaaaggcaaagtcaacaactggaagaatttcacccttgctctcaagggtactttcagaaacttcactgatttgcatttggtaatcaaagcagcagacaattaggaaaagcatcaacctaatattttctctacttgtctaaaggcacttgacaagctttgtttcttaagagaatgagaatgtcagaaacccaaagaaaaatgctcatagggtctaaaaggaacctggcagatgctgacttacaactgaaccaaaatcttttaattgctttttaattgcataaatttctgcaacatgagtaaattctaacaggattcctgcatactcaagaaaattataatagtaaataaaattagctgtgttctaaacttattactgatatcctctggtagtgtgcaaattagtcttcactcctgaaagaacaattaagaaaattattgaacagttaagaaaatatacctaacttttagtggacaacagcatatagtgattgaataagcagatgaataaaataagccctaagtagtaaatgtgctcttgaaaattaattgatttttttttgccaatttctcagccagaggcaaatttaaatgttcactgtttggaccataatatgagggagagctagaggtcagtcaataataaatatttattgagcagttactatgtgtccagaaagacttttgggggatagaggtatatgtcagttaagcttaaaatcaagttgtaaagagaaacttagctagcaaatgccagacaagtttaagtattgctgacttagagcaattagggaagttagggaagttgctaaagaagggagaaatggataattttgcaggagtgtccaatcttttggcttccctgggccatattggaagaagaattgtcttgggtcacacataatgtacaataacactaacgatagctgataagctaaaaatcacaaaaaaatctcataattttaagaaagtttacgaatttgtgttgggcagcattcaaagctctcctgggttgcatgcagctcgcgggccacgtgttggacaagcttgatttaaaggtagagcaatatagtaaagagaaaagtgagaataagaaaatttttgtagacagctatagaaacagacttcaaagtgaattccaaaagttcacatttcctatgtgggttctgagaaatagttgcaaaaccatgaagggtagagagagatgagagagaaaatgcaagagagagaaataccatgttttgaacactattcctacttcttttcatttgacaagtatttattgagtacctactcttgggatctcggaacaatttgagaccctgggtgtgtggtgatattaaacaatgtgctctcatgcagcttccacttagtgcagaaaaactagttgaaggacaaagacatacactgcttaaggaaacaatgtagaaagggaatacaaagaaaaatatatatctgtaatattcttatagcacacattctttaccatttaaaatgattactatttgttcttaggcctactattgtcaaacatttacttattaatttcttcaaatttgatctttattatgtgccctgattttgaatcaatcaagttaaattactgactaataaaaatatgacattctgttatgaaagcaagttgaaacgatttaaaattgcgtatttggaagaatacatctcaatgaaaaaaaagagtctgaaatatgtattataccaaaagaacagaattttcagagaattcagatatggatttttttgttgcaaatcttctcataaattctccacagtacttcagctcttctcattccaattttcttattatttttctgttactatgataaacatcacagtcacctctgacttttcccttttccaatattgactctgtataacattccttttgtatgtatttgtatagtgcccactgatgttacctattagcccaagacctcattccttctctaattaatgtaacagtttccagcaccctcttctgccagttacagaattttggagcccagagggactatactcaagaaatgcaacccttaaagccattatattctctgcttctggatcaatcctcttaaaacaggctcttattgtgtagttttctgatcaaaatctttccatggcttaccactacatactgaggactcctcagcttcttttgttgagcatttaaggctgtctatgcattttttaaggccccaatatgctttttcaactttgtatttttcattcattgattcaaaaatattttttgagcccatttataatttaaatggtgctagggccttgctacaaagatgaacaagtcacagccttgccctctagcagtccccagtttaagggagggggtacaggagtggtgggaatgggtgtgacgagtacatgaaaatctcattaagtattgagagtaggtggtaacagcgcctgcccagggagcactgaactcaagtgtccaatcctgctgtgtagccaacttggcttcatcaatgctgacgtgggctgtcttttctctgcttttctgtataccctaaatatatctaggcttacaaagcctagatcagatgccaaataatccatggatttttccttagtctcctactcttaaatatctctcatttgaattcccatgacattttaaaatttcctttcctattctaatcacatccctgcttgtattagagaatatctctcttactacaactgtctgcctcttaaaagcaacaactatgacatatatttatatatctctagacacataaacctaaaaaaagcttacaaaggtgttcagtaaatgttccccaggctaaaataatgaataataatgtgtacaaagtcaaaggtaaaatagaacaatggcgggaattgactatacaaactgattcttcatagacttgtaaaactattatactacataaattactgcaaaaattaatgacagtagaaaggaggactaccactaacaaactaggatcctgggcttacaggggttaaggagatctaaccacaaggagaaaaaaaaagttcttaatttgccttcattaaagactaattttaggtctttggctaattaaatgaatacattgtttatgctccatacactttcggctcgagtcttggaaaatacgtggaacttccaagaattaaagtttccattaacgcaagtgccaaaatcaggaggcttgacctgtgggaaaaagcacatttgtcttcgctggctccttttcaaaaagctatagatgtttattgtataaccttttttgtgcgcaaatgctgttttatcattcagacccatctagacagaggaagaagctgcaacatttcagaaagcaaccaattactgaggaccgaatgacctggccttatcagcgctgaagtgttaacggccgtccctgtttggggtaaaatttcttcattgggagccagtcagtggtttctttttttctttcttttccttaaggggccgggggtggtggggggcagtcgctgttttgaggtgtgtgtgtgtttaattccctgagaactggctttggctggtgaagaaatactttactatagtgggtttcagaacatcttccacctgtatctctcctagcaggtggaaatttaatgtaaataattgtgtgtgcccacagcttgaacgctttggaagaatattttctgacctctctgcttttattcagtccgaagtagcccagttatcatgaagtagcccagttatctacctagattacaaaataaaattaaaattaaatctccttacgtcagtgaacttggagtcagaaagttctctcccctgagcagagagccttttaaagacttgtgtgtcacgctggcggcagggggtcgcggctactggaaaggagctggctctgcaggtcccgccctcccccgggtcgtccctccctctggcctgctccctacctcccggggacttgcgctcgccccctccccgcccgccccctactccgcgacaacgtcggcttccgaggtctggcgtgcgtcaaagccctaactgggaggctgatttgtggagcatcgcccccccgcccccgcccccccagtccctcctccttccactgaagtggccaagggagttgagctgagcagggggaggggaagatctacacccatcccccttcctctagccctccctgcgtttagattcagttgcaccttttattattttaactcttctccttaggacacgcagcccccaatttgtccctccggcctgggcggcccctggtcccgcgcgccagcatgggagagcgagggacctgcccgcggcccgccggcgtgtgcaaggaggtccagccgccgcgcccgctacccggagtctgtaagtttcaaagctgctccgggggagcggaggggggaggctgtccgtgttcccgtaaatgatttaaaatgcaaaacaccgcagaggcttgcagtgatggatggacttttcggggcacactccctactgcaacccgcaggctgttgtcttgggttttttcccccccgcaccttgtatatttgattccttcgttgtaaaaaaaaaaaaaaaaaaaagttttcaatttataatattatgatttccacaggaacctttttaactctttttagatgcaactcatacttctttcgcatttaaaataattcttataacttataaattctatagcacaccacttattataattttgtcagattacacgttatttagactgcgcaaggagtcatggcctttgcttacttctaaaaataacggaggaagaattttctctctttacttttaatattgctacatcatctaagtactttaataagtagatcgtgcacccaactggtcttaatcttcatgactgacgccacgtgctgtagccttgcactaatttacagacgcggttaatcgcagagaattatctttgagcctgctgtttaccggaaggctcctggttttgtttaactaaggctatgtccatatgtactcagaataagaaaaattgaaacagttctttttattaaaaccaagtaatttttctgagatcccagaactcaagcacaagctagattcatgtttgggttagtaaaaatcacatttttggttttgcatgtcacctcgcacatgtacagacatatccttgaatacaaggacccaagaggtgaggatagggtgggtttttaagtttttaataaatgtttccctcgtgcaggagga

SEQ ID NO: 6041 - DNA, 6000 bp, Homo sapiens
ggcatgcctgaaaagccaccgcttgcaatagaaccagaatcatccataaggtttgccttcacggctgcttttgcgaaattaacaccaaacaagtttgaggaaataatctgctattggacatttaagctttctcttcactaactctccatttttgcagtcaatatttgagatctaatacccacttacagggtgcttaggcattgccaggcacaaatgacattttttttctggaaggcaaaatcagaagatatggataataatatatttttgtcctccaacctctaaaaaggctaaaattcagctaaaagcatcagtgtcaccaacgtgtctgctgtaagaaactgctttataatttcctgttattctacagggttttatgttactctggtagtgaaccgatggtggaaccagtttgtgaatttgccctggccagacaggctaatgttcctcatctctagcagtgttcacggaagcgacgagcacgggcgcctgcttagaaggacgctgatgcgctacgtcaatctcacctccctgctcatctttcgctcggtgagcactgctgtgtacaaaagatttcccacaatggaccacgtggttgaagcaggtactatgaatggcttttccttccatgggctcttctcagctgagacaggacctccagaattcctttgaaaattctttatgtttgtttattcactcaagaaacatttattggttgggcgcggtggctcatgcctgtaatcccagcactttggaaggtggaggcgggcggatcatctgaggtcaggagtttgagaccaacctggccaacatggcgaaaccccatctctactaaaaatagaaaaaattagccgggcgtggtggcgtgtgcctgtaatcccagctactggggaggctgaggcatgagaatcacttgaacccgggaggcggaggcagaggttgcagtgacccgagattgcagcactgcactccagcctgggccacagagccagacctgtctcaaaaaaaaaaaaagaaaaaagaaaaaaaaaagagagagagagagaaagaaaaggaaagaaaagaaaaagaaacatttattgattacctactatgtgccagaagcaaactaagagacaaagatgaataagacatggttcctgccctcaagtttacttcagaggtgggggagagaaagtggcagatagtaacgttgccttaaggtaaacataataattatcatatttattaaacaatctggctgggcgagctgtttggaaggcccaggcgggtggatcacctgaggtcaggagttccagacaagcctggccaacatggtgaaaccctgtctctactaaaaatacaataattagctgggcttgctggctcccacctgtaattcccgctactcgggaggctgaggcaggagaatcgcttgaacctgggaagtggaggttgcagtgagccaagatcatgccattgcattccaccctgggcgacaaggtccccatcagtccccaaaaaataaataaataaaaataatctgtcacattaacttacagttttccagcactatacggtttgtctcctttatagctatttcatttggacttcaagaaaacatgaaaaaggtagaaaatagattcagaaaggttataacctgccctgaattacacagctgatcagtggaaaagccagaattaaaatttaggctccaaactcctaagttaatactttctaatagattctggtaggaactggcaatgtcagtttcatctaggcagacactgagaggtgacagtcaaaagctgttttagtatggacctcttgtctcttgtgcctcaaaggagatgtagatagttaaaggatgattctctttggtgtataaatatttagcaaagaagctgttaagtcagccttcagtagggcgaggattacatgagataattcttggcacatatggatgagaagcgtgaggtgattctgccttcacattgagtccagtctcacattagtttgcagtatttagtctccttttctgaaatgtcctgaaaaatagatattttcggattttgtttgttttggagtttgtgttggcttcttttgttgttgttgtttttgttttgccttcttaaatggctaatacagatagtaactactgaagtcaaaataaaactgtagagatgaatgtctatatttcacattttatttgagaagaaagaactccagtttgaggcatacacacagaccagatggtattcagtatgtccaaaatacaaagagaaggttggaggttttataaaaagacagaaatgttacatattgctctttgagaaagttcattggcactagtaagtttctggggagctggcaagttttgactggtgagtgatggaggtgggtaaaattagtcttcaagttgcagcagatcatttcagcaactataaaactggtttcaggtaatagcaggcagtttcagcaaccaggcctgcaaagaatattttttttgagacagagtcttgctctgtggccaggctggagtgaagtggcgctatcttggctcactgcaatctctgcctcctgggttcaagcgattcccctgcctcagactcccgagcagctgggactacaggcgcacaccaccacgcctggctaattttttgtattttagtagagacagggtttcaccatgttggcaggatggtctcaatctcttgaccttgtgatccgcccacctcggcctcccaaagtgctgggattacaggcgtgaaccaccatgcctggcctcaactgctttttcctggtggcttcttgactctgttttagttgggtacgacaagaatgacccaattatgttatcaaatttcacaatgattaagaacacggagtaagggtttgaaactttatctcacagcttactagctacatgactttgtctgagttagttaaccattctgttcctcagtttccttatccataaaatggacttaaagtaacttataatagcacctacctcatatatcccataggcttgttatgaggattaaaaaagttagcatttgcaaaatgtttagagcattcctggcacacagtaagtgctgcataatttcttgccattgtaatgaaattacatctcaaacaacagcataacatagcacagtagccactttagaagacttgttattaatataatatcccaggtcttttttatctactttgatcaagaggttgtgaatgtcaaggttgaaataaggaagaagggtgtagatgatgttgttagagacgcagagtgagatatgagaaagtaatgggtgccaggagttggttaagggggattcagggggagggtctgaaggcctggcacatgtacaggtatatgataatgtaaaatcagtaggaactttaaaaaaaaattaattgccatccttcctccaaatatgaaagtagaatactgtttcagaatgacctagttaaaaatgctactagacagctcaattttatcttaccttaatgtctccaggaacaaatagattaagaattaccgtctctaagaaagacctaaaaacaaacaagaaacgtatgacctattccaagttgatgagctaaagtttacttggatgaacagaggtgatatttctctagttctgacgcatccttgaaatgaagagagtgcattctgacaggaatcagatgccgggtccaatcctcaaagcaaatctcatcttcttagtgtcaccttcatattaaaagcacaccaggaagaagccaggttggctggcaatggagaggcctctggggcctctggtcagacatgagctccgaggactgagctgtgctcaggtctgaggggcaagtagatatagggaggcaaataggaaaatgacgtgatttcatttcctttgagtgtatttttcagaatacaaaggcccactccctctcaaaattgtacagatgtctgccatgtacttgcattcagacttttccctttccgaggcatgtggaatactgaaatacttctatctgctcagctaccaatgtttctgccattccaagggaatctcaaaatgagtccttcacttctggatgtacatttaaactagtctctaggagtgatccacagacccacaggccctctacatcttgaataacttgagtttatttatttaaaatgcatattcctgggtcccacccacgtcagtccctctgaattattatagaacctaatagaacctttggatgtacggcctaggaatctgcagtgaaacatgctcctgtgttggtttttttagtaccccaaagtttgagaagtattgcatcttttctgggatgcttattttttaaaccctttttctcactcctggggcaaaaggctttggcaaccaccaactcattactgataacaaagcagcagcaattaagaaaggatggattcgaggtttcagcttgagggtcatgaattacaaagaagagctttgaggaagcagtctggtgggaggctactgtataagggatctgaattccacctgcttggatgtaacaagcattgttctgacttaaactttttggttggtttgtctgaagcggatgaagggagaagagaattgacagaggagctgtgatgaggtgaaagcctttccaagggtcctgtgacacaatcactgattatctcagtgaaaaggtcccagttgctctcattaattcctaagtattttctcaaaaggcagaaaagaggtagtaggtacatcttgtccccacaggaatatattgtgcttctggtaagtaattttgaagataactactttcttctcttggtgcttgtaaatactggataagatgttttgattcagtataagaccatactatacgcaagcattgtgtgttaggcggcagggcaaaggttccaagccactatcctctaagccaggagagacgcttcggaggcctgtcttcctggctgccccaggccggcacccgctgtcaccggcagcgctgactcactgaacttcctgctgctttccccagcagagagggctgactcagagtctgcacatggggtctgcttccaagttcttccaactgggcatatgcctccgccactctctgactgtcctttgcctgtgccaaggtttctgggaagaacaggaagttcagggatggcggaaaatgtttggcagattccctgagtccaaagccggagcacctgctcctgcctgagggcagagaggactggtaagtaaagcactgagggccccaaaggggtggggacaaggttaagggcacgagggaccttcttgtcagttgaattctctacataaaatcacctgtaagaaaaagtacatgttctcaaacttcagggtgcattacatattgttaaaatcaatattgctaaaaatttggatcccacgataccactcccagagattctgactcagtaggtctggaatgggctccaggaatcaatgagttgaacaaactcctggagactctgaggctggtggtccctggcttgtgctctgggaagcaatgggctttgaggcaatcagtttccctccagcttctctttcttctgcaagggtttttgcctccatagattcagtgctggccagaaggaaataagcgagagggccaagagtgaggaccagcacctccttctgaagcatctggcaatttcttggctggcgctggttgaactaggtcacatacctgctcatccttgaacttctcttgcttttaagttggacagtcaagttacattattctgaaaaataacaagaccaaaacacatgctgctggggaaatatatataatttgatgctacaggttaaatttctcaaattaaaaataaaaaagtttttgtttctgcttatatgaaaataaaaatacaacagtggaattcggaataatgtctattatgctgaaaagtccctgaactggtctgtgatcagttatttatcagagaaactgcaacagtctctgttacttttgcctattggctacaaatctgctctggaaaattccagt

SEQ ID NO: 6042 - DNA, 6000 bp, Homo sapiens
tggatccattgttgcaagcagtaaataggaaaaaaagaaaaaaaacaagaaagagtaggacatgagttctcaagaagatcaccatccaactgggcaagtaaaaatttacctgtaggaaaacatgatcactataattggttctgaaactaaccaaaccagtgtattctgctgtggaaaaaaaaaatgaggactgttctctacgttttactctgaatttttcttgaacttttagcactgtttgctatcttttttctagagaaatccagcacatagcaacataagttccagaaagaagtattaacaggaaaactgaccactaaccacaggctaatcattctttttttttttttttttttttttttttttttttgacggagtcttgatgtgtcacccaggctggagtgcagtggcacgatctcagctcactgcaccctccgcctcctggattcaagcgattctcctgcctcagcctcctcagtagctgggactacaggcatgtgccaccatgcctggctaatttttttgtatttttagtagagacggggtttcaccacattgaccaggctggtatcgatcacctgaccttgtgatctgcctgcctcagcctccccaagtgctgggattacaggcgtgagccactgtgcctgggccagactaatcatacttaattcagcaactttatttttttatgggcacatgggctcccacttgaaacttgagtttgcatccatttttgctggtagaatgtttttatttgcaggataaaataaaacacatcaaaagttcatggcatgtcatcaagaacagcatacctgaacaaatttgagaatcatgttccataatctttgttcttcatgagcaaacagactcaaaggacaaaggaagtgtcatatgatacttctctttcctcctcctcctcctcttgcctcctccttttcctcctcctccttctcctcctcctctcgcctacccctgctcttcttcccctccctgcagtggtagctatcccctgggctctctcccaccatccttcctctgcattccacccacccacccacccaccatcccagtttatcccagaacaaccaaaataaccttcaaattgattccccttctatagtccctacccactccaattcatcacacactcttcccagagactcacatttctgcagctcggattttttcgaaccctttccccatcaaaaacattgattgattgcccacttagtaatgtcccaaagtcttaggttcagaatcaaatcctccaaaatacaacgtctggtctttggttaatatttgaatacatgtgttatctacacacaatttatgttcaactaatcactcagaagaaatttgacaagagacttctcatgtcagtggagacatgtcaaatcagtttaaaatgaatgtggggctttctaaatagctgcttctcaagtagaaggtggtattggctacgtaaacttgttgttgttactatttcctgtttccttaaggaacaaagagatttattttgacatctataggtgaatatcaggattccaagtggaaatgattccttgttcttttctatgaattgccctgtcattggaggtttactggaatcaaagacaaatgtgctactctggactgttgaaaatcagagtggtcaaaatcacataacttgatgtttactgtcaagggaaaatatggctggtatagttatttcatagagccctgaaattgcctaagggtctatcatatcgtttgctattaattatagggttaaaatattttccacaaaagtctagcaagattaactttatgccaaatgataccacccctctagtgtggcaggacagagtgccactgtcttctttatatgttgttttcctttttattttttaataatcatattttacttttagaatctggaaaaaaatttctaaagaaactttaaagttcgatttaaaaagtgatatgagccttcaactttgcaatccggtgtttgttggatattttaaaataagctttagtggcttgtctcctctaagcagggctatttcgacaaggcctctttcagtacctgttagaaatcaccaccagattcagagctcaacaatgggagtttgttcattcaatctgatcattattgactaatttgcatttagaatgctgtctccaaccattaattagtcattcctcaaaacaacccaatgggagagaggaacataattatccctgtttagaaatgaaaccaaccaacagtgcgttcagtgccccacagaggcagatcccctagctatgcagtcatggctgctgggaatatgccagctgtcagggccaccacacaaccaataggagatgcaagagtgagaattttacaaaatacctccgatgttcctatttcataagcatttgggtttagatttgctgagattcgtcttgcaaacctttataaacataacatcagatctatcagaccacttttcatggcaacacaacataagatgtgcaacattgtatatatgctttttaaatgttcacaaattccctcaaataaccaacagaattataatagtgaaggtaaggaataatcaaacagcaaatacatactaaatattcattattcacagggctccatactggaattatgaacagggatgggggcaagaaattaaaaagatacctacagccctggctttgctctaatctaaggtacctagaatttgataaagaatccagcgaaatgcatataaaacttactgttttagaaaaatttaattatatgtaatcttaattttagaataagcatttttttctatatctttctccacaaaaatacattttctttaagttaaggtgcaagggtgcacaagttactttagaaggttggaaaagtcccaggaattggccctgaaattatttattttattacttaaagaacgctggtgaattctctcttttaagaaagaaaatatggggctgggcgcgatggctcacgcctataattccagcactttgggaggctgaggagggcgaatcaccaggtcaggagttcaagaccagcctgaccaatatggtgaaactccctctctaccaaaaatacaaaaattagccaggtgtggtgggacacgcctgtagtcccagctactcgggaggctaaggcaggagaattgcatgaacccaggaggcagaggttgcagtgagccaagattgtgccattgcactccagcctaagcgacagagtgagactgtgtctcaaaaaaagaaagaaagaaagaagagagagagagagagggagggagggagggagggaaggaaggaaggaaggaaggaacgaaggaaggaacgaaggaaggaaggaaggaaggaaggaaggaaggaaggaaggaaggaaggaaggaaggaaggaaaagaaaagaaagaaactatgcgccgggtgtggtgggctcacacctgtaatcccagcactttgagaggccgaggcaggcatatcacctgaggtcgggggttcaagaccagactgaccaacatggagaaaccctgtctctactaaaaatacaaaattagctgggcatggtggcgcatgcctgtaatcccagctactcaggaggctgaggcaggagaatcgcttgaacccgggaggcggaggttgcagtgcaccgtgatcggcaccattgcactccagcctgggcaagaagagcaaagctccatctcaaaaaaaaaaagaaaaaatttcctagctgaccatggaaggataacaaatgtgatgaatctggccgggtgcgttgcctcacgcctgtaatcccagcattttggaaggccgaggcaggcagatcacttgaggtaaggagctcgagatcagcctggccaacatggtgaagcctcatctctaccaaaaatataaaaaattagccggtgtgatggtgtgcacctgtaatcccagctacttgggaggctgagggaggaaaatcgcttgaacccgggaggtgaggttgcagtgagccaagatcgtgccactgcactccagcctgggcgacagagcgagactccatcttaaaagaaaaaaaatgtgatgaatccatgtgttattatttcccactacactaagccatcaatatatcatgattctctatgtgttcttctaacacacaaacacacaccacacacacactaacacataatcgttgcttttaattgaagaacattttcaacacctctcaagtggcaaaaatcctgtttatattcttgtctgccccagtttatggcttcataagaattttttcatctgttttttgaggcagagtctcgctctgtcgcccaggctggagtgcagtggtgtgatctcagctcactgcaacctccgcctcctgggttccagtgattctccagccttaacctcccaagtaggtgggattgcaggagcccaccgccagacccagctaatttttgtatttttagtagagacagcgtttcaccatgttggccaggctggtctcgaactcctgacctcaggtgatctgcctgcctcagcctcccaaagtgctaggattacaggtgtgggccaccgcgttccagcccagttttaagaatttaatcttcatttcaagcacaaaaagactttttttttttttttttggctggtggggcctcttttttgaactctttagggccaaatcaacctttcttccttgatcccagggtggagtcaaatgaatctaacagacaaacggcccaacatccttcatgtcactgccaacttctcattcaaaggggtacttggggtggcaggtggagttataattatagcttagaaaaaagcagcatcagcagctgttgcttctgtttgttcccagctataactgtcatcagtggctaaactggcataaacaggcctctacaagtggaaaaacatttaacccctgttcttgtcacactctgggtcctctcagtggccagagaacagaaagaaaatctgactgtgcacgagcgaagggtgacaccgggcgtgcagcaccgacctgaaggcacctcttcgggggagcccgaaatttgaagattctctttcctgtcggagactacaaaccaaataaataggttagtgcccagagtaaacctatgcattttaattctgacctctacttgctgtgattttcattttcctggcagagcttgaaaagaagagtgaactactaaatgaaagaaaggaaagttaattaaggactgttatttaaaactaccgggagtccatgagaacaaattatgaaatgggtttaatttattatgctcctctcccaattttggctgtattcgcactaggcaaatagacaaggtaaagatggaaaaataaaaccggttttgtggcatgagtcccatccttttgtaatgccacttacttgtgccaaaaggccctaccttctttattaaaatcagtaatgttgaaagctaagtttgtgattttagaaaatgctgtaaacgtagctccagagtttcatttccttagggaaaataggcaaatcagagttgaattgtttttccagcaatgagtaaagatagaaaattttcttgtttatgataaaatgtgtggtgtaggctactttacaaaagaaatctgctacagaatttattttttgtgtctagtacaattctatctaaaagcttcatgatttcagtctaagtagctctataagactctcctcatagatccttttgagaaaagtaagattttaaataaatctcattttatttgcatatgttctatcttagccagaaattgagcaagattttcaaagattagctttgcgctgtctgtttcaaaacctgaatatttaatgtcttggtgaaaagtggtggaattccaaagaactcaccaaaaacaaggcttttgggcccagtgctcatcctaaccacattcatgaaatggactcaagtagaaagagttgtaaataatgacctcattttgttcaactccaaagagaatgtgaaccatccctaagcatttatgtacaacttgtc

SEQ ID NO: 6043 - DNA, 6000 bp, Homo sapiens
ttcaccattcgggtgatgggtgccctaaaagcccagactccaccattacacaatatatgcatataagaaacctgtaccccctacatccatacaaagaaatttaaaaattattaaaataaacattggacttaatagtattatctcctagaggtattaaattaattacgtgttattgaaaggcatttaataagtgtgctctattattagtattaataaggacaataaaataatacccttttataaccaaaaaaaagttggtgcaagcctcccaccacatgaacatatcaagggacctctgtgaccccttctcaacagtgatctgtcaaacatcatcagtaatccttgaaacaaactaacagagcccacttgaccacaggagggaaggtattaggttggtacaaaagtaattgtgggtttcaacttttttaaaaaaacactaagtcgtaattacttttgcaccaacttataaaaggcttggagagaaacggtagccatcttctgaatcatttacgcttcctgccccagcagtaaagtctggagatctcacctgaggacctgcctgtgtcgcagaaatgccaggtaatcattagtgatcttgcacaggactcgtggctgagaacagcttctcacttcagaaaagcttgttattttttctggcagaagcagaagaaaaaaatccagacttagggttaaattttataggtgtggtatcatacatcttcctcactgagtaaaagtagtaactacaatgccaatggttttttaaaaacaccactgggtcctctttatttaatgtctcatctaaatgttatactgtatctcttcaatcctcacagtttaaagggaatatgttgaaaataaatcccaaagttgttgttgaattacagctgtgatgggaagcaaaataacttagaggtcatggaatgttaaagagctactgaaaattatatttgacattttccttttttttttttttgagatagtctcactctgtcgctgaggttggagtgcagcggcataatttcagctcactataacttctgctcccaggttcaagcgattctcctgcttcagcctcccaagtagctgggattacaggtgtgtgccaccataccctatctcagttggggttacaggtgtgagccactgtgcccggccatgtttgacatttttttttttttttttgagacggagtcttgctctgtcgcccaggctggagtgcagtggcgcgatattggctcactgcaagctccgcctcccgggttcatgccattctcctgcctcagcgtgtttgacatttttaatgataatggaaaaacgtttatgccttagaagtgaataaagggctgcctgtggaccaataagaccccaattacctaaagaaaaatgtacacacacacagatacaaaactagcatgaactataccaacatgttaccagtggctgttttgaggtactgaaattgcgggaaatttttcttaattggtctgtattttctaaattttccacagcatgcacatggtgaagcagcactgcacagtgaggggcacacgggctttgggagtcacacagagttggagccagtccctagctctgccacatactatagggagaatgtctaagtcttttttttttttttaaggcagggtctcgctctgtcatccaagctggagtgcagtggtgcaatcatggttcattgcagcttctacctcccaggctcaagcgattctcccacctcagcttctcaagtagctgggaccacaggtacataccaccacatctggctagtttttaaattttttgtagaggtggggtctcgctatattgcccaggttggtggtctcaaactcctgggctcaagagatcctcctgccttggcctcccaaaatgttaggattacaggtatgagccaccacactgggccctgagtctttccatcttcatctattaattggcttagaggttgataatgaggactaaatgtgatgatgcttatcaggtacctatggaggtacttgagtgcacattgtagagtgtatagtcaggaagtctaactggtgtattatttttatagacacaaggattaaaaaaaaaaaaaaactcttcagcagaggctcccacctggacagttactaaggttctctgggtaggaaataatgctggcagtctgacatttctcacccattaacttttttcctatcttaaatgcactaagattcaccagtcctgtcccttgggctatgaactcctggccctgttgtttagagtgagtaacagattcaagctcctcaggactgcaaaagagcagggcccaagccacaagcacaatgatatgctccctccatgacatgcagacagtgcctcaatggcagagggtccatggaattagaaggggaagagggagcctcttcccaaaagaaaaacaaagttgcatgcaaactgtacctaagcactgtaagacgatcttaaaactttcacttctcccaggggccctcccagaataagaaattactcttatccccttccttgagattattatcccttcagcaatgttattggttgatttctgttcatatcatataatagcctacactttacagtttttctcatcctttcctatataccttctccacctgcacagtgtatactatagttcgtcaattaataaaacacacaatcaagtgtttattaagtacttattttgctaaatgccatggagaaccaaagaaaaggctgtgcgcagcagaaaaagtcttgcatcagagaaagcgggccttggttctttttagtactccttctatccgacatttggccaagttacttatcctctctaggcctcagtttccttatgtgtaaatcgagggtaataatagtgtctatgtcctagggttgctgaaaggattaaatgcaacatttatccttcttgtacctcaatttagtcatcacaacattgtgattaggattaaatgggaaaatattaatataggatatctaaaagcatgtagcatgtaagtgagctttattgtattgtccttaagaagcttgcaatctagttagggaaacaagaatcatataggtagaaagattagaaaataagaggttggtgataaccaagatcatttaaaaaagtaaatgagtgcccattatgtgtcaagtcctttataagtgatctcatctaataaggagaggagtcctatgagaagatcattcatgatctcatctactccagtctagaccattagtatgtggcagagtcaaggctgtaataactaagaggcaggattcagactcttgtcttacctctatatttccaaagctgaagcatcataaataccaactgctgactaagccaagaggattgtccctgtgcagtaggaaaagctgggccaccaggtttaatgaccaccaccacttgttctgggcagacggtgtatcagacactgcacagattatttaaccaacttgtcttttcaacagctctatcagttctcgataatctttgtttttttgagacggagtctcactttgttgcccaggctggagtgcagcggcgcgaactctgctcactgcaacctccgcctcccaggttcaagtgattctcctgcttcagcctcccaagtcgctgggattaaaggcgcccgccaccacgcccggctaatttttgtatttttagtagagatgcggtttcaccatgttggccacgctggtcttgaacttctgacctcaggtgatccgcccgcctcggcctcccaaagtgctaggattacaggcgtgagccaccgtggccagcctcaataatctaatttttatttaaagaataggaaacacgacttaaagagactattcatattaacagctactatttattgaaagctacagcctatctaaggtggatgcttttgaatctgaatccatgtatatccaaaacagttatttatcactaagtaaaacaaacaagatccagggctcccccgttcacagaatggccaagcaaagagaagttgagagtgcaagattgcctgtgggggctaagctggagttaaattacgatcaagtttttctttattcagaactaggtgtcaggcacggtactaaaacgtattcacaccctctgtgaaacctgctaattactccatttacacagaaggaaactgaggctcagagaggtgagggaactcacccaaggtcacacagcgagcgaacagtattcgaactccagtttaggtgagtcctggggcccagagtctttcctcggcatcaacaaccacaggaacaaatcacccagcattagtccgtttataaaggcctaccgtccccaaagtgaaaagaggtggaaagggccgcggaaagagcccctggagcacacacgccagatcccagcacttgttcctccgacctggccaggcagggactgtgccctagagccaactccctcaaagtccccagccccaccactcggaggactgacgacccagttctcccgcaggccggaccgcaggccctaccggcctacccgcaggccgacctttattcgccggaggtccccgcacttggggtcggggccgcagctgccactgtctcagcccaaaacacccgagttctgccagacccggggcagcagccgacgcactaccgccatcttgccccgcggtgttcgctttcagaaccccgccaggaagcaagcatccagttccggaaaatgacagttccgcagagcttcttcgcccgggaaggaaaacttccccacaccttgcctcccctctggcagctgaaatagcggaggtgggataaatgccctccccagccgagaaaagctggaacccactccggccggggaggctggaaagaaaactggcccctaggcgcacaacggacggcttaagacgttgccctctgcggggcggaagtggggtgcggacagcggaagttatcgctccggccccgcctccgcccccggctggcgtgagctgggtgtttcctgcctctctcagtccgggtttggagactcctgcgtcctccgacttttcatggtagggagggcggtgcccatggactaggggttgagggcggccgagggagctgggcagcagcagagtataagaagggaccgagaggagggggtgtgatgaggggcagtcacgatagtggagaggcatttgggggattggttaggggaaaggcccggggtgggggaagggctttgggtggagaattaggggcgggggtggtggtagggaggctccctggcggttaggaatccgggaagcacatttgggcttgcggagtagatacgtgtgtgcgtgaggaaggggtgtctccaagtgagtcctgagtgctggttggagatgggagttggtgattgcgaggagaacaaagagatatcaattgaaaacggacatttgggggtggaaaatgaggatttggaggattatgaaggagaatgaatgggcaggttatgagaaggtgaggtaggattccttggggcggagcgtttggcgttttggaggttgtggctggagtcgctgagtttccaggaagtggggaaggggctcccaggtgcgtctgaacacacggcccagtgagggaaagaaatcgagagagcccagcaggctgatgtgcgttcagtgcttggaatcctggggagagatgccaggggcctgaggttaggatacctgcgccacggagttcagtgcctcagctggcgcctgggtacctatctgtaacttccattgaggccagaggtgaccacgcctaaggagcggaggatgtttcaagatctgtctctcagctgtggggtttgtctgcttgggatcctcaagggtctgttccctgagtagctcattgtccctgggtagagatgaccaaagattggcccagatcttctttctacttgcttgcttgtttgtcacgtccctggaaagtgcagtcttaagggaaaatcagtcccagtgacgctgctgaagaaaagtcagttatcctgtagctgacgttgactagtcc

SEQ ID NO: 6044 - DNA, 6000 bp, Homo sapiens
atgcggccttttgtgtctggccactcagcatcctgcttccaaggttcatccatgttgttgcatgactcagtaaccattcattttattgccaaatagtattcctttgtgtggatatactgtgtttgtttatccattgagaatttgagttgttttctttttttggctattatgaataatgctgctatgaacattcaagtttttctatggacgtaagttctcatttctcttggctatatttctggggtggaattgctgggtcatatgggaactccagattttttttttttttttgagacaggatctcactctgttgcccaggctggagtgcagtggcacaatctcagctcactgcagcctctgcctcctgggcttaagcaattcttgtgcctcaacctcctgagtagttgggattgcaggtgcccaccatcatgcccggctaatttttgtatttttttttttaattagagatgaggtttcaccgtgttggccaggctggtctcaaactcctggcctcaagtgatccttccgccttgacctcccaaagtgttgggattacaggcgggagccaccgtgcctggcagtaactctagatttaatatttggaggaactgccagaccgttttccatagcagccactccattacacattcccaccagcagtgtgcgaagattccagcttctccacttcctcatccacacttatggtctgtctttttgagatcatattctttttttctttttttcctagacagggtctcactttgttgctcaggctggagtgtagctgcctgaacacagctcactgcagccttgacctccagggctcaagtgattctcctgccttagcctccccaaatgctatgattacaggtgtgtgccgccgcacctggccaggaaaatattcctgctggtcatgctacactgtagagtctgctgggcttgggttcaaatcttaccagttgtgggatgatctcagacaagtggcctctttgtgtcattatctataaaatggtggaagaattcctcctttccaggctgtcaaaagatgaactgagttagtggcaggatcaggactgtgccaactgtaaagtgaggtgcacgtgtcttgtttttataactgggtaccctgggtataaagtccctgagatcctgacctgtctggctcaccaatctctccccagcatctggcactggacctggcatacagtaagcacttggtaaatgcagacccttggctgctgcccaggaacctttcttaggggaggtagctgagtccacctggggcagtccaggagctacgtggagagcaaggctgcgccccacatgtggctgccacatgactcacagccaatgctgagggccttgaaagtttttccttccctaagaggaaacattatttctggctaggcacagtggctcatgcctgtaatcccaatgttttgagaggccaggttatgaggatcacttgagcacgggagtttgagaccagcttgggcagcatagcgagacctcacctgtacaaaaaataaaatttaaaaagccaggcttggtgacacacacctatagtcccagctattcaggaggctgaggcaggaggatcgcttgaacctaggaatttgaggctgcagtgagctatgagcaggcaactgcactacagcctgggctacagagcaataccctgtctctctctaaaaataaaaaaaaaaagattaaaaattaaacttaaaaagtatattcatattgttgtgtgaccctcgttcatctccagaactctttgcatcttgcaaaactgaaaccctacgcccaacaaacagcaacctcccattctcctctcccccagctccatcaaccaggactttttttttttttgagatggagtcgctctctgttgcccaggctggagtgcagtggcacgatctctgctcactgcaacctccctctcccaggttcaagcaattctgtctcagcctcccaggtagctgggattacaggtgcccaccaccatgcccaactaatttttgtatttttagtggagacggggtttcatcatgttggccaggctggtctcgaactcctgacctcagttgatctgcccacttcagcctcccaaagtgctgggattacaggcatgagccacttcgcctgacccatcaaccagtatttttaaagcacctactaagtgccaggtgctagacctgtggtcatgaacacgttcccttgcttcatggacactggtacccattttttaggtgaggaaactgaggcacagagagagagggaggctcttgcccacagctcccaccacagctccttctcccatcagcggcagggcaggatttgaaccccagtgtctggtgcagaggccaagctccagctgcttagcccaagatgagtcacttccctacatgggggcctcagttgccccatctgtgaaatggggatcaggaaagagctgggttagtgatgatgatgctgagcgctcaggccccttccctctgagcttagagaagaggaggtcgccatccctggccccatctcccccagttccagtccccaacatcagctgccttatggctggaatcacccttgccattttctttaaattgagacaggcctttctgcagaaatgggtcccagactcactcctccactctcaacctggcccagccccagccccagccctgagggcccccagcagatagctgtctgtcagggaggtgtgaggggccctgtgtttaccttcctctccactgccagacatctgcctgtttactccggaccctcagagggttctctttcccaccccaacccccaccatggagggagcagcttttggagaggccatactcctctccaagcctcagtttcccacttgcaaaatgggtagagcaaaccctacctcacagcctgttctccctctcatcccctaggcttctgtgctcagtgagttaattattagggtttgtttctttgtaaatgtttcacgctggaggtgaacacatcactcctattcaggggtacacacacacacacactctctctctctctctttcgcctccccacccagcaattctaaaatttcactttccagctgttggacctcaggagagatgctgctattttcaagctgaggaggaaggagctaccccacagtccctgagtcagctcaatttagtgaaaacactaatgatgaaaatggcatggctctgggccgggcacggcggctcacacctgtaatcccagcactttgggaggccaaagtgggtggatcaactgaggtcaggggttcaagaccagcctggccaacatggtgaaaccctgtctctactaaaaatacaaaaaattagcctggcgtggtggcgcatgcctgtaatcccagcccccaggaggctgaggcaggagaatcgcttgaactcaggaggcagaggttgcagtgagctgagatcacacccctgaactccagcctgggcgacagagtaagactctgtctcaaaaaaaaaaaaaaaagggctctgcacagcctggatgctcccagcatcttcactgcgactgtgaggtgaggacttttgtatgccccactctacagggggatgtagaggcactgaggcacaaaggtgaagggacttgcatagggctgctgggttagagagtcacagagccaagctgtgggcctgctaggctttccaaccaccctggaggaagtgagctgcccatcctgtggaggtattcaagtggactcagtgctgggtagagggtatggctatgtgttggggcccacctttgttatctgataaaagaaaatacatgggtaggtgtggtggctcatgcctatactctcagtgctttgggagactgaagtgggaggatcacttgaggccaggagttgtagaccggctgccctcccccacccccccttctacaaaaaaataaaaattagtggggtgtggtggcgcatgcctgtactcccagctgctcaggaggctgaggtgggaggatctcttgaggccaggagtttgaggctgtagtgagccgtgatcatgccactgcacttcaacctgggtgacaaagggagaacatgtatcaaaaataataataataataaaaaaaataaacaaaaacgcattgagccaggcacggtgactcagacctctaatcccagcactttgggaggccgaggtgggtagatcgcttgagcctggagtttgagaccagcctaggcaacatagtgagaccctatctctgcaaaaaatttaaataaaattagccaagcatggtggtaggcgtctgtggtctcagttactagggaggctgatacgggaggattgcttgaacgctggtggttgaggctgcagtgattcctgatcacgccaccgcactccagcctgggcaacagagtgagaccctgtctcaaaaacaacagcaacaaaacattgatggcctactccgaggcaggcttcgcagtaagcactgggtgaagaccaaggagagcagctcacatttatttacccctgaaccatctctatgggccatacccgagggtagggacctccttcaacgcctcggaggaaattgtctgctgaatgaatgaatgagcaaacacgtggaggactgggccgggacgcccatttagagactaggacacagtcccagggcggcccgaagtcacggagcaagatcgaatcggagccgattccaactagagccctctccaaagaccgtctgccgctctatccggggatcgcgacacccattttccaggcgaggaaactgaggccctggccctgcacctcccccgcaggggaggccctcgctgggcgggcggggtgcgagtaggggccgccccttctagggcctgcgctcggcggggtccgcgagccggcgggtgggcggggagctggccgggggcggcgcgcggctggaacctgagccggcggaggagggacccgcgggcggacgggcgccgggcgggccggccgggattcaggaagcgcggatctcccggccgccggcgcccagccgtcccggaggtaagtggggcccgggcccgggaggggcggctcagccgaggtcccctcgcgcccctggggacatctccgtggcccgtccggctccggggggtcccgaggctccaaaatgcgggccaggggcgcgggagacggaaggcaccaggttccgcaggcgccagcctctcagctaagtgcccttgggccggacaccggctctttgggtctcggttttatcacctgtgaaatgggcaccaacgtggggcctggggtagcaggtctggggggagggcggttcggttccctgagaccccaagccagggaaccaaaggcccggagccttgcagcccaccttaggagacttggaagagggatttcgggggacctaaggtttgcccttggcccctgagcatgtcggagggaatttggagtctggagcttccaaaggcttcttcttggttactgagtcccggagagacggctgtttcctccaagaggcatgaaaatctttaacctctagttctgccctggactctcaggacgtcccgggggcgggtggctcctgggggtgggtagcgggggtgggggtgggggagagagagactcccacactccccgcttgcctggaaacaccaaccacagatgcattcatcgagccacccactgctccagcctgccccagctgttccctctgtctgtcctctctgttttgcagatggggaaactgaggcttaggtcggggatctagacaattgggatttaaacccagggactatccagccccaaagcccttcccaccacaccaggtggcctgtcctggggccagctctgcacacagggcctggtgcccccggggtgcttgggaagtggcagggcagaggtgggccctgtggctgttctggctcagcttctaaaacaagagcctctgctgggggcagaggggccgtgaacccctgaaatgttaggcagataccctgtgggagctttgttctgggat

SEQ ID NO: 6045 - DNA, 6000 bp, Homo sapiens
cctgggtgacagagcaagaccccatccctaaataagtaagtacacgctccatgaacatcaaaaggcaggacacccagaaaattcaagcaagctgggctcactgcttggtaagaaatgcggaggaccgggggtggggcaaggactgccttgtgtaagagaactgctttggtattgcccaaaccggaacaagtccttcatctaacgcagttcctaatctttttgtaatctggggcctttgacatctggggaagcttctggacctcttccaagagtaatgtttttcaatgcataaaacagaacgaatgcatcgtattacaaatgatgccagctatcttgcattgaagttttgaatttttttttacttgtaataaatagatggagttcttatagtacacattaaactataagaacagctggctcagtaactactataattttgaagtaatgatacatataagttatattttgagatatctccaataactatactgtggtttaaaaacatctgtgattttgactgatgacaaagttagtgggtttttttttccgttttttttttcttttgagatggagtttcactcttgttgcccaggctggagtgcagtggcgtgatctcagttcactgcaacctccacctcccgggttcaagcgattcttctgcctcagcttcccaagtagctgggattacaggcatgcgctaccacacccggctaattttgtattttttagtagagacagggtttcaccatgttggccaggctggtcttaaactcctgacctcaggtgatccaccggcctcagcctcccaaagtgctgggattacaggcatgagccaccgcgcctggccagttagtgacgtttgtaatgcaactgtaatttgttacctacattcataattgaaggaaatattaaatttcagttaaaggccagtggctcatgtctattatcccaatttaaaaaaaaaaatttggggaggctgaggccggaggattgcttgaagccaggagtttgagaccagcctgggaaacaaagcaagaccccatctctacaaaaaataaaaataaataaataataaattagctgggtacagtagcatgtgcctgtagtcccagctacttgggaggctgagacaggggtatcacttgagcctgggagtttgaggctgcagtgagctgtgctcgagccactgcattccagcctgagcaacaaagtgagaccctgtctctaaacaaacaaacaaagtaataatacgtttcagttagaggttaatgaaaataaagaatttttttcccacccaagttaatagacctcctggattctttctgtggacctcagcttactcttccctaagttgttttgtttttgtttttgtttttgttttttaagagacagggtcttgctctgtcacccaggctggagtgctgtggtgcaatcgtagctcactgcagcctcgaactcctgggctcaagggattctcccacctcagcctcctgagtagctgggactacaggggcacaccaccatgcccagctaattttttaaaacattttttatagaaatggggtactgttctgtcaccaaggctcatcttgaactcctgggctcaagcagtcctcccgcctcagcctcccaaagtgctcagactacaggtgtgagccaccatgcccggccttctcctttaagtattgttggcctcactttcccaactaaaatgggagctcactaagaacaaaggctgttccttcatcttatacttagtaccttgaaagggcctaccacacagtaggtggtcacgtgttagtctgttaggtcttttggattttctaggtagacaatcacatcgattgcaaataatagtctttctcttttcagtctttgtatttcttttttcttgttttattgcattgactgagctcatcagtgaaatgttgaatagtagcaatgatggagggcaccccaatcttattatgctcaatactcattaatttatgcaataggaatgtaaagtacctactgcaggtcaaatcctgtgcctggggataacagtgtaacacatttgagatcttttcctgtccactgaaatgcctgagcagtagcagtatttcagtaaacacgacaatgctgagaatatcaccaaattctccagacttgctgaagtgttcctttgggatcctggttcccaaaaagtatggacataggtccctgctggtggccccaggttccaggccatcagtaaggttgggggctgcagactggaccactgcaccgtggagcagaggcaagtacccagggagaagactgagcgatgcctctgtaggggaagggatgggggaaggtagccaggggatcaagccaggccagggtttgagccttgccttgccttagcagggtctgttgaggtcaccacctgtctgcactaagggtctaactacaggcaagaccagatgttaagacagagggctgcaacttccaggtgtgcaactaggggacggggtacttgttcccttttcccttcctcaaccagaggggagtgaacacagaggaggggctgttgggagcagtccccacatcctctccactctgtctagctggccctgggggaggaggagaatttttaataaaatataaggaagttgaagttgaaaatggaccagactatgccttagaaactggcatggggctgttgtaataatacatgactgagaagtcaggagatctgaccaaaatgtttttaagaaagccttctggccagacgcggtggctcacgcctgtaatcccagcactttgggaggccgaggaggacggagcacgaggtcaggagatcgagaccatcctggttaacacggtgaaaccccgtctctactaaaaatacaaaacatttaaccgagcgtggtggcgggcgcctgtagtcccagctactcaggaggctggggcaggagaatggcatgaacctgggaggcggagcttgcagtgagccgaggtcgcgccactgcactccagcctgggtgacagagcgcgactccacctcaaaaagaaaaaagaaagcctgctgcagtccaggcatggtgtttcacgcctgtaatcccagcactttgggaggccgaggcaggcggatcacttgaggtcagaagttcgagaccagcctgaccagcatggagaaaccctgtctctactaaaaaaacaaaaattagccaggcgtggtggcaggcacctgtaatcccagctactcaggaagctgaggcaggagaattgcttgaactcaggaggcagaggttgcactgagccaagatcatgccattgcaccccagcctgggccacagagtgagactgttgccgggtggagtggctcacacctgtaatcccagcaccttcggaggccaaggcaggcagatcacttgaggtcaggagttcgagaccagtctgacccacatggtaaaaccccgtctctactaaaaatacaaaaattagtcaggcatggtgatgctggcctgtaatcatagctactcgggaggcttgaggcaggagaattgcttgaacccaggaggcggaggttgcagtaagccaagatcgcaccactgcactccaggctggacgacagtgagactccgttccaaaaaaaagaaaaaagaaaagaaagccagctgcccagcagaattggggaaagccgagtcagttgaagcagacaatacccctatgggaggcagaagaatgcacccccctaccaagatatccacatcctaacccctccaaacctgtatgttgccttaagtggcaaaggggactttgcacatgtggctatgtgaaggatcctgagctggagagattagcctggattatccaggtggatcccatataatcacagggctccttagaagggagaagacgctgtgaccatggaggcagaggtcggattgagacagccaaggatcacaggcacctctccagccgggaaaagcaaggaacacactaccctggcgcctccagaaggcacagccccacccacaccttgattctggccctgtaggacccatctgagacttctggcctccagggctgtaagataacacatttgtgttaagccactaggtttgtggtgatctgttaacagcggcatgaggaaactaacacaaccccaaggaggtgagcctctccccacagccccgactcaaccggaagggagaggtgtgcagaagacggctttgcaggatgtttgggacaaatggtctctgggggaagacagaagctaacagaactgattcgactgtgtgaacagggtgctgggagggcccacaggggagggacttcagagctgggcctgcgcctgcggggccgtacgagttggcccggagcaaggcggcccaggacaggcaggggctgcacgcggtaaggctccctcttgccagtaccatcccatgagcagcctcagagccctcgaccaagggaagttctgagggctgagaggttgctcattcgtcagagcgtgctgcccaccctccacccctgcatggcagaaactgtgcaggggacgaggccaaggaatcaggagacccagaggcaggggtggcccggagacggtgggatggagcagaagctccccgaaaggggttggcggggtggattcgccccgctccagccggcggaggaaggaagtggttcccccgcccacccttcccttaggctggcccggggcaggatttttgtgatccgcgattcgctcccacgggcgggacctttgtaactgcgggaggcccaggacaggcccaccctgcggggcgggaggcagccggggtgagggaggtagggacgaacgggtggactgaccacaggcagggacaaggggactaagacccgggccgaggcctagaagcccgccgaccgttgggggtctgcgggctgtgggggcggggacgggggcgggggcggcccgggcgggggcggggcctggtacggtacggggcgggacgggctgggccggacctgctctgaggctcccagtcgcagcggtgaccgcgggcgggtggggcgccgggtaagtgctcgggccgggcggggggcgtaccccgtttggcgtgcagccctttctacaagacccccagtgcccgatccttccgagaagaggggacccccccccgcatctccgctgtccaggcctcgccgtggagccccagcaggaccccagccctcggttgccctcggctctggcgtgtcccggcgcgggcgggcagtgcttcccctcggcagggactggagtccaggggaggggaacgcgggagacgctggccctagtgaccccccgatcccggagagttggtggtgcgcgccgccctgggccaggtgccttcagttcttcacactccgcgcagcagccacaggtgaccatcgtcgtctccctcttaacaggtgaagaaaccaagacgcagagaggccaagccccttgccttgggtcacacagccaaaggaggcagagccagaactcacaaccaggtctgtgtcccctaagtcctcggatgcatcgtccctgccccgctgccctcccgggagattgtaggagagaagcaggggcagaggcagtgctggatgtcccgggagaaggctgcaatgagcaggcccagccatccctgaaggaggagccccggggaagcaaactcttccctagaaacactttaaaagcacccacctgttggagacagagatgctgaggaacaagagtgattggggccagggtaaacgccaagacagagaggggagagcagttcctcagtggaactccctccaacattgcccccaccacttttaccagtgctgggtgtgggggatcttgcaggctcagcttcgtgacttggcctgtctctgcctcagtttccgcatctgtcccatgaggttaagcatgtacctacctcgcaggattgctgagaagatgatataagatgcttggtgtacaggcttagcccctggcaccaggttactaccaaaagttcatggttccagtgcttcctccac

SEQ ID NO: 6046 - DNA, 6000 bp, Homo sapiens
acaggcaattatgtggattagaaattaaggatgaaacatcttcccaaaaggtcactgttaagatttacccatcatcttggtgctcctagctctctacgaccaacacagagtggctgacacttcaaccaggcagcttggattgcaatgaggacaatgcaatgcatttgggctggaaacactgcacaggtaatttttgcaggtgggtggcagcatttagtgctgagtggctgttgtggtgggcagagggagagaaatagaagggacaccttgcagacttgatgggagacttattctgaagagattgattagcagtgttgtccctggctaggcagtggggggagggctctgtgtcaagaggtgtgtgtgtgctaagggaagaggaagagcctgcttggcaacctggcttttcaagccttggaccagacagggaagaagaagaagaagaagaaacatttacgtgtaatcccacctcccaaagacagctactgtcaacactttttttccccacctgccccagattgaggatactgtcaacattttggtgtgaaccctatttagtcttttccctagttcaaatataaacctgactttaaaaggaaaatgaaatcatagtgcctgtaatattttcgtgacttgtttttcttttaatgtaaatcatctttttccacgttactaatattcttccttaatattgttcatgtctatgtagaatttaactgtatgaatgcactctagttcatctatgcggtggttaagagcgtaggctctgaagactgctagggttcaaatcccaggtctttcaacatcaactggctgtgaaacatgggcaagtgagtaaacgtttctgtgctttggtttcctcaccggtaaaatgtggataaaagcaattccttcacagggttgtttggaggagcaaatgactttatgtatgtgaggcacttagaataatctctcagtgttattatttaaccaacatttttgttgaatatttagttcatttccaggttttcactcttacaaatatactgtaattaacaaattcagtgcactcttaattgcttccaaagaaaatatctgtggtcacatttaaaaatcttttccagagtgaatcatgcactcaacacaaattgagtgtccatatgtacaaggcattatgttatgcacaaagaataaacacagttctcttcttgaagacacctaaaatgtagtaaggaagaggagagaaaaaggctcatgcaaatataagcaaaatactatgcagaaagagggcacacatgaagacctatgggagattctttagctggagaatcaaatcattcaatgacagagaaatgcagactccctcctctgctcccaccacctcccaaatccccaaatcggaattcacaatggtctccttttgtcatgttgagaatttgttacctcgaaagagcacacccagggctgtgttccaaagttaaaagctgggatatgggcgtatactgcaagaccaaatatttaggaaatacctttttctggaaaggaaagaacacatttcacagctgaaaagagaagtgaaaaatgaaactaaagaagcgtggaggtaatatttacttgctagatttatacagtgcctacctttagaaaagctgggctataaatcctgcacgtgaccccctaacacacatacactctgttcccagtgacttggctctttgtgaattatctgcagcatattttgcaatcatttcaccctgttcatctccctgcagccctgcccccaccagctcacccacacttcacccctcagaagaatgagtaagataatagtagagactgagtttggtgtcagatatgcctgggctaagtccaggctccacatttactcagctgggtgaccctggacattgtaattcaagtctcgaagtctcagtttccatatctgtaaaatggggataatcatgacgataacacatagcttattggatcgcagtgaggattaaataagataaaggctgtaaagggcctatcacagtacctggcacagagcactcagtagtgttagctattattattattcctgcacttgtgtgtaaaggggatgcaaaccaattttactattcatttaaacaaattatcagctacagcagcctctgaaacacaggcctataatgcatcctaaagtaaatgcgaaatatttgaatttgtgtcatttctaattttctctattaagttgaaaattgagtatgaacacaccagaatggcaaagaggccagatttctcttgtaaccaacaaaattgagatcgctattaacattagaatgaagatgaccgaaacagcttaatacttctcccaggggcacttgcattttacactggggccagaaccactggacaaaggaaggaaacaggagtggtaaggtttcaggtaccaagggacggacagatgcattttcatagggggaattgcaacactcctgaaagtatctcaggcactcactcatttattcaatacatattatgtacttactatctgccagatactgctctaggcactggtgaacaaaatagatgagacacctgccttcatgggggttacattttagtggggggatacagacaataagcaataaagttaatgaataagtaaactatatagtatgttagacaggatttcagtaagagtaaggggagatagggagcgctgtgggggtctgtcagtactgaatcaggatgaggtcctggtgagcctcactgaacaggtgagatttgcggaaagccttgaagaagccgagggagtttgtgtttcaggcagtgggaatagctagagcaaaggccttacaatgtgcgtgtgtgttgaggggtcattcctggagtgtctggggcccagccaggaggctagtgtatcccgagtgagggggacagcagtaggagatgatgtaaggggatttgtactcagccattcctgtaggtcaccacaaggaccatggcttttactaagtgaaatgggtaaccatggatggttttgagcagaggagtgctgggatgtgatgttttaaatgggttactccgactgctgtattgagaaaataccagaggggagagggaaggtagaccagggggatcagccacaggagaaacctgggtgaaggatgctggttcagccccaggtggtggcagtgcaggaaatgagaagtggtcaggttctgaattcacctgaaggtagggtcaacaggatctcctgatggactagacgtggaatgatgagagaaaggagtcaagagtgactccaggattttgaactgagcaactagaagtatgggatggtcatcgactgcgatggggaaggctgtgtgaggaggagcaggctttgaagagatcaggaatccagtgtttggatgtattaggcttgaaatgtctatcagacggagtcagctgtagtctggaattcaggagagaggtctgggctggagatagacatttgatatagacagctgctgaaagccacgggaatggttagggtcacccagggaatgagggtggatgtggaggcgaggaggtcttatgtggaggcaggtagaggttttccccaagagggagttgtaggcccccctgaaagggatcacgaagccccactggaggggagcccggtcctgcagggggtgccgtggaacttgctgtggttgcagggagtgatggagggaagtgtttgcttctccgggaaggagaggtgctggatagattcctgccggagttgcagaaataattaagagaagtaggtaaggatatcctagtagaacacgtgctcggctgcctccaaggaattattaaacctgggtctaggaatctgttcagacatctgggcaccgctgcctcgcctaccaggctccgcctcgctgcccctcccgcttcccctcccctcctctatctgtcacttctacaaccgctctgattataattgatcaaacagaatcacggaatcacggctcatcttgccgttttgttcagtggcccgatccgaaacgagactctggtagtcgggcaaattgtattcctcctccttggaattccgctcacagaggccttcccggcgtggccggcccagcagggacgcgccgccgcagcggaggagagaacgcgggcggggggctgcaggccggcgcggggggcgcgacgccgccggcggggcgcgagggggtgtgtccgcgccgcggccaccgcggccaccgcggctggcgcccgggtgcgccgcgcgccccggcctccccgggggctcctcacgccgcccctcgcccgccggcggccggggcccgctccctttgacgtcatgcgggcggagggctcgctcgggcggcgctgccgcgggcgccgggagggggcccgacttcgggctccagtccgccgccgtgcgccccgcgccgtgcgcccggctccctgcgcgccgccgcagccacatctggaagcgttcagcgcgtctgcctccggcgcgccgggcgggcgggcgggcggcgcgggcaggggcgggcgcgggcgcggcggggctgggccggggggagtgagcgcggcgctctcgcgcgcccggtgtctccctctcgctgcctctgcagaaacagctcctgccagagcggcgctcggcgcggcgcggcgggcccggagcggcggcggcggctcttcctgcctccgcgcccaggagttgccggctccctttgacagcagagagccgggcaggggcctcaggaggactcgctgggagtgggcagaggcgcctcggcccctgccggcccaggcgggccccgcgcgccccccgcccctcctctccgcctcttctcgccctgcctctcccgatttattttttcaaatggtgtagccgccggaggtgcggtgctcagttcttggaaggggcccggatgtactgaggatgcgttacagtttcactcgaggaggcagtagtggaaaggagcagtttttggggtttgatgccataatgggaatcaggtaatcgtcggcggggaagaagaaacgctgcagaccacggcttcctcgaatcttgcgcgaaagccgccggcctcggaggagggattaatccagacccgccggggggtgttttcacatttcttcctcttcgtggctgctcctcctattaaaaccatttttggtccatggtcaatgagaatacgaggatgtacattccagaggaaaaccaccaaggtaaggctggaccccgccgcctcgccggggctccctgccttttccaccgggttcctgccctacccgcgctccccgcggccccggggccggtccctgcggagtggcccggggccgcgtccgcgaggggcgcctccgcctcgtcggagcgcccgggagcccggcgggaccggggcccgaaccgccgcgcgagacggagcggaaaattcccgcccctccccctccgggccccagcttctccagagcatgtgtttcctgtgaaattccaggcgaggggggaaaagttccccaagtggctgccgccgcctcgctttctcgcgtccgcctggagagcccggctgcctggccagccgcgcggggggcagagggcgccggcgccgcggagcccagaggcccggggtccctcgcccggctcggggcgcggctgggagcgcgcgcgcgcgcaccctgcgccggcagagcccggcgcccacggccgcccctggggcgccctcgcgctgcccggcgtccactctcgtccaggcgcccctgccctgggcggcgcgctccaggtggcgggtgggggcggcggtgcagatgtgaagcccagcgcgcccctctggttccccctctgtaggtccccttcttcctctctccctccctcctccgccgctcacctacacccacccacctctccactgctgttgaccccgagcgcgcccacgccgcgtgtgttctcattcgcacccacatgtgggctagcacctgaggatggaagcggcgaggagccgggcggtgtgtgggctttgctgtttcgtgtttgaaggagatcatgaa

SEQ ID NO: 6047 - DNA, 6000 bp, Homo sapiens
agacttgagtgggaaaagggagaaaagctgagtggaggaggagagaagagattagagagaggaatgagagaaaagagacaggatagcataaggtgggggagaaagggtgaggatagcaggtaagtgtgggagtggggtaagaggagtgtttggactagtaaaaagagaaagcagtggaaaagatgagggttatgggttggcaggtggtggggggacaacgttgagtatggagggtggggaggctgtgttgctgggtcccatcagccttaggtccccagccccttcccagtgcgtgctaattaactccttaattgtctctgcatttgctgagccggcagatgaagtggatgcagacagattggggcgcgtgtgatttcatgcacgggggagcggagaagagctgcctggaaatcccagggggtcttgtccccctctttaccctccctcttcacccatctctgagaggctggagggcgcttctgcacctaaagcagatggggccatctgcaagggaagcatccatggggaatttgcccccatcagcctttcagggatgatcataatgcttgccactattgatggaacaccccctactgtttgctagacacacattgtttcaacagcatgggcattagctgggttttatggtttctggagaaaagtgagactcaggctaggttacttgcccagggccacacagcactggtgtgacagagctgagatttgaacctaggtgagcacaaggccaaagtcctaagtgggccctggctagatgcctcctgccagcagaaggagaaatatcttcaggcctgtttccctctcagtccgtggtggggataaagggtactgaggtctaaggactgcagggtccagagaaaacgaagcatggagaagaagctgggaggatgctgaaggagccagtatcctctgtcaggacttggacaaggggtgggtgggccagagaagcagaaagaagtaatgagacactaatcacagcccttggatccctcaagtgttatcttactaaggccctgccaacaccaacttcctcttttcctcatccttgtcccacaaacccctgtcagagtgactgcccccctgcctctctctgctggcagccctggctcagccttctatttcactcctggcccttgcactagagtcacaagtcaacatgtttgtctctctttccacactgggatattttgaggcaaggactctgccaatcctcaccatgtccacagggccaatcttggggcttgatccaggaaaaccctcggtgaaggtttgctgcgatgtacagggtagggatgaggggatgtgtgtgtgcaaggacccatcacttctcaaacgaagaagaaacaacagcatgagggatttaggttgtatataagaaagaacttcctaagactggggcctgtgacactatgaaaccataattcagacccataagttctgaagagcaaggttgctcaagattggctatatgttaaaggcctcaaaaagttgggcgattgtccgggcgcagtggctcatgcctgtaatcccagcactttgggaggccaaggtgggtggatcacctgaggtcgggagttcaagcctacatggtgaaacccccagctctacaaaagatacaaaaaattagccgggcgtcgtggtgtgcgcctgtaatcccagctactcgggaggctgaggcagaagaacctcttgaaccggggaggcggaggttgcagtgagccgagattgtgccattgcactccagcctgggcgacagggtgagaccccaacttaaaaaaaaaaaaaaaaaaaaaggccgggtatggtggctcacgcctataatcccagcactttgggaggctgagacgggtggatcacaaggtcaggagattgagaccatcctggctaacacggtgaaaccccgtctctactaaaaatacaaaaaactttgccaggtgtagtggcgggtgcctgtagtcccagctacttgggaggctgaggcaggagaatggcgtgaacccaggagactgagcttgcagtgagccaagatcgcgccacagccccagagattctgatttaactggtctaaagtggagccatggcattgcagttttttttttttttttctgagacagagtctcgctctgttgcccaggctagagtgcagtggcacgatctccgatcactgcaacctctgtctcccgggttcaagcacttctgcctcagcctcctgagtagctgggattacaggtgcgtgccaccacgcctggctaatttttgtattttctgtggaggcagggtttcaccatgttggccaggttggtctcctgacctcaggtgatccactcacctcggcctcccaaagtgctgggattgcaggcgtgagccaccacgcctggctggcattgcagttttatcttattatttttattttttgaaatggagtttcgctcttgtctccccggctagagtgcaatagcacaatctcggctcactgcaacctccgcctcccaggttcaaatgattctcctgcctcagcctctcgagtagctgggattacaggtgcccgccaccacgcccagctactttttgtatttttagtagagatgggtttcaccatgttggccaggttggtctcaaactcctgacctcaggcgatccaccctcctctgcctcccaaagtgctgggattacaggagtgagccaccgcgcccagctggcattgcagttttaaaagctccccaggtgattcgaatgtgcagcctgggttaagaaccagtgccttagattctgccctggtttggctgcactggtggttttaccactagatccaaatgctaatactaataatagttatttacttattgggatttactaggtacatgccaatgtactaagcactttccatgcgttagctcatgtaatcctcgaaaaatcctgtgaaataaatattatctctgccttacagatgaggaaaccgaggtccagagaggtcaaggggcctgcctatgctaatgaatggcagggccaggtctggaagctgattctcctgattcataccttctgtcttcccccagactcctcctgaggctgctccttggcctcaatcagtcctcgcctgcctccacctcacctcatcaccttccctccacccccgctgctccctcagtaacatcccaggtgactgaagcaattgcagccatttgaagaggctccacgtgtcagtcagcctgcgagccgcggggaggtggggaaattacagatgctccaaaatagtgttcccctccccctgaggatatttggaattcaggaatcagactctgcctgatgcttcctcaggtctctgggaccctcccaggtgatttcccactctcaaatgccccccacgagttgattctaagtatctgggagagggctgccacccagtggctgcccgggggcatagcaaccctccagcactgcctggtaccgctgaacagctccccaagacctgaatggaagatcctcccttccttttggcagctccgtgtccagtcccctagtaaatggatctcgacctccctcctccacaatcttaagtccactctcccactagggacctccagaccccttctctggtttcctagatgtccactactcccaacttctcatccaacttctttccaatgtgccatccccttctcgttacaggttttcttctaacttaaagcccggcaccatgtcctaggaatacacctctcaccatccttctccccgagccgcaccagcctgcaagtagagcgaaggagccactagagacagaactctggtcccccgcaccctcctcctcatcatctgacaccatcagacctcaacagcctctgtgctaagagcccctaatgagcatcagcaaattaacaacttccccttgattgctccttctctgttaattggatagggagggcccccctccccaaggcctctcagagaagaggagggaggcagggaaggagaaaggtgagagccacaggagcagcccccaggcctgcgttctgtgctgagacttctgctccatccctgagcatagctccccgttccaacccttcctcaccctgtccccttcactccctttgcctccttccttctgtccaaattcccttgacctctggctatttttccttccttttctctgctccttctttggagatttggcagtaaggggttgcgaccatgccccccacaagcccaaagctacaaggatgggatctgagtggtcaaggctgcgtgttggctcacatatgtgcacgtgtatatgtgtcacatgcaggtgggagcagggataagagcaggtgagtgcttgccatgtgggtcaggcccccgggatacgtggacatctgttgcgggggggtgtggttgtgaatggtgtggtgtgactctggtcggtatgtgtgtctgtctccatatgggctaagtgcttgaattagtcaagtgtgactcggagcgtgtgtgtgtatgtgtgtgtgtacgcgcgtgtgtgccaccagaggaagcagcagcaagaggcaggagcatcgatccgaaggagacagcgcggggagagggacgctaggggcagacaccctccctcctgcgcgcacacacgcgcgcgcgcacacacaccacacacagagtcatacacacaagccatagggcctcgcaggcagggagacggctccgggactggagagaggcagcgccgccgaaagcggccgcgaggaggggcgaggcggcgcggggagccctgggtcccgctcccggatccggggccccgcgcgcacaccagcccagagacagcctcgcagacactcgtaggcgcgcacgcgcaccctctcccctccccctcccctcccgccgcctcccggccggacgatggatccctgcagatcccagggctgagagcaccgcgcaccgcgccgagcccgggcagaccgagccgaggcgagcgagccagcgagccagcgcgcgcgggcgggcggacagatcggagccgagcggggccgggcggggcgctccctgcagggctctgcgcggcgtgccgcggcggccgcgggctccggccccgggccatgagcccctccgcgactcggcgctgagcccgccaccggtccagcgccccaggacccgccgccggctgccggcttgccgaagccccctcaggtgggtttccgatacccctgcctttggccgcgaggctcctcggtaccccgaagccgggactctcctccctctggatttcccttgctgctggggcggctcggtggctggggaggggggcgggggccgagctggggatctgactgcgacgagaagctggactggggggggctgcgtccggggcggggacagctcgctgtcatagggaaccgcgccccccctccatacatccacctcgggcagcccgccaccccccactcccaacatacacacagcctgcgcttatgtgagaactggagacacccgcaggtgaggactcaggctgggcccctccctagatgtagccacctccctgggggttttctggccccagtttagcccttaggaccacagccccgtccagggaatacccgtgaccaggacaggagctccttaccccggggtcagcccatctgggtgagttttcatctccaggatggggtggatattcttgtcccagagtgaccccacatctggagggaactcctgcgcctgcctatgggtgcatcaggacttccccctcaacctcggatgactatatctggggtctccccgggcctgggaagcttctctggggagcattctcttggcctgacctgaccccctgtgcctctgtatttggaggaaccctggatgtgtcccttggtcagccacctctgggcttgcaaagcagggaagtcttctgcccgaggagtggtgacctctggagatgaggattctggatgggcacatgtggaggggctccatgtgtactttcatcccaggacaatgatagactgtccctccctcctc

SEQ ID NO: 6048 - DNA, 6000 bp, Homo sapiens
agatcaataaagttgattaaactttagccagactaactgagagagggggaagagagagagagagagagagagagaaagagagagagagagagaatacaaatgaccaatatcaggaatgagagaggcgacattactacaaattgtatagatagtaaaagaataatacaggaattttatgaacacctttatgcccatataaataaaatagacaaattccttgatagataaaactaccaataagaaatttaaaacctgaaaatccctatattaaagacaataaatttgtagtcaaaaactttccctcaagccaggcacagtggttcatgcctgtaatcacaacattttgggaggctgaggcaggaggactgcttgagcccaggcatttgagaacagcctgagcaacatagcgacaacttgtctctgtaaataataaaaaatttagccaggcacggtggcacatgcctgtggtcccagctactcgggaagctgaggtgggaggatcgcttgaccccgggaggttgaggctgctgtgagctgtgatggcaccactgcactccagcctgggcaacacagtgagaaccctgtttcaaaaaaacaaaaacaggccaggcgcggtggctcacgcctataatcccagcactttgggaagccaaggggaggggtggactacctgaggtcaggagttcgagaccagcctggctggaaccccttctctactaaaaatacaaaaaattagccaggcgtggtggcgggcacctgtagtcccagctacttgggaggctgagacaggagaatcgcttgaactgggaggcggagattgtagtgagccaagattgcaccattgcactccagcctgccaacaagagcgaaaacttcatctcaaaaaacaacaacaataaaaaaaaccaaaagaaacaaacaaaaaaacaaaaacaaaaacaaatcgaaacccaaaacccaaaaactttcccacaaagaaaactccaggcccagatgatttcactaggcaattctactaaacagttaaggaacatgtaatatgaattttacacaaattcttccagaaaattgaagagaagggaatactttcttttctatgaggccagcattactgtgataccaggactagacaaaggcattagaggagaactacagaccaatgcacttcataacatagatgtgctaattcttaacaaaatgttagcaaaccaaagccagcaatatataaaaaagatagtatgtcatgatcaatacattaccctaggaacgtgagtttagtttaacacttgaaaattaaccactatatgtaagactaaaaaaaaaaaaatatgcagaaaaagcattgacaaaattaaacatccattattgataaaacccctcagccaaataggaatagaagattccttcctcaacatgacaaagggtatttagaaaaaaaagtctacagccatcatcatgtttaaaggccaaagattcaaagttttcccccaagatgaggaactaaacaaagatgtctgctcttaccacttctattcaacattgtattagaggttctagccagtgcataaaggcaaggaaaacaacgacgacgacatctagattggaaaggaagaagtaaaactgtgtatttgcagattgtatgtttatcagtagaaaatctaaatgactctacaaaaagctctactaaaggtattaaatgaatttagcaaagtttcaagacatatgattaatatacaaaaataattatatttctataccataccaatgaataatcaaattgccatataaaaatagcattcaataacatcaaaaatatgaaatatttaggaataaatcccagaaaggtgagcaagacccatatcttgaaaactataaaacattgaaattaaaaaggactaaaataaagtgtccatggaatgaaaaatttgattttgttatgatataagttcttcccaagttgatctacagattcaatgcaatcttgatcaaaatctcagtggatttttgttgaaatttgacaaggtgattctaaaattcatatggaaatgcaaagaacctagactagcaagatcaatattgaaaacgaagggcaaagtcaagggctgaaagtacctgatttcaagatttattataaaggcagagtaatccagacagtgtggtattagtgccaagacagaaaaatatatcaatgaaacagaaggagagtttagaactagattcttacatacttgagtaaacgattttttgcaaaggtgcaagggtagtcagtggagacaggatagtgttttcaacaaatagtatggggacaactatatatctatgcaacaaaacaacaaaagaacttcaaactacatttcataccacatacaaaaatcaattcaaaatggattataaacctaaatgtaaactctagaactataaaatttccagaaggaaacataggataaaatatttggggccttgtgttgggcaaaaacttattagacatgacattaaaagcatgattcatagaagaaaaaataataaactgaacttcataaaaattaagaaggtctaatttttttttttttaagagacaggttctggctatgttggccaggcttgagtgcagcagctattcacaggcccaattataacacattatagcctccaacttctggcctcaggagatcctcttgcccgagcctcccgagtagctgggactacaagtgtgcaccaggacaactggctgaagaacctctgcttttggaaaaacactgttaagagagtaaaaagaataaaaagataagcctaaactgggaaacaatatttgccaatcacatgtctgacagaagatttgtatccacaatatataaacaactctttaatttttttaaaaaaattttagaatcagagtctcctgtgttgtccatgctggacttgaaatcctaggtttaagcaattattcctgctcagtgtccagagtagctgggacaccaggcatgcgtcactgagcccagccaggatatataaacaactcgtaaaactcaattaacaagaaaaaaccccaccaatttttaaataggctaaagacttgaagagacacttcgccaggaggatttacagatgacaagtccatgaaaagatgttcaacatctttagtcactagtgaaatggacgacagacccacagcgagataaaactacacatctattcaaatggctaaaattaaaaagactgatcactccaaatgttggtgaggatgtagaacaactgaaattcatgtgctgctagtaggaatggaaaggcacaaccactttggaaggcagtttggccctttcttaatatgttaaatatacacctaagacaggactcagttattccattcctagatatttatacccacgagaaacgaaagcatatatatccatacaaagacctgcacacgaaagctcataacagctttgttcgtaacggacaaacattggaaataacctaaatgtcatcaacaggtgactggataaacacattgtggtgtatccccataaagaatactactaagcagtaaaaaagaactcttgataggcaacgactgaataatctcaaaacgattatgccgagtggaagaagccatacaaaaaagagagtttgtactgtatgattccatttatttaaaattccggaaaatgcaaaccaatgtacagtaatagaaagaagatcagtggttgcctggagagggtgtgtgggggcgagcgatgcagggagtgattacaaagaagcacacggagaaatttttggaggtgatgggtgtgttcattaccttggtggtgatggtttcatgagtgcacacataactcaaaattgtacaatctaaacacacgcaaatataccccagtaaagctaattttaaatgtattgtagagggcacattatgtgataagcataccatgtgcctggctgtgttagcaatgtgtgaagtgcatgctccccgttagtacaaacaagaagtttataaggttgctactgtgactgtttccttttacagacgagaacactgaggtttggagaggttgttacaccctttttccctcttgtgattggtggtaggaaaatattaagtagaggagagacacagtaaagtgccaagagctctggcactcattacctagatcctcgcgagggtggagtgagcggtcgaaatgctcatgcctactttacagatggacagactgaggatcggaaagactgaggtggcctgggggctgtcagggaggcagcgcctccccgctcctggcagcaggtccctgtgggctgaaacacgagcctccacctgccgctgattgacttctcgttttttcagtgggcccaagatcctgtaaattgagttccctgcgcttttggatgtcagaaacttcactgagcgcggcactgttggggggcaggagaaaggtaagacttggcactgacgcgggccacagagcacgcgggtcaccacgacagctttcgggtctcgccgcccggcgctggcgagcagccagccagcgtctcgcggcgggtcccggtcctcagcccgcggcccctcccggcggctcggcgggggcgtagtggaggcgggcccggggacgctcgctggcgctcccgcgcggcgccccctgccggcgccctgttccctcttgcccctgatccgctcccggcggcgcggagacgcgagtctgagagcctgcgggcgggcggcgcgctgcaggcgagcgggcgagcgggcgcgccctgcaggggtaggtgggccgcgggggcgcgggcgggcgggcgcgaagcgcagggagggggcgggggcggtggcagcggcgcttgcgggccggggccggcccgggcagggggcgcgcgcggaggggtaggcgcgggggcggggcgggcggggggcccggcagtaggggcgcgcgcgcggtggcgcgcggcgggcgcgagtcatcaattatgcaaggactcgggcggtgcggggggcgggcgcggggagcgctccaagatggcgcccaccgcagtcccgcccgccgcatcctcggcgcctttgcagtccggccgcgcctcccgggccccgcgttagggccgccgctgcctccctcgccgccgccgctgccgtaagtcgccccagagcccccgccctagcgctgcttcctgccctccgggtttcccttctcgcctcgggacccttgagcggggctcgcccatctccagtcaggggctttgccgcagagtgcgcggcggggctccaggggccgtggagctggggctctgctctccttgttttggacaggtgtttggaactcttgcttccttctactgtgtgtaccgggggtctcttaagagaactgaggaccaccagtccccaccccggacaccctgctttctccgtctcggctacagtgagggacacggcccgtccttggtgccccttccgcggtgcagccctccatccctccctcagtgccgggcagagttggggcccctagccggcttgcactgggaagggcagcgctgtcgggatcttcctacagcagcccctcagccctccccctcccccatgtcttactgcatccttctccctcagccggcttcacactgctaaaaactgcagaagccaagggctcctgggttcttcccgcagccagcactcccgactccctctgtcctttactcggatgcgttcgtccccctcccaacagggtgctctggagttgtgatgggggctcccgggaccttcctcggcaggcgaggattcctgcatttggaagcacatcactttgagaatatccccttcccccatcccacccccacccccaccccccacccccacgccacccgatgcagagcttgttcctctcctctccctcccccaccttaccatcagcagcagcacccttggcttcttgttagcgttggggtacaggactgtttgcccagctccgtgggcttggaccctcctctctagttctcacttggtaccttggggcaccgcaaagcctc

SEQ ID NO: 6049 - DNA, 6000 bp, Homo sapiens
aaaaattacctaatctctgaatgtttttccctcttcttctcatgggaaggttaaattaaggcatttgtaaataacctagcttatattaggtgttgcatcgacgtaggtccatttctctaaagacaaacactcttcctgttagccatcatgctaggacaggctctccatgtttttggattctgttcaagaccttttaacttcactagatactgttatatagcaatacccaattttctaaagtgcatggcaaaacaaaaatgggaattagatactagaatactaaaactcttctagaccaacccttttgtacgacaaggaggaaactaatattgctatggtttaaaagtgtcccccaaatttaatgtgttagaacatattccccaaattcatatttttgatggcatttcgagatggggcctttgggagataattaggattaaataaggtcatcagggtgtggggcctgatgggactggtggctttatatgtacagtggcctgagttaataggcattcttgctttcttgctatggaactgccttctgccatgttagggtacacaaggacctgaccagatactactgtcatgctcttggacttcccagcatctagaattgtaagaaataagtttctttataaattacccagtctcaggtattcagttatagcaacagaaaatagactaagaggattatttaccttgtgtcaaattatttactactaaagctgggaccaaaacctcttggcctctatgtttcaagttccaaagctgatttcccttttactacatacctgtgtatatctctcccatacagattcactgcagttaacatgaaagactcaacagttggtgagattttaggaactctagagcactaccagtatggtattaaaaatttgctaatctatccagaatgtaaattttaatggaaaaaatgtgaattgattgtctgtgttttgctttcctcagttgcaaacataaaggctatacacaaacataaatttgagcttttaaaaaatattttaaataactacaattacaagcaaaatgcaaagtctgggagcttcttggttaatgttgaactaggcaatggttaaaatcccttcctgttctaatttactgtaattagagatagtaagtagtgttcttagtaataattatatgctcattttaataggtgaagtttatggccaggaaaaaacaatcagaaaaaatagtgaccacataggaaatgtattttgaatttaaaattctgaggctaataacaaatatttaacactcataatggagcatggcaaggaaattaatttggtatcagcaagctggaactcaatttcctatgacattaacaaaatctataattatagctgctgaatcaagaagaaaatataaaatggttttatatggttttctttgttggatcactcatactttcatcatgtgtaatatctagtaaaaaaggtctaaactctagaacgtaaattttaatagaaaaagtgattatacattattttcctatgtattttcgcttttcaagtgtttagtggcagttatcaaaaaacttcataatgtgccaatttttgaaaaaattttcccacctgctgtaaattcccttctattcctaggatacaaaagcctgccttaaaattatttttagaatcttttattaaaaagtatatatacatatgatattgtatactgcaactttagcatcagccacaggactttttgaatattgatcatgagaacaaattataagtaacatggctttgatgcccttgtttagacaggctttatttttcttttaaattgaactttatcaagacctggccatgatcctactggaaaaactactgcagacgatgtacatcaaataagtcagtctggttcttaatattacatttttaatcttaattggtggaacactattcaaagaaaggactagctgctttttctgtgctacttccacctttcacagggaacagagattttaagtgacctcagatcttagcatttctgagctttcctggagttcttactaccattctgacttagtaagtggtgacctgtattctgaaactgaggggctgacatatccaatcttccttgggaatgtgataaagcagctccgcttcaagtaagtaaaactaataaacacttccagtgtttcattaagaataaaatagaaattgatttaatttgtgaagtcttaatacgtttgactttcaataaagatgtgaagataaaagtgttcagagaaaagctaaattaaaaacaggaaacaggagaaaaaaatgtctagagaacagaagacacaagtttctttaaatactttaagaataattgccaagaaagaaattgactaaatgcagaactgaaagaaaatgaattttaaaacttcaagaatttcagttaaaataagatagaattttctgattttgttccctagacttagaccaccgtacttcagttttgaggcagaggtttcattcacagaagactttgagctctggaatcattgaaaaacgaaccatattcattaaattattggtagtcccccaactgctgtgcattaataggaattaattctgcctcatttcagttcctcaacatactgagctagaataattgtatcttgttatttgttcatcattgcttcagatcttagacatagcttttcctttcttggaaaagaagattataacaatagaaaaaaaagattatttcctatgttttttatttttcctgcaataggaaaaagattcagattgaagatttgtgattttcggttatgctatttcaattattaaactcacttttaagcaatgtaatcacaattgtctttatgctaacaggaaaagaatacaattcttacatttaaattaaaaaaagaaaatctcaaaacctgaaaggtattagagaacaaagcatcttcctaatttggacgtttttcaaactctacatcttcttaatttattgagaaaaagacacttaggatcttcctgtaattaatttgcccattgctgggaaatacttgttacctgtcataatgtagtgcttcaaaataacgttatcagaactgcagtcgaaaggtactcaataccagttaagtaacatttgaagtccaggaaagagaagtcaagaattccatgattccatgtttccgtattcatcaggaacataattaagagtttattcatttgagacttacaagcaaacaaaaaaagtttatgtagtttgcaaggaagttaatattctgattttattcttcgaaatgtacatataaatagttctcaagtttgattttatgataaaagtgtagtttgggaaaaggtcattctaactttaaaaaggtcgcgaaaacaatagaggctgaagcattgttagcgtaattgggggaggagggagcaacggcaagaattaagagcagaacacaggtctagaaacagtacctgtcccaaagtgggtctgcccggcgctgtcgctttaagcagcgctcctggaaacctcatctacaaatcctggggcgggtcaggggtggcaagactcctaaggagggaaacgacagaaatgattctgttcttgcgagccccaaagcaagagtacttttctgatgggtaaagtggtatttctttccaggctgcaaagctctccacctttttcctttggtctcagtcagccccagccatgggggcaaatcaagttggggtcaactcggctgccagagacctaagttgccacaagggtcaccgacgacctaagcagcaagtttccttcgtccagcctcctgcccccacgcacattgcctccacagcaaactccacctgactcagcttgtttaactccaatcctgcagccctcccggcctcagcagggtcagggggcgcgggtctgcgccaagacggttaggaggcccaagtcctgggactggacggttactgcgctcccttgggcgcagccgctggcggcgtgggcgcggctgggtcacgcctccggcaccaccgcgcgccagcccgcccgtggcatgggaacctgcgattcagtcgtccccggggacctcccagcgcacaccgctagcctggggctttcacctcgatccgcccggcctgggcggctcgtgtcctcccacaccgccacccgtgcccgcttcccggggtgcgcccggagcctggccgctctccctgcaggtgaccagtactcgtttggagttcaagattcccgccgctccacttgaactccaccctcccctcttattattattattattttaacttccctccggttaagctaaattgatcttaatctttcatctcggacgtccctctaaggggagtgagcgaagattccgattgcaagtcgccgctgtcgcttgtgcccgtcagcccctcgcccaaaggagacgcccccgggcggggcggggcggagcggggcggggcggaagggcccgggtctgctgcggacggggcggggcggagcctcctcctgcacgggggagcccccgggctcgccccagctcagacactcctagccttggggcagctgccgggcgagtcagcggagtagcggccagcgggcgatggagacagagagacacccgacgagaggaggcggggtgggggaggcggggagagtgcgggggcggaggctggcagggggcgctggaagctggagcggtccgtgcgctccccgcgcccgagggtgcaggaggctctgaagcggctgctgcaccgcggggcccaggcggcggctggggggctggggggcgctgccgccgccgccgccgggggcgtcgctggcctcggcccctttgttctcgcgcgctccccctcgccgcccactcccctgctgtcgcgcggcggcggcggtggcggcggcggctcctcccgcccgaggcagtcgggctcggcgccgggggcgggagggggcggggggagcacgccagccgccgagagtggggggcgatggcgaagctccgggtggcttacgagtacacggaagccgaggacaagagcatccggctcggcttgtttctcatcatctccggcgtcgtgtcgctcttcatcttcggcttctgctggctgagtcccgcgctgcaggatctgcaagccacggaggccaattgcacggtgctgtcggtgcagcagatcggcgaggtgttcgagtgcaccttcacctgtggcgccgactgcaggggcacctcgcagtacccctgcgtccaggtctacgtgaacaactctgagtccaactctagggcgctgctgcacagcgacgagcaccagctcctgaccaaccccaaggtaagaacgccccgcgcacccaggggctccccgcgagggaggtttggaggcagcgtcggtgttagactccgcgcggggagggttcggcgtgtgctcgcattgctaggaggagaccaggtggcgcaggctgtgctcaaaccaggaatgactacatcagggagccccagggctccggtcttttcaggtgggtttacgcgcggcgaccagtggtgcccagaggcttactttaaaacctgtcttgcctggtctcagattttgaggcctcgacccagtccgggtcctgcgcctaccggactgggtttggagaagtgcaaggagccaagaaagttaacttttcctccatttaaagccagtggttagcggggatccacctactccagctcacggtcaaggtccgagcttcagctggtctcatctagaactcagatggaatgaccttccttgaaaggtcgaggggactctcgaaagttgtgagagagttcctcaccttttcgctctacataggcattttcaacttggggttcaaagataagcttttgtggcttgacaaacgacccggaatcaaatgtggaatattgcgggtccattttgggaagtacagagggctcctagttttcatgaaatagattctcaaaagagtctacagggagcctagttaccctttgtgtttagggacagtcaggagtcgtctggagaacagtaa

SEQ ID NO: 6050 - DNA, 6000 bp, Homo sapiens
aagcgtgaacccttatcccttatgtaaactatggaatttggatgctgctgctgatgtgtcaatgtaggttcatcaactgtaacaaatgcaccactctggtgggggaggttgacggtggggcaggctgtgcatgtgggaatagggggtatgtaggaactctctctacctttctctcaattttgctgtgaatctaaaactgcttaaaaaataaaatcttaaggttgtaaccctttactgggcagtgaaatcagtttgccaactgggactagagttaaaattaaacgaaacagggttgggtgcggtggctcactcctgtaatctttgggattacaggactttgggagcactttgggaggccgaggtgggtggatcacctgaggtcaagagttcgagaccaagcctggctatcatggtgaaacccagtctctactaaaaatacagaaattagcagcgcatggtgttgggcacctgtaattccagctacctggtaggctgaggcaggagaatcgcttgaacccaagaggcgtaggttgcagtgagctgagattgcaccactgcactccagcctgggcaacagagaaaggctctgtctcaaaaaaacaaaacaaaaaacagcctatctcaaacccgtcctgctctcaggcactaatgtataatgttccttttgtcagaaaccaaccccccaggaataatttctccctagattaacaatttctcattctttaggtcttagctcaatggctacccctcctcagactggaacagacagcactttacaacctgtggaaactctctcacctttcctgcatagtactaatcacacgtgtaatttttttttttttacagctctattgaggtataatttacattaccataaaattcacccattgtaagtgtaaaactcagtgactatttttgtaaatgtatctgaagttgccacatcactacaatccagttttagaacatttctatcactccccccaaattcccatgagctaatctgcaaacaatctctgcttccactcacattttttgttgtggttgttttgtttttgaaactgagtctcgctctgtcgcccaggctggagtgcagtggcgtaatctcggctcactgcaacctccacccccctggttcaagcaattctcgtgcctcagcctcccaagtagctgggattacaggtgcgtgttaccacgcttggctaatttttacgtttttaggagagacagggtttcagcatgttgcccaggctggtcttgaactcccgggctcaagtaatccaccttccttggcctcccaaagtgctggaattgcaagcgtgagccactgcccctggcctccactcatatgtaactttcctggatagttcatataaatgggatcatgcagtatgtaattgtttgcatctgactttttgcttagcacagtggttttcaacctggggcaactttgccctccagaagacatttggcaataatcgggagatgcatttgcttgtcacaactgagagaggctactactggcatcttgtaggtagaggctcgtaatattgctaaatatcctacaattggcaggatagttccccacaacaaagaattttctcacccaaaacatcaatagagctgaggttgaaaaaccctgaccttttttttttttttttgagatggagttttgctctcgtttcccaggctggagtgccatggcgtgatctcggctcactgcaacctctgcctcctgggttcaagcgattctcctgcctcagcctcccaagtagctgggattacaggcatgcgccaccacgcgcagctaattttttttttttgtatttttagtagagacggggtttctccatgttggtcaggctggtctcaaattccctacctcaggtgatctgcctgccttggcctcccaaagtgctgggatttacaggcgtgagccaccgtgcccggctgccttttttttttaatagacagggtcttactctgtcacgcaggctagagtgcagcagtgcaaccatggattactgtagccttgacctccccaggctcaggtgatcctcccacctcagccttctgaatagttgggactacaggtgcataccaccatgcctggctaatttttgtattttttgtagagatagggtctcactttgttaccaggctcctaggctcaaactcctaggctcaaactaggatcctcctgccttggcctcccaaattgctgggattacaggcgtgagccactgggccaaaaaccctcaacttaacatgtttttgaggttcatccaggttgtagcaattattagtatttcattcctgaatagtattttattgctgaatagtattccattctaaggaaatatcatgagttatttatttattcacctgttgatgacatttgggttgtttccagttttgggctgttaagggtgatgttgctaagaacatttatatttaagtctttgtgtggacttatgttttcacttgggaggggtaacttcctaagagtggaattgctaggttatgtgtaagtttattttttgttttatttatttatttttgagacagggtctcactctgtcacatagactggagtgcagtggcacgatctcggctcactgcaacctccgcctcctgggttcaggtgattctcctgcctcagcctcccaaatggctgggattacagggacccgccagcatgccctgctaatttttgtatttttagtagagacggggttttgctatgttggccaggctggtctcgaactcctgacctcaggtgatccacctgcctgtgcctcctacagtgctgggattacaggcacgagccactgtgcctggcctatgtttaactttttaagaaactgccaactatatttcagattggtggtaccaattggtattctgctgtacctaccggcaacatatgaaagctacagtttgtttatttatctacatgatgatacttggtattgtctttttgatttttaaatgtctactcaactcttttgcccattaaaaaaattgagttgtcctcttattgagttataagagttatttttatattctatatacaactcttttatgacacatgatttgcaaatatttcctccatgtctgtgtctgtggctgatcttttcattttcttatgaaaatatcttttgaacctcaaagttttttttttatatatttttttgagacagggtttttcgctctgtcgcccaggctggagtgcagtagtgcaatcatggctcaccgcaacctccgcctcttgcgatcaagcaattctcccacctcagccttatttatttatttatttatttatttattttttgagctggagtctcgctctatcacccagactggagtgcagtggcacgatctcggctcgctgcaacctccaccacccgggttcaagaaattctcccgctcagcctcctgagtagctgggatcacaggcacacgccaccaggcccggctaatttttgtatttttagtagagacagggtttcaccatgttggccaggctagtcgcaaactcctggcctcaggtgatctgctggcccaggtgatctgctggcctcggcctcccaaagtgctgggattacaggctgagccaccgcgcccggcccttagcctcatttaatcatcacaagaaactctctgtcttcagtaggtacaatgagatcacatcttaaggatggagatgggagttaaattccaaagttaggataaaggcaaaagtggtgtaataaaaattacctaatttatttatttatttgagacagagtcttgctctgttgcccgggctggagtgcaatggcgctatcttggcttactgcaacctaagtctcccgggttcaagtgattctcgtgccttagcctcccgagtagttgggattacaggtgcgcctccatgctcagctaatttttgtattttcagtagagatggggtttcaccatactggctaggctggcctagaactcctgacctcaagtgatctgcccgcctcggcctcccaaagtgctgggattacaggcgtgagccaccatgctcggcaaaaacaacaacaacaacaacaaaacaaacaaacaaaactacctaatttaaacactgaagtgagattgcctgctcaccgaggaacgtatggccgttgggtgaaatgggaggggacttataaactcccctcccacccacagctcccatgtttgacttgaaataagttaactacgatatgactctgcttgactgttgtcctcctcgttttagggatgagggagtggagccatgaagtgggcaggtagaagggcagaatggaggccggctccctgcaggttgtggagcgaaaggtccagactaaggcaggagctgagggacagggtcctgaagctgagacgagatcgcagcgggggcttctaattcctcagggagccaaaggacagagggctgaaccctattccacatctcccccgatccgcgaccctttcccaactggctactcacctgctctgaccgctccaggtttccctagccacagttaccgccgcggtccctgcgttgctaggttacccgccaatctcagaaggcgagactcggtgtctgactgacctttcttttcaccattcaatttattgttccgctcagttgtccccacctcctgaagtctgaccaatcagaagcaccgccattttgacctttcaccaatggaaagacttgggactccctctgggttggactcaacgagtaaggcggggaacaagggaggagtaaggggcgtggattcttcgtcccgccccttcttaaggaggcgggcagggagtaccgcatcggcggcgggcgagacctgcggaaggacgtgatagttggccaatcagagttcatcacggtagcccagttagccagtaggacgctgtgaaggggaaatggggcggggccagcggggttgagaggacggtaggcggtggataggagagctggcgcagctgccctggtggcagtggctgaagtggcggcggcttcggcggctgcggcggctgcaacagcttcgggctcggggttttggcggcggcgccggcgggctaggctgcgcggtgcggaccccggcgcgcggtccgggttgctggggcggcgcgtgtaagaatccgagggatgcgacggcttggcccgagggagagggcagggatcaggggtcagaggacgcggagtaaggggttgcggcgcagcactctggtgtgggaggtgggccgtacgggcccagagggggcgcagggaagtctccaccgcgcttctctccgtccagcccgggccggggctttgcaccctctctcctcgcccccgacttcttagggcgaccctcacgtgggctcccagccaggggctgggagcacgtggagctggagccagctgtcctgcctccttcttcctccctccctcgctcttctccctggcgcccttaggtgaccccacaggagtcttgtgcctgggtcaggctgccccagcggacagcgggatggtagctgaacctcttcccctaggccctttccccagcgctggccagttgggtcctctgtagaggcagaagcaaagcccgcggagggaacactggaccaggacgcaggagtcccgggttctagccctactcctccactgtgtgaccttgggcaagtctcttcccctctctgggcctcatttttgtctgtctggaaaaatgacgtgtttgaattcaaatcaggggactggttctagtcgtaggtgtatatagggtaatggttaagcaggcagggtccctgattcagactgcctgggttgaaacttataaaaggcaagttaaccactccaagcttcaatttcctcattcctaaagtggggatattagctaagataggatttttcaacagcagctcagttgacattttgagccacataattctgtttcgggaggtctcacctgtgcattgaagcaagttcagtggcatacctggactccacccaccagcaatccc

SEQ ID NO: 6051 - DNA, 6000 bp, Homo sapiens
tccaataatgtgtctgtcagttcccttactagagctgctttaattacacagatttaccatcgctcttaatatctccgtggtcaccggtttatttgtgaagtgttcaccccatggcctctggggactcactgtctttcggctttcctctcctccctactctgcctcagcttagtctccttggtgttggtgtccttcagggatctgtcttcggtccccctccatgtcactctaccctctccctgggcagacccctggctccactcttgccccttccgcccattttccatggtgcagctagagtgctctgactgagctgcaaatgagaccatgcacacccgtttataaacccacctattgttctcagggtaaattccagacagactctttaacaccagaacataaggctggacgagattcaggtccaagtagtttgtttgggaggcgacccaggaagaggagtggggaagtgagacaggaaagggaaggcagtcaacacaggaagcattaaagagtaggtcaggaggccggacgcagtggctcacacctctaatcccagccctttgggaggctgaggcgggcggatcacctgaggtcggcagttctagaccagctagggcaacatagtgaaactccaactctactaaaaatacaaaaattagccgggagtggtggcacgcgcctgtagtcttagctactagcgaggctgaggcaggagaatcgcttgaacccgggaggcggaggttgcagtgagccgagatcgtgccactgcactccagcctgggcgacagagcaagacactggaaataaataaaactaattaattaattaaagagcaggtcacggctgtgggcatctgggctcagaccccctcaggccctctggagactgcctagacttgtctcagagttgtcccacctgggggaggaacgggtatttaaccagcagtccctcagccttggagcctctattctctgagagtcacattctcattctctctctccctctctctctctctcttcccaccccccttctctctctctctctctcccgccatcttcctttctttcctccctcccttctcccccaacggaggttggcccttgacgccctgtgtgattatggccccgcccacagccatagctgattggaccagggataaagaattaggccaatcagattcattccccttgagttctggaactgggcaggggatctgggcttgcatttgaactgtggaacctaacttggagagcattgctgaaccacgtgccctgggagaaacagaggaagccagtgtttagagagactcgcaatgggcacacagagacaaacagaggcgggcttcagacaaactgaaagagcaacctcagcacaggacagtttggtttctgattctattaataggttctcatgaggttgggcacatttcctgcacttgcagtctgtgagataagtgtttcctcaaaaaaaaaaactcccttttctgctgaagaatgtcacttgattttctgtaaattgtaaacacacccacacactcacaagactaagaaatccaccgttcaatccccaatttttttttttttggtaactttatattccttccatcacgaggtcagaacatttcattgctgctgtgagactctccagagttctcattaaagagttcaagacaatggctgttccgttagcctcgatctctgagtgattacagagagctgagccatctgggagacccatgatggacatatagtgtgagtgagaattaattcatcactgctataagccatgagacactgagagtgctttgttattgcagcataacctgtcctatcctgatagaatcataagaagtgctgagagacaatttgctggaactgatatttacagggagaagagagccagagaaagataagacaaagattggatgcagtggcttatgcctgtaaccccagcactttggaaggctgagtcaggaggatcacttgaagccaggagttcgagaccagcctgggcagcatagcaagaccctatctctacaaaattaaaaaaaaaattaacgaggcttggtggcatgtgcctgtggtcccagctactcaggaggctgtggtagggggatcactggagcccagaagtttgaagctgcagtgagccatgattgcgccactgcactccagcctggacgacagagcaagacccagtctctaaaataaattaattaaattaattttttaaaaagaaagataagataaagagtcatagaagtacaaatgagaaaccaggagaacatgggacccaggaaagtcatggaaaccaagggaaaatactggtccaagatgcagaaagtagccagtgatgttgaatgcatccaagagatcaagtaacataaggaataaaatatatccacccagtctggcaactgagaagtctttggtaacctctttgagaacagaatccatggagtggaggaggtagcagtgatgaaatagcggacaagggctgaaggagtggagaggggagagcatgagggaccagtgcaagagtgcagcagaaagacaacaaacaggccgggtgtagtggctcacgcctgtaatcccaacactttggtaggctaaggcgggcagatcgcttgtgaccaggagttcgagaccaacctagccaacatggtgaaaccccatctctactaaaaacacaaaaatcagctgagcgtgcgcatggctgtaattgcagatactcatgaggctgaggcacaagaatcgcttgaacccaggaggcaggggttgcagtgacccaaagtcttgccactgcactacagcctgggcaacagggggagactccatctcaaaaaaacaaaaaaaaaaaaaaaaaaaaaaaaagaaagaaagaaaagagaaagaaagaaagacaagaaaatagatgtctttgagtggtagcaagagcaacactgaagtgatttgcctattctggacatttcctataaatggagtcgtaaaagatgtatccttttgtgtctggcctctttcacttaagcgtagtgttttcaaggttcatccatgttggagcatgggtcagtgtttcattcctttttatggctgaataatattcccttgtatgggctttcgtgcttttgtgtatccatccatcagctgatggacatttgacttgtctgcctgttcactgccatatctactattcctggtgctcttgggaatgagtgaatgaatagcataaacagagctgtccagggtcacagagctggtaagatgtgaagccaggatcggaagccaggccattagtcccctagagcctatgttctaagcatcaggctttacctgtgaatctcctctttttacagatgaagatgaccgtatcactcagattcccggcaggaaagcaatggcatactcaagtggggtaactaatgatggaaccatttacaaaggtgtggacagagttaagaaaaagcaataggagatagtgagcttcctggggctggtaagagtggggagcccttaccactcccaggactaaaggagggagtggtgcccagaagccctgcctatatgcaactgagaagggcagggccagggagtcacgtccatcctcactgctctccagtctcctgaactggaagccagaaggtgaggggaaccctgatgcagtttgtatgtgtgagaaagtacaattagtttagactgaaaaactgaaaatctacccggccacttagcaggctggaataacagaaagggatcaagccagctgtaaagataacagggaacaataattctctgtagctgtaaagtgataatacaaccctgcatctttgagtgactgctgaaacattgtcctttaaaatcagagaccttcagaaactttgctgtttgaaattacatgactaagactgaaatattccaattttgcctggaagatttaagtcatcttgacacagagaagcagcctcaatttacaactcaggagcagagcttcagataaagattttctggacacatttgacatgtatcttagctatgttgcttcctaggaaacagggccctgggtcctctttgcaatccagactgaagttgactgctttgtacaaacctgttttgctttgagtccatcaaaacatgacttcatttagattttatctcaactccactttcctcggaatcctataataaattgctgttttcctttgtttggtgatgtgcgtagctcttctggtgggtggtgtccctcactgaataggtcaacaaacctaactttgttggactgccactgtgtccctggtgatctttggctgattggtctaggtcatagatcgacctgccggggtgcagaggagggtggagagtaactcagagggtcaagcatgaaagatctggcagaaaaataaagcccctccacccccaccacccctacccctgcaaatctgatttcccccaccaactgcagaccagagtattataaggggcggtggaagaagagggggagatcttcatttacccagagctcctatacatcaggggctgaataaagggttgtagaaatgaatgaatcaatctctgagtggggcttcaggcaatggaaagatctcagtccttttctgaggcataatggaagctcccagtcttgtgacatttgcaaggctgcccctttctcccaagagacatgagaccaaaaaagtgaaaggaaaggggggaaaagggagaattctaaaaatgcccatcctctgaacaccatctttgtgtaggcatctgggggaggccagctggggtgaggtcatctgccagccaggcccgtaggacttggcgcttcttgtttatcacagccacatgtggggccactgccagggcccgccccaactctgcagtcattggaggagcttgaagttaaagactcctgctaaaaaccagtacgtttcattttgcagttactgggagggggcttgctgtggccctgtcaggaagagtagagctctggtccagctccgcgcagggagggaggctgtcaccatgccggcctgctgcagctgcagtgatgttttccagtatgagacgaacaaagtcactcggatccagagcatgaattatggcaccattaagtggttcttccacgtgatcatcttttcctacgtttggtaagtgggatctggggaggacccagatctctgcagtggccgacagcacagaaagccccagcgggcagcttcaggtgcacattctgaatctcacatggttttcgaatctgagacgtgctctcacagccagctgggcgggagggaggaagcagcagcaggcaagaggaaacggtgccaggctgcagcagagagaagccacaggacaagcgggattcctttctgctctacttcaggcccgccagggcgcgcagggcagggcgtgcctggggaaggtaggaaagcgcagggcaacaccctggatccccagggaggaggcgaggatctcagggcacgcctggtgatcatgctggcatctgagtcaccatgcttgggaggaataggaccaggcttgaaaatgtgttataactttaggtcctcaccaacgtcaggaaggccctgctttttggtttttgtttcttctaaaagaaacttactgagatataatttatacaccatacaattgacccatttaaagggtaccatttaatgattttcagattattcccagagttgtgcaaccatccccacaatcaattttagaatattttaatcgactcaaaaggaatcccacactccttcaccatcatttccaacactgttcctcctccttcccacccatcaatttcctttctgcctctatggatttgccgattctggacatttcatataaatggaatcacataatatgtggtcctttgtggcacttagcgtgttttcaatgctcatccatgttgtagcatgtgttgatacttcattcaatttttttttttaaagagacggggtctcactattttgtccaggctggtctcaaactcctggactca

SEQ ID NO: 6052 - DNA, 6000 bp, Homo sapiens
cccaggttcaagtgattctcttgcctcagcctcctgagtagctgattacagggattacaggcatgcaccaccatgcctggctaatttttgtattttgagtagagatggggtttctccatgttgcccagcctggtttcgaactcctggcctcaagtgatccacctgcctcggcctcccaaagtgctgggatgacaggcgtgaaccacggagccccgcccagaacatatctttttaattctctggggaaatcctagaaaaggaatatcttggtcctacggtaatttctatgtttaacattttgaggaactgctgttttccaaagcagctggcccattttacattcccacgagtaaaaagcagctggaccattttacattcccatgagtaatgtgtgagggttccagtttctccacatccttgccagctttttgattgtccatctttttaattataaccatgctagtggggaggaaatggtatctcactgtggctttgatttgtatttccctaacgataatgatatcgagcatcttcttgtgtttattgatctcatgtgtatatcttctttggagaaatgtctattcagatatgtttgcccatttttaaatagggttgtcatgttattggtgagttttaagagttcttacgatatctgaaatactagatccttaacagatataggatatgtgaatattttatcattctgtgggtttttccctttcttgatggtaactttgaagcacgaacttttcagttttgacaaagtagtccaatttatctatttttttcttttgttgccttgctttaggcaacaaaatctaaatctaaaaaaccactgtctaatccgaggtcacaaagatttgcccctatgttttcatcagagagatttataattttagctcttatatgtatgtctttgatccatttttaattttctctctttccttattatttttattatattattttttttaagacagagtctcactgtgtcacccaggctggagggcagtggcacaatatcagctcactgcagcctccgcctgctgggctcaagcaattctcctacctcaacctcccaagtagctgggattacaggcatgcactaccacacccggctaacttttgtatttttagtagagatggggcttcaccatgttggtcaggctggtctcaaactcccgacctcaagtgatccacctacctcaacctctcaaagtgctgggattacaggtgtgagccacacctggccaatttatttttttaaaaattttatgtagctgggactacaactacaggtgcgtgctaccatgcccagctaatttttgtactttttgtagagatggggtttcaccatgttgcccaggctggtctggaactcctgagctcaagtgagccacccacctcggccccccaaagtgctgggattacaggtgtgagccaccgcatcccgccttcttatttatttttgagacagggtctcactctgtcacccaggctggagtgcagtggcacaattgcagctcactacaaccttgacctcctaaactcaagtgatcctcctgcctcagcctcccaagtagctgggaccacaggcatgcaccagcatggctggctaatttttaaagtatttatagagatgggggtctccctatgttgtccaggctggtctcaaactcctgggctctagcaatcctcccaacttagtctctcaaagtgctgggattacaggaatgggccaccatgtctggtcaataaagttattttttaaaaagagataatccaagagcaacagtgtaaacaaaataacttttccaaatcattttttaggatcagcttctttggtcaggcctaatgatgttaccaactagtaatttataaaaacttgcatttctacatttttcttaactgaccccattccaaaacacaagcaaaccatctaaattcaagatttgtgaggttgggactaactcattactatagggtaagtatgaatgaaggctggaaatgtgttttgattgctgccattattttttatttttattttttctgagatggagtttcactcttgtcgcccaggctggagtgcaatggcgtgatcagctcatggcaacctccacctccccggttcaagcaattctcctgcctcagcctcctgagtagctgagattacaggcatgcgccaccacgcccagctaatttttgtatttttagtagagacggggtttctccattgttggtcaggctggtctcgaactcccaatgtcaggtgatccacccaccttggcctgccaaagtgctgggattaaaggtgtaagccacgtgcctggtgttttttggggtttgtttgtttgttttgagatggagtctgtcacccaggctggagtgcagtggcacaatttcagctcactgcaacctccgcctcccaggttcaagcaattcttcctgcctcagcctcccgagtagctgggattacaggcacctgccataaggcccagctaagttttttatattttcagtagagatgaggtttcaccatgttggccaggctggtctccagctcctgacctcacatgatcatccgcctgcctcggcctcccaaagtgctgcagttataggtgtgagccaccgtgcccagccatgttttgattcttaaggaaatgatttttaagtccccttccaatgaggatttagcaatggagttttcttcttctacagataatttgaggcttcccaattgcaccaaactccatttgggcagatacctcacctgtccactccatagccctagcatcaagaaaagtgccaagcacacaacaggcactcagtaaatttctgtcaaatgaatgaataaaataccaccaccttttcctgagaccattttggaccaaggctggcatgggcatctctgttcctccctctaacttaagaattccatctcttagaggcagatgctgcctgttttctgcaaattttattattcacctttctatatttggaaaaacaagttggtgtggcttacttaggaatctcatatccaggaaatgagctaaaaatgttgtatcaaagattatgcataggatccacaaactaagaagcaagcagatgagagcggttagagacatcgtggtatattttccggaagaaatggtccatggattaaaaattgtcattatgatgagtctgcagtaacacagaaaccacgtagtgcgaatcagaaaatgaaaagcacagccattgactatgattacaaaccaaaactttataccaattacctgttggaatttatgctgcatgaaggcaggatattttgcttgtcctgttcactggacagtacttggcataaaggatgtgcttatgaatattttctgggaaactaaatataacattcacctgtgaaaacacatctgggccaggcgcagtggctcacgcctgtaatcccaacactttgggagcccgaggcgggtggatcatgggaggtcaggagctggagatcagcctggccaacatggtgaaaacctgtctctaataaaaatacaaaaattagctgggcgtggtggcgggcacttgtaatcccagctactcaagaggctgaggcaggagaattgcttgaacctgggaggcggaggttacagtgagccgagatcgcgccactgcactccagactggacaagagtgaaactccgtctcaaaaaaaaaaagaaaaagaaaaagaaaaaacgtatctgaagggaatgaacaaatacacatgcggaaaattgtattcatggggtagaacggtggctgtttccccccctttcactattttctctcctaaagttgtgatagcattttctcagtggaaaggatgaccacagaattatctcccctgggctgcaactaaggaagtatttggagtgagaatgcgaccaggcttcaaatccaggaggggtattttacagggcgtgtggctctcacccagggctcacaggacacctgatatttaggctgttccccaagaggctaaggacagcgcggccccagctcccccaaccacagctgcccaagtttaggagcccgcactcgtgagcgatggctactccgcacagccccggggtcctctacggaaatccctggcacctatcagtacccctaagggaggtcgctcgttacccctcacttgaactctgtcccaaatgggaggtcactctctcttcgcggaccccatcttccccgaaagggtctcttgttctctctggccctcctgagaaggtcattactccccaactcgccttttttgttgttttttggtttctggtttattgaggcagggtctcgcttcatctcccagactggagtgcagtggcgcgatcacagctcacacggcagcctctacctcctgggctcaagcgatcctctcacctcagcctccctgggactacaggcgagcgccactacgcccgctttttttttttttttttttttttttttgtatttttgatagagacgaggtctcgctatgttgtccaggctggtctctaactcaagattcctctcacctcggcctccgcaagtgctgggatgacaggtgtgagccaccgcccccggcccctcgcccgccttttgaaggagcctttcgtcctcaagggcgaggccactccccccccgcgagttccatgccccctagagggtcatcgttcccgacggggaggtggcgccctcccccgggccccgggccccgaccgcccgtgctgcctccttccgggccctcctccgcgatgacggcgccgccagcaggccaggcggactgggcggggctccgagcggggactgggacccagaccgactaggggactgggagcgggcggcgcggccatggcgggctgctgcgccgcgctggcggccttcctgttcgagtacgacacgccgcgcatcgtgctcatccgcagccgcaaagtggggctcatgaaccgcgccgtgcaactgctcatcctggcctacgtcatcgggtgagcgtggggccgcgcggggggcgcggcgggtgctgccctcgcgtccgcgccgtgcggcggctcatcctggcctcggtcacctgggcgagtccgggagcggcgagccgaggcggtgacaccttccctgggccccagccgccgcgccggggccccgggggcgggaggctgcttgctgctgttttaaaaccacagcctgggccaggcgcggtggcgcaagcctgtaatccgagcactttgggagcccgaggcgggaccatcgcctgagcccaggagttcgaaaccaatttgggcaacatcgtgggaccccgtctctgcaaaaaattaaaaatcatccgggcctggtggcgcgcgcctggggtcccagctactcaggaggctgaggtgggaggatcgcttgagcccaagaggctgaggctgcagtgagctatgatcacaccacttaactcgagcctgggagacagtccgagacccgtctgtttacaaaataaataaaggcaaagcctggctaggctgttaccctctcctgcctgaccccccatagtgccccttggctgtaggggcttcgccctgaacgtctcaatcttcgctctccacttcccatcctgctgatttgctgacaaaaccaaagcttggaatttccgcttggttccttctgggtgggtggcttttggtcatttcttttgatcactatgcggtgtcactatgtggtagtagcgaggtcagactgtagcgagtgtttaaagtttgcttcctttgttttctgggcttgtggggctttttgtggtacctgccctagcctagtcagtcattccccatgctgcccccttaggctagagatgccctaccgccctcaggcctcgctgaatgtgccattgtacttgaaggcacctgttacttttttaatttttttatttttttgagacggaatttctctcttgtcgcccgggctggagtgcaatggcacgatctcggctcactgcaacctctgcctcccgggttcaagcaattc

SEQ ID NO: 6053 - DNA, 6000 bp, Homo sapiens
catggtgtcttacacctggagtctcagctactcaggaggctgaggcaagagtatcgcttgaacccaggaggtggaggttgcagtgagccaagatcgtaccaccacactccagcctgggtgacagagtcaaatactatctcaaaaaaaaaaaaagaattatgttgtcacttgagcacagtggctcgtgcctataattccagaacttttggaggccaaggcaagatcagttgagcccaggagttcgagaccaggctgatgggtaacccagtgagaccctgtctctacagaaaatggaaaaagtagcctagcgtggtggcacgtgcctgtggtcccaactactcaggaggctgaggtgggagggtcacttgagcccggaggtcaaggctgcagtgagctaggattgcaccactgcactccagcctgggcaacagagtgagatcctatctcaaaaaaaattatgaaaaaaaattatgttgtcaaactcatagaagtggagagtagaatggtggttgccagaggctgcagagagggtaaaagggaattgctcctgaacagggataaagtttcagtttcagttatgcaaaatgagtatgttccaggtctgctatacaacatcacacctgtagttaacaatactgtattgttcaattaaaatgttgttaaaagggtgggtctcatgttaaatgttttattacaataaaaaataatttttaggaagaaagttgttaactgggtttttgtttgtttgtttgttgttttgcagatatcctttaacagacctaaagctgtgtgatttctagtaatccacctttcagagcgtgacttccacccgtctaaatccctgggagtgaactcatggagttctggggggaaaaaaaatcctgggaggtcgggttggccacaaagcccaagatgttccccaatttactaattaggttagaattccacacaaccagcacctcaccaccaccaagaattctaatggaaactttcttcagtgaaaactaacttcatttatttcaaggctggtgctaattttggttgttgactgctttggcctccgattatgggaggtatcctgggtgggaactgtcaggggaagctacttggaaggcaggactgagccggaccaaattgcaagattcaaaccagtgaggaggcccaacagcggattctccacagacccagcagaagctctcgggggctggaaaagggcgccacctggtggcatctgagcagaagtcagtgacacgttttcacccacatgtcagtacagctcccgaagcaggtccagcggaaaagctccggtatgaagcttttccctttacagtgtgctgtgagggtgtgtaaccacagttaatggaaagggacctcactggactcaatccagtgacatcacacatgccgtgtctcccacccacagagagaactcccaggtcttgagtatgtgatgcctggagcctcatctaccttctgaaggcatcgttcaggcacgctttacatatgagcagtgtttggattattaattggaaaggtcagaacaccgtttcagcgggtatatgaaagtgatagcagcggtgtctggaacataaaggagagtgtgtttgtccactcttcctagggacacagggacggggacactccccactctcccctgggacacgggaatgctctccactctcccctgggacacagggacgggaacactcttccctgggacacatggggacgctccccactctcccccgggacacagggggacactgtccactctcccctgggacacacggggacactgtccattctctcccgggacacacggggacgctctccactcttccctgggacacacggggatactctcccctgggacatatgggctgtccactctcccccgggacacacggggacgctctctagtcttccctgggacacacgaggactctctccactcttccctgggacacatggggacactctccagtctcccctgggacacatggggacgctctccactctcccctgggagttccagagtgaccgtcatcgtgaaaaatgacagggattgatgtagtttcctggcttttgacattaacccacaaacccaactaccactctgggtttttcctagagcgtaagccttagctgacgccatccacacattatggtgctgtggattttcctgtaatgaaaaggaaaagattcagacagcaggaaataaggggccagggggaggctaaggctgtcatgatggcagagaagtctcaacccatgatcttggaaaagctgtccacatttaggatcccgtctgcttctggggaaaacttccctggttagcttcaccttaaggtctccgaaaggtgtacggttccaagaatctggaggggtctttttgagtttggggttagccgatttttctaaaatgtgcacaagttctgggtccatagttcttacacacataattagcaaacgtcccagaaggcggcacgcagactccttggattcagacaaacccaagccaaaagggacctactcaaggcctctaactggatacaatagagttaagttttggatccaattcaatcctggacccattccggtctaagaattgctcaaggccgggcgccgtggctcatgcctgtaatcccagcactttgggaggccaaggcaggtggattgcctgagctcaggagtttgagaccagcccaggcaacacagtgaaaccccgtctccactaaaatacaaaaaaattagccgggcgcggtggcatgtgcctgtaatcccagctacttgggaggctgagacaggataattgcttgaatctgggaggcggaggttgcagtgagctgagatcacgccaccgcactccagcctgggcaacagagtgagactccatctcaaaaaaaaaaagaattgctcaaagtagagggctcaaaacacatggtcatagagcacaaatccagcagagagaactcacctatgactctagatgctttgagagatcagcaggcacacaggccctactgagcattcagtgctcctagggggtggctggaggtctacttcagatcccacttctgacaccaaactgttaaaacaaaaactttggacaaattaaatttaagagtttgtgtgtgtgtgtgtgtgtgtgtgtgtgtgtgtgtgtgtgtgtgacagagtctccctctgtcatgcaggctggagtgcagtggtgcaatctcagttcactgcaacctccacctcccagattccagtgattctcctgcctcagcctcccgagtagctgagattacagatgccacaacacctggctaacttttgtgtttttagtggagacgaggtttcgccatgttggccaggctggtctcgaacccctgatctcaagtgatccacccatgttggcctcccaaagtgctgggattacaggtatgagccactgtgcccagccaacagagtttaattgagcaaaacacaactcatgaattgggcagcactcagaaccaatgggggaggttcgagagctccactctgtaatgtgggcaggaagtttttatagatagaacacagaagtgagatacaaaaaaaaaaaaatcacaattagcttgattttgttactgcttgaaatgtttgccttatatggcatgatcagatcagttagcagcctgtgactggctgagacccagctatttgttccaaaatatactcataggttaagcttttagcttgtttctgtggtacattaggttgcagtttgttgttacctagaaactcaaggcacagaggcagcctgttaattgagttaatttaacagttcaaacaaatacttatgcaccagtgtttataacagcactattcacagagttagtttgaaagcaatctaaattccttctttggatagcctagacatttctcctggccataagaaggggtgatgccctgacacatgctacaatgtggatgaaccttgaaaacatgctcagtgaatgaagccagacagaaaaggcattaacccagaaacaaatattgcatttccttgatatgaaatatccagaacaggcaagtccattcactgagacagaaaagcgaccagtggttgccagggcatgggaggagtgtggaacgggtcgtgactgcttaatggatgggagttttattttggggtggggaaagtgtttggggacgaaacagaggcggtggtggttgcacaatgttgtgaatgtcactgaattgtttactttaaaatagttaattacatgctatgctgattttatcataataaactattttaaaattattttgtgaaaaactgtgatgcttgggatttgcttcaaaataatgtgggtggggtggaggttcgaaaagttaccaaaaaaaaaaaaaaagaaagaaagaaagaaagaaaactctggcttgcaaagaagaaaacggatcggccgtggatccctctccagctcgagggctggagctgcggcggaggcaggagctggaagcgaggcgtctgctggcaaaggcgggagtgcaggttgcgctcgaagccccggcagccgcggcaggaaccggcctggacggggtggggggcgccgcggaggccggcgggacttcccatgtctttctcctcgagctcggaaaaagttcccacccggggaatcccgaccctccaacttcgagaccgccggttccgcgctcggcccccacctggaccaagagctggggctgggctgccgcgcccccggctctgtccccgcgaggccccgctcccagccccacctgggacacccgggactcccgggacacctgcggggcggggcggggccggggcgaggcggggcgggctcgaggccgcaccccggaggcggagccgcgagctacccgcccgccgcgcgccccccgctctcggtgcgcagcggggccgaccctcagccctgcagcgccttcctggaggtgggggccgcccgcgccatggccgccgcccagcccaagtaccccgccggggcgaccgcccggcgcctggcccggggctgctggtccgccctctgggactacgagacgcccaaggtgatcgtggtgaggaaccggcgcctgggggtcctgtaccgcgccgtgcagctgctcatcctgctctacttcgtgtggtgcgcggggcgcggggtgcggggcgcggggtgcggggcgcaggggaggggctgggattgggggcgctgggctggaggcgcggggctggggctggggctgggaccgggggcgcggggcaggggctggggctgggaccgggggcgcggggcaggggctgggattgggggcgcggggcaggggctgggactgggggcgtggggcaggggctgggactcggggtgctgggctggaggcgcggggctggggctgggaccaggggcgcggggcaggggctggggctgggaccgggggcgcggggcaggggctggggctgggaccgagggcgcggggcaggccccaagagccccgcagagcggacccgggtcgcgggagggcccctgccgtgcctgcgggcgggactcagccttcccagggtcgcctccggagccggcgccgcccctgcccgcaggtacgtattcatcgtgcagaaaagctaccaggagagcgagacgggccccgagagctccatcatcaccaaggtcaaggggatcaccacgtccgagcacaaagtgtgggacgtggaggagtacgtgaagccccccgaggtgcgggccgccccctgccccccgccccgccgtgcaccctaccctagtgggcggagggggcagcggctgccgcctggccgaccgccccctctttctgagcccaggggggcagcgtgttcagcatcatcaccagggtcgaggccacccactcccagacccagggaacctgccccgaggtgaggggatcccgcggcgctgggggaccccgcctcagctaggcgggccagctgtcccttgcggggtccctgactgggccgcctccaccctagagcataagggtcca

SEQ ID NO: 6054 - DNA, 6000 bp, Homo sapiens
cctaaaggtttcttcatgcatagtgaactgccacctaactagatatgtaaacacactataacctacctttatagcaatcacagagttttggccaatgaaaggcagcccacttgtcaaaccttgtccaaataaggcaaacgccgggggtgtaaccaatccgggtgtttctgtaccttacttccgttttctgtgggtcactttccttttcctgtccacgaatattatcgaatcatgcagcagcccccagagtcactgtgaatctattctggttgggggcggggggcactcgattcgaggttcattgtttgctcagtgaaactcaagttaaatttaatttgtttaaagtttttcttttaacaattaaataatgtacattctaataccacagtgcctggctcataataagtgctcgataaacgctagctatgcttgccattcttttaattataaataacgagcaagtctcttagaatgccaaacacaccttcaaccagagctacattttctcctgtgagaagttcaggggctgccagagctgatgcctaaggcccagccagctagacttttctggtagagatggaaatagagctgaatggaagaggaagtgaagatctggactagacggtggttaatgtagctgcacgttaggaccacgtgggggctctttcaaacaaccttgttctggctccagcccagacccattaaatctgaatctggcaagtaagaccctgcactggtatttttttctttaagtgaggcataattgatgtacaataaaatgaacaaatcttgagtgcccactcaggtttgacagtcgagatgttgaacactcccattacccggtgccccctttccatcaattcctcttcctctcccactgtcattttctgaatgctatctctatcaactggttttgtctgttcatagaattcgtataaatgggatcatacagtatgtattttcttgtatgtgtgtctgacttattttgcttaatgtttctggaattcttccctgtgttttttgcacgtatcagttcctttttattgctgagtggttttgatgagcctattctggttgaggggctgcctgatttgagcatcgttctttgctcaagtcaactctgttaaatttaattttgcctaacgttcttcttttaacaattaaataatgcacattctaataccatagttcctggctcatagtaagtgctcaataaatgctagctatgattgccattcttttttatttttttaagacagggtcttgctctgttgcccaggctggagtgtagtcacacgatcacggctcactgtagcctcaaactcccaggatcaggcaattcttctgcctcagtcttctgagtagctgggactacaggtgtgcaccaccacatctggctaatttttgtattttttgtagatacaaggtttcgtcgtgttgcccaggctggtctcaaacttctgagctcaagtgatccacccacttggccttccaaaattctggaattacaggtgtgagccaccatgccccgcagattaccattcttttaattagcagtaatgagcaagttttctagaatgccaaacacacaccttcaacacacctttgagttgcttcaggctttttggctattataaataaaatggctatgaacattcatgtacaaatctttttcttttttttttttttgagatggagtttcgctctggttgcccaggctggagtgcaatggcgagatcttggctccctgcaacctccgcctcccgggttcaagcgattctcctgcctcagcctcccgagtagctgggattacaggcatgtgccaccacgcccggctaattttgcatttttagtagagacagggtttctccatgttggtcagtctggtctcgaactcttgacctcaggtgatccacccaccttgccctcccaaagtgccgggattacaggtgtgagccactgcacccagcctcatgtacaaatctttatgttctaatgtgtttcgggtgcggcctaaacaccgtaaattaaacacagctcactgtaaatccctacattccttcttaatatgttcatcaattgatggacatttgggttatttctactttttggctattagaaataatactggtatgaacatttgtgcacatttgtgtgtgtatgttgtgggggcatatgctttcatttctcttaggagtggaatggatgggttatatggtaactctatatctaactttttgaggaacttccagattgttttccaaaatgatcgtatcattttatattctcactagctgtgtacagggtcagaatcttttaaaaatgtaggtctgttcggctgggcgtggtggctcacgactgtaatcccaacacattgggaggccgagacgggcggatcacgaagtcaggagatcgagaccatcctggctaacatggtgaaaccccgtctctactaaaaatacaaaaaattagccgggcgtggtggcacgcacctgtagtcccagctactagggaggctgaggcaggagaatggcgtgaacccggaggcggagcttgtgagccgagatcacggcactgcactccagcctgggcaattgagactccgtctcaaaaaaaaaaatgtaggtctgttcataaagtgcctactacatacggttgttctagggattatttgttagatatttttcttacaagagaattttgcctaccccaaggtcaggaagatatcttccatcttctagagtgtttatggttctgaatttcatgtttacgttatgatccatcttgaattaatttttgcctgtatagcataaggtagagattgagggtcattttttttccaatacagtattcagttgttctagcagaacctgctaacaaattttattttctacactgaattgaattggtgttttggccaaaaatcagttgaccatctatgcatgagtttatttctggactctattctattccattgatctattgtctctccttaccaagaaccgcattgttttgattactgtggctttatagtaaatactaaagtcaggaggaatacattttccaacttggctcttcttttctaaaattttctagctattctagattgtttgcatttccagataagtcttagaagcagtatgtcaatttctttaaaaatacctgctggggccgggtgcagtgagtggctcacgcctgcaatcccagcactttaggaggctgaggctggtgattgcttgggctcaggagttggagtccagcctgggcaacgtggtgaaaccccctctctacaaaaaatataaaaattagcttggtgtggtggcacacttttggtcccagctactagggaggctgaggcgggaggattgcttgagcccaggaggaggctgcagtgagcggcgattgtgtcactgcaccccagcttgggtgacagagcaagatcctgtccaaaaaaaaaaaaaaagctggaattttgatagggattgtgttgaatccatatatatatatatctccacttattctgatctttgatttatttcagcagggatttcaatatatttttcagtcttgcacatcttttgttacatttatttctatgtatttgatgttgtttatgttatttaatattgctgttgtatttctggttttccaattttctgttgccagcatgtagaaatgcaattaatttctttttgagacggaaatgcaattaatttttttttttttttgagacggagtctcgctctgtctcccaggctggagtgtagtggcgcgatctcggctcactgcaagctctgtctcccgggttcacaccattctcctgcctcagcctcccgagtagctgggactacaggcgcccgccaccaagcccggctaattttttgtattttttttttttagtaaagacggggtttcaccgtgttagccagggtggtctcgataccctgaccccgtgatctgcccacctcggcctcccaaaatgctgggattacaggcgtgagccaccacacccggcctaaatgcaattaattttttttgtgtatttgttgtgtaccctgcaaccttgttcagtttgttagttctatatttgttttgttttggtagatgacatccctcaggccctgctactctggactttcatgatggagatggtaataggaattgtattaagaaggaatgtagggatttacagtgagctgtgtttaatttacggtgtttaggccgcacccgaaacacattagaacagtctttggaggagggaggcggggtgggtggggcatcctgtatttttagagttggagattctaaaagttcagttgtgaactcttgatttcggtgccaagcggcactcaagccgaaaggccaccgacactcgcctgcggggatcagggcgggatgacctgggtaccgcggtcacgccaaggccgaggccctcacccttcccctctttgggaaagggcagacaagttccgggttcccttctaggtccgggcgagggggagagcgccccacagacgacaggcgcctcctgcctctctccttcaataaacagtccacagtgtcccggctgggctcgccgtggcctccgccttcccggcggacacacctgtttacccttcaccgccggacggccaggaggcgccacgacgaccccagccccgcccaggcttctccgggatggaccggcctcccggggcacagatgaggaccctgaccccggaggggccagacactcgctccagggcccctggcctgaccctcttcccctcgccccttcaggtacccggaaattaaagaggagctggaggagctggaccgcatcacagagcagacgctctttgacctgtacaaatacagctccttcaccactctcgtggccggctcccgcagccgtcgcgacctgcgggggactctgccgcaccccttgcagcgcctgagggtcccgcccccgcctcacggggcccgtcgagcccgtagcgtggcctccagcttgcgggacaacaacccccaggtggactggaaggactggaagatcggcttccagctggtgaggcccgcagcgccgaggggcccgccccgcccctcgccggcccctggccccgcccacccatgggctccgctcctttcctgacccgcccgcgcagcccagtgacaccacgcggggcctcgtgggctcgcgggcaaaaaaaaaagtaaataaatacaaataataactagataattaaaataacacctcttggtgcccaagcttttggggcctcctccctggggtcctatgtagaagcatttcaggggtaggaagtcaaatttattatggaaaatgaacttttattattattattattattattgttttactgtttctggtccttgattcaggaaggaaaatgcaactttctgaattccagtgcccactagtgggactcagttaggaccctccagcgtgatggagaactgggctaacagcccaagatagagaataaggagacagtaaaaaaaggaaacttagctgggggcggtggctcatgcctgtaatcccagcactttgggaggcctaggcgtgcagatcacctgagcccaggagttttagaccagcctggtcaacatagtgaaaccccatctctacaaaaaaaaaatacaaaaattagcccatgtggtggcacaagcctgtagttccagctacttaggaggctgagatgggagaattgcttgaactcgggagatggagactgctgtgagccttgatcacaccactgtactccagcctgagtgacagagtgagctcgtctgccaaaaaaaaagaaagaaaggagcaagggaaaatgagggaggagccaaggaaaggagacagggaagttcccattagtaagagtgggctggggactggagtcctagtcccagctcttgctgggacaaatctcttgatccctcagtcttcccatcagtgaaatgggagggaaagtcttgctccttccaccctaggcaggggaggtataaatg

SEQ ID NO: 6055 - DNA, 6000 bp, Homo sapiens
tgggaatgtttgacaatcaaattaatgaagagaagtgaatcatatgaacatattggggaaatatttatatttttggctcatttgagacaaaatgctgtcattgatgaagacagtataaaacttataataaattacaaactagttaatgaattttatcaattcaagagatatttaagattagtcactgaacaagaaaacttgaaatccttgtaacctgagagcttatatatcaaagaaatttgataaatgtctttctaaatttgacaacaacccttaaaagtgtaaactgtactaataccaataaataggaaaattttctaaattatctataatgaaaaacaattttcagttattttgaagaataaactggatcccagattattttttttgattctagtatcttcatagaaaattatagtttaaaccacaatgtgaagaggtactcaaagagaatgtggtaaaaaaaatacaaaaacaaatattacagaaatatgcagttaactagagattattatttaaatttttaatttttgtggtgtttataactactaaagaatttttaaattgttgtgatttattttctaagtggatattcacttttgcaattaattttttattctttctcttaaagagggactccaaattgtataaacttcaggctccagcctttggtaccgtgtttgatctgaaagatgttgccagataaacatactttttttgttgttgttggccaggcaaggcataggctttgcgtttgctgattgggccatgaaaaagagtgtttgcatcttctgggaacctctctttgggttgagttggcagaatacctccaaaagtgtcattagcagcctcaagcaagagcttctcctcaataagcaatgctgtgaaatatgatgcaacattttgtctcattagaatattgttttctgtgttgctggactaggagttaggaaatatatatttatgacactaagaaatggtgtttcgaatttcatgaatctgggcgatccttgaaatagttttattttatttatttatttttgagacggagttttgcttttgttggagtgctggagtgcaatggcatgatctcagctcaccgcagcctctgcctcctgggttaaagcgattctcttgcctcagcctcccaagtagctgggattacaggcatgtgccaccacacctggctaattttgtatttttaatagagacggggtttctccatgttggtcaggctggtcttgaactgccaacctcaggtgatccactcgccttggcctcccaaagtgctgggattacgggtgtgagccaccacacctggctgaaatagttttattgagaggcttatggtccatgaaggcaaaggttattagtgagaagagcaagtgagtgacaaggagccagaaaaaaaggagacgaatcttagttccattgagtagtcaatgggcaatgaatgccatgggcaagggatattactttccacttcacaatctgtgtggtccctagaattagctatttcagaaccagaaaaactgcttgataaagtggcttcaaatagtcataaaaaatatctattgaacctctactgcatgtctggaattgagccaggtactgggaatatatggatgacttaggttatggtctgtccccttagggagctaaacaactagtttggaagacaggaaattgacaccagaatataattttaagtttaactttatgaaattgcctttttattatatgtcaataatggttatttcatatgattggcaatttcgtatgattgaatatcaatagtctcacatggttcaacatgaatagctacagaggtaatatttttccctatagtgggccagtacctggttaatgaatgcaataagttatcacccagtcagtttgataactgatcaagcaaactcttccatacattgctgaatacagaaaatgagagtggaggggatggtggtgaggtgtcatctctcatttcaaaattcttgcaatttttacagaaatcaattcaggcttggttgactgaaaaatatccccagaggaggtgggacttgagctggaaactgaagaggagtgtggactcaattaggtggaggaagtatgagcgttcattcttccctgtacacttggaaaagtgaacagggtggaatggaattgcaacagggttcaggtagggaggaaaaggaaagaaaatagggaagaatagtataattttggtgaagggactgaggataggaaggggaacgtgggctatgagccagaaataaaaaatataaaaatttaaaaagtagattcaaggtcaacccatgaagatccttgagtgagcttggatgttattctgaagctaatggaccaggtaacggtaattttcctggaaaattcagggaagagtgtttcaggaaatctctattaggttcttgctttctgcattctatactcctcttggaatcggcgttctaacaactgcaaacctgcccataggcaggtgaacttgaaaaccctggagacaaattattagaggggcttgggttggctgttgtgtatcaagagggcacagcaactctggggtgcttcgacacttccccaaagtagtgaaagatcagttctaactcttagaaaaatagaaaaccattactgagaaggaataatttgcatgtgaacacactctatttgtgttttcacacaatgcttatgtgttcgtgtgtgttaaatatgttagattcaaaaattaagcctgagaaaaaccaggaaacagaagaattactgtagctcagaagtatgagtagtctggtctacaggacagcaaaaacatatctgatggcttctacagactaaagttccaagccactaggtatatccactcacacagccttctctcctgtgcgtttgtatggccgcttctcaggaatgctggtgagaagcccatgatataaccaatatgaaaatgttccaccactgtagtattctagatatttgaaaagacaatggatgagaatgaaaatgatgcatatacaataatattaatgttaaaagtaaacaatactacaggtggtgataagggctattaaaatataaaagagttcaataggaagagaaatgaatggatgtttgccttttcaaagagggtgggtttgtaaatgccaggaaatccagtttcctttagggattattcacgggcctcaccatcttctcttctcaaggcatttaaataacaggatccactttaataaaaaatgtcaaactcctcccgccttcactagcagccagaaaagcacgcgtatggtccatactatacaatttagccacgaatgacacctgctttgctttgttttctattgtgttaggcgtcagcctcgtgtgctcagatagatcttaagctccttgaaggcaagaaagaacccggtcccagactgcgtccgacacacagaatgctcgtaggaagcacaggctgatttatggaaaatacagcaagggtcttcaatttcgaactacagctccgccttggagatgctttccgcagcccgcgggccgcccacggggggcactgtctagctcccctcgcccctcagccgctctccgtcggtgctgttccccgctgcggccgggaggaggcgccacggactcgggctaagcttcttcccccttccgtcccccttccatccaccttaccaccccacttccccagcacatgacgtgggaagctgcctccgccagagtcttagcaagaggagtgagggggtgcaggggcttgggggtggggtggggtggggggtgtggagaaagaggacacgcgcgctcacacccgcccctgggagcagaagcagtatcttccccagcttcgtgggtttctcctccccccggagtcagggtgtgcgaggtagggggtgtgtgtgtgtctgtgtgtgtgtgcgcggcacgtttttgagtgtgagacccaaatccagaccaggcaacctgcgttccccgcgcctccccccgtccccggtgattaatacccatttttctgacgctcccctcctcccctcctgctctccctctccggctgccgcgcggttgacttgcacagcctgcccccgcccgcttcccttcccccggctccgatcctcaccaactggaatctgggctcctgcctctccaccccccacctctttttgagaaaggaaggttccccccaccccctttcaaaaaccacttcctccggcttcttcacctctaggaaatctcggggcttcgctctatcgagagtgctcgtcaagggtgattcttgatcaccaccatccagtagtgctggcgtccgaatgcatatccttttgccttgcaaagaagagtcatgaacttcaaaacccccgagacggatcattaatcctgctttgcaggaaaggaaaaccctccattcccagccaccggccacccctctccgcagactgcaaccgcggaggcgctcggagccggtacgtaaagatgggctttggagtctctcctttgaatgtaggggtttgggggtgtcaggcagataaagggtcgaagccgtgaaatcgtgaacgaatctggcatgaggtaaagctctgaaatccagcagaacccggcacttgctaatttggacgtggcttttttaaaggttttttttttttgtgggggagggggtgctgtgactgggtagggctgtctctggtcttttggggggtttcatcccttcacctagcagaggggcagggcagcggcgccccgggccggacccacgcgccgagcccatccgtccaatcgacacgttgcaggtgaagccccgtgcgctgcacctcagcgcggcggcagcgtgagtgtgcgcgggggtgagtgtgcgcgggggtgagtgtgagtgcgcgcggggcgcgtgcgcgtcgggggcgtgtgtgcgcgcgtcagtgtgccccttccaagaaatgcccagtgtgcaccccgtgcacaatcagaacccattcagcacaagcccggggtgggaggcggcgctgctgctggaggcgatggggagagcgagcgagacaagtcagcagcaatgcagatggggctgggggccgcactcgctggcgagttaagtgggaattgtgtttctgcgtgtgtgtgagtgtgtgttgctgtatggtgccgcttctcccccccttcctccttccttcccacttccctccttcgctcgctccctccctctctcctcttccattcaggttggctttcccacctctcatccgtgcctgtcccaggaatggtatagccagaccttttctgaattatttatagaccggtaccagctgttttcaattcctctcgtgtgcactctgtgggaaatgcggggtttcctcccccctttccttaaaacgaattgatatctttttcggaatgcatttttctcaccctccgggggacacgcgaatcaagccctgaccgcctctttttcccccttaggaaggggacgctttgggaatgaccatgctccaccgagggacggagccggcccccagcttctccacacagagcctcctccactaacgctccaaaaaccaaaaaccgtaattgccagaagaagcgttaaaaatctattccagccactaacctcacatgcacacggaataattactctggattctgcattgtgagctgctctccataccctgaattacctttgaattaaatctttttttttttgaatttgcatctcttcaagacacaagattaaaacaaaatttacgctaaattggattttaaattatcttccgttcatttatccttcgtctttcttatgtggatatgcaagcgagaagaagggactggacattcccaacatgctcactcccttaatctgtccgtctagaggtttggcttctacaaaccaaggtagggcaaattctattttattttttcctcacctggggtagggattcctcattttatctatctcttcgagtccctcaagtggatctttttggaagaaaaggtcacaagatatgaaaataatgctgt

SEQ ID NO: 6056 - DNA, 6000 bp, Homo sapiens
gaagtgctaaacactgaggttctttttgctttcaaagatcccgggggcagggggtgaaccagaatcatctgcctctctctccacattggcaagacatcatgccccttttctcctgtgaactgttttttttttttcagggctgtgaattcttcctgtaattagacccccattctgtcatggtttgattttttaaaaatatacctgggctgcctctgcccttgggtagtaagaggagagtcaccatattgattaagctttaaaagattaagacttctcatttttagagcttaataaggaacaaggggatttagagaccacatggtctgatcccaactgtttctagattagcagacaggttcaggagtggcatgttcttgtgtttgtaaagctagttagtggcagagccaggatgggaagccaagggcctctttcttttctctttgttttgagagagagtgttgctctgtcacccaggcttgagtacagtgacacaatcatagctcaatgcagccttgaactcctgggctcaagtgatcctcctgcctcagcctcctgagtagctgggtccacaggtgcatgctactacacctggctcattttatttatttttgtagggactggctttcactatgttgcccaggctggtctcgacctcctggcctcaagtggtccttctaccttggcctcccaaagtgttgggattacaggcatgagccactgcacccagcccatatcactctcctctcctgtctcatctccactctgttattgagccctgctggtaagttgtgtttttgtttgaggttgttggttattgtatttgtcagttctcaagtgctcatttggtttttctgtctccttgctgagactccctatgtttccatttgctctaagagcattggcccttacttactggaacaggttaataatagctgctgccaggtctttgtcaggtaattccaaaaccttgtgtcaccttggcgctagcatctgtgagttatttcccacaggagttgagaatttcttggttcttgtgtattgagaaattttgattgtatcctaaacattttgaatattgttaaaggactccaggccttgtttaaatcctagggagaacattgatgtttttgttttagcaggcaattgacccagttgggctcaggctgcaagctctaaccagccttctgtagtttgtagttgcggtgacagtttgattttcaaagccttcaaatctgtcctagctgtgtgccatgctgtggcccgtctgtcctgggcagtatctcttgcagcattcagttctttcagtctgcgtatgcagtttaggggtagatcttgcagctgggtgtgggtctaggagttcatatacaacttcacaggctgctttctcaagctcctcttctccgcagttctctaagcttccctggagtccccttctctgatcggccagccagaaagctgggggtttggttattccccctttgccacccactttctgtaaccatgcctgtattttgggcccaggagcatgaagatagaaaaagcaaccagattctcccaatcctgctgagaccacagctcttctcatcagaaaagaaggttccttccctcagagttttgactcctgcagtctctggttgctgccacaggaatgctcaggtctgggtgcaagaaaataaagaaaaggactgagcatggtggctcacacctgtaatcccgcactttgggaggccaaagcagaaggattgcttgagtccaggagtttaagaccagcctgggcaacatagcaacacccctgtctctaccaaaaattttttaaaaaatagctgggcatggtggtgtgtgcctgtagtctaaactacttgggaggctgaggtgggagaatcatttaagcccagtagttcaagaccagcctgggcaacatagcaacacactcatctctacaaaaagttagttgggcatggtgatgcatgcctatagtctcaactacttggggaggctgaggtgggagaatcatttgagcctaggcgttcaaggctgcagtgagctatgattgtgccactgcactccagcctgggtgacagagcaacactccctctcaaaacaaaaaagagaaaagaaagaggcccttggactcccgtcctggctctgcccctaaccagcttcacaaacacaagaacacgccactcctgaacctggtctgtgaatcaagaaacagttgggatcagaccatgtggtctctaaatccccttgctccttattaagctctaaaaatgagaagtcttaaaattttaaagcttaattagccagatcccatatcttttaaaaaaaaaggaaagaaaaccaggatttcctcccagcctctctgcctgttagactctgttggcctccctggccactagagaccttctggaggtcttctgtcctggtgccatttcagggtttcaggctgcatcagtgctggcagcagcaaacagtaaactcactgttgggcattactccaaattctgttgtttcccccatctgcctgccatgatttacttctgagtccacagttagctgctgtgtgcatcccattctggctttgtagtgtcagtgaggaagacggggtagagtgtgcctgctccatttttcccagaacctccgaattccaccctgaaagtggagtctagtctgatcaaatgtgtgggacctgcttatgtggccctcttcctgttcatcacaccttaaccctgaagggcaatgagcaaacacaatgatttgccaaacagcagaagggctcatgcccatttcgtgggagtccccagctggaccctgtacaaaaaactgctttagagactgctttaaggtgtggaaggacttctgtgcaaggttgcagctctgttaggagaagcatattagcactgacctaaatggccatccaagtatggttaattgcattgtcgtatttataattccttgatacagaatgatctctaggttaagttaggcacaagaggaagacatgtacaactctgtgtggtgggccaccttgtgtgttttttgaagtgtgtgaataaatatgtgtattacacatatttacatgcacagaatctttgagagggtaaaatgatgagaaactgtacctttaagaagggaaactaggggcagggagacctgtttctctgcatccccttgattttctgtgcatttagcaccacatgtaagtgttgccattgaaaatatcagtttatttaaaaataatactggtggccttcagcagaatcccaggggcctgatttagcctggcggccctgcttaaagtccaggtgttggcagagggggtgggccataacttacctgccctgtatactgtgggaacacaggtggagtttcccgaagcccggatttatgaggagaccctgaacattttgctgtatgaggcccaggatggccggggacctgacaatgcgctcctggaggccacaggcggggcggcggggcgctcccaccacctggacgaggacgaggagcgggagcggatcgagcgcgtgcggaggatccacatcaagcgccctgatgaccgggcccacctccaccagtgagcaggcaagagaccgagccgccctcctctcaccgcccccactccctgccgtgctacacccagatcctgtgcaggctgccgggccccttctgcttcccttggagcctggagatacttttgtaacaagccagatgattattttggtattgcttgacaaggcaaattgattgtcttgacccaggcgtatgacccctgtcgttgaacaagctgtgtctaagatctctacttttcatgagaatctgagactctttggagccaggctttctcggttctcagaggaaaagtatgaatgagtgtgaagtgtatgtgagaacttttgtttgcaatatttatttttgtgggtgtcgacttcctatgtgggctttttgggtgacactcccttaagggttcagtttgacaattctgagagttgtcctgcagttggaggccaccagaggtatctgagctccctgcttcctatttcataatcctccagccccagcaggtccactcctggttcctgtgtgtttggcccgggcacaatccccactgctttgctagacgtgctttctgccatgtggctttgggcctagagcttgttgataattgcagcttgtggcagtggaaatatggctgaatgagcgtctaaatcgttgagaccagtgcaactttgggtgcaaggctttgtttagggatcaagccttttgccaccttgggctggtctttggcctggtgctcactgggaccccatatgtctgcgtaggagcagaactttccatggcagtaagtgtccagctctgtttctggttctttccccaactccagccccgtccagttgttctcctgattgacccgactccactccaggaaggccatctgaccctgtgacaggcatagctcataaactacccctccctgggatcccgctcctcttcagcctccttccccatgaagctgggctaactttctaagtcattttgcttagaaattcagtgtggcccataccctttgtcctcccagcctggcatccaggcagggacaccctcacaccaccagccccagggagcttccctgctataaacacagacccccttgtctttgcctctgatttttacacagtgtagagtggccagcagtgaacaggttgaggatgtgcgggtagatagataactttgggtctggtttgtgtctgtgttcatgtttgtttaagggatatgtgtgactgtgggtggggacgtgtgcttgtggggcacaggtggcggcccctgctggagcccggctgggcgcagcgcctatgtaggacgggtgttctcagtgacctacctcccaggctcctctgcacctgcaaaggaacaggagtgagtcgtgactgacaggggtggttgagactagactaggtagagtagttaccaggagatgtgaatgtgcgtcaggtgatggatgggtttgtcaagggaatcgttaccgttttataccaaaggtattaacatgggcagcctttgacacatgtattccaaaaacgagtttatattttcaaacggtttttacagcttagactttgtacttactgccctgcctgtgacagttgtatgccttcattttgtatccaacagcaaagtctacaataaaactttaaaacaatcatgactgaatgtcaaaatcgtgtattgggcagatgctttttaaactgtcgtgtgagaaacttttatattaggccatttggattttattaagtgctaaggaaagagggcttacaaaatgtttcgtaaatattttatactgtttaagtgttaaacaccaaccctgtctttcttttgggttgagcttttttagaaagtcgaagtgaatgttggccaggaaaatggaaaagccattgtataaatttttttttgaggcggagtcttgctctattggccaggctggagtgtagtggcaccatctccacttaccacaacttgtgcctcctgggttcaagcgattctgctgcctcagcctcccgagtagctgggattgcaggtacccatcagcccatgcccagctaattttgtatttttagtagagatggggtttcaccatgttggccaggctggtcttgaactcctgaccctgtgatccgaccaccttggcctcccaaagtgctgggattacaggtgtgagtcaccacacctggctgcatagtgttttaaatgtttgtgtgaagaatgagtttgtggaacaatttgatttgctgtggcctctatgcctaatgagctagtgtttctggcagctctctctacccaactttgcacttgtagttttgagtctttgtctctctggaatatgaacaggtttataaaacattccatggtgaacaattctgtcggctgcattatagccatgagtgaatagacagcattggctggtccaagctctgttattgagtatacaaggaactgattttt

SEQ ID NO: 6057 - DNA, 6000 bp, Homo sapiens
ttcaccctatcagtttccatctgacaccacttattccttcctcttcctcaaaacgctcctcttttggtttccaggatcccacacacccttggtttttccttctacctcttggctactctttctgtctcctttgcagcctcttcctcacctgcccaggccctagcttggtcctgaacccctttgtcaacactctggaaggggatcacagcccaggccttgttgtcaataccagttgtgcactgatgacgcccaagcctctctgccaaattcctgactcagatcctactgcccaggtgacacctccactttgacaattcaaataaaacattatcaaaaatggggacatcctccacctggccccctcccaggcttctctgcttgatggagggcaccacagtgcactccggtgctctgccccttcctctcccctacatgtccatgccacccacagttcccccctgtcttttctgtctcccacatggatctggaatcatgcccctttttccttccctactcccaaccgacttgtccaagccatccttatctctcctctacacttccatttttatcttccctataatctaatcccagatttatctggtttattatataaaccagagttatcttttttaatcaaaccatatcagtggatggaaggataagcaacatgtggtagacccatatagtggaatattctttggccataaaaggaatgaaggaccatgctacaacatggatgacgcttgaaaacattgtgctcaatgaatgacaccagacgcaaaagaccatatatgatgatattccatttaaagcaggcaaatccatggagacagaaagtagactagcaggttcttagggctggagggagacaggaatgggaggaactgcttcatgggtacagggtttcctttttttttttcttagagatggggtcttgctatgttgcccaggctggtctccacctcctgggctcaagcaatcctcctgcctcagcctccaaagtgattgggattccaggtgcatgccactatgtacggggcctttgacagtgtttccttttgagataatgaaaaggttctggaactagatagcagtgcagcttgcacaacattgtgaatgtactaaatgccaccagccgtatgcttgataatgggtaaaatggtaacgtttatgttatgtgtattttactacattttttgtaaaaaatcaaatggtcctggccgggcacagtggctcacacctgtaatcccagcattttgggaggtcaaggtgggcagatcacctgaggtcaggagttcgagacctgcctgggcaacatgacaaaaccccatctcaactgaaaaaaaaaaaaattagctgagcatggtggcgggctcctgtaatcccagctactcaggaggctgaggcaggagaatcgcttgaacctgggaggcagaggttgcagtgagctgagatcgcgccattgcactccagcctgggcgacaagaatgaaactccatctcaaaaaaaaaaaaaaaaatcaaacgatccctcccctgcttagaactcccatggcttcctgtgctccacatggactccagccccttctgtgggcctccggcctcctccccagccttacttcttatgactctcttcaccctcctctgtgcatccacaatcttggcctccttttggcctcataaggccaagctcttcccacctcaggcccttcgcacatgctgttctctcttctgaaaaggttgtccctctctcttcatagctgcttctacttcagctttcagtgtccgtttaaatgtcacctcctcagagaccccttccctgctgtcctgcctcagtggatctgcatctcagtctccaccttttgttatctccaccacaacccccagctcattcctttgcaatacttcattgttttcaagacagggtcccactctgtcacccaggctggagtgcagtggcgtgatcacatctcactgcagccttgacctcccagactcaagcaatcctctggcctcagcctcctgagtagctgggaatacaggcatgcaccaccacacctggctaggtcatgtgtgtgtgtgtgtgtgtgtgtgtgtgtgtacacaaaataaacaaaatatatgtaattatacaattataattatacaattataattatagaaatgtttatatataagtgtgtgtgtgtgtatatatatgtgtgtgtgtgtatatacatatatgtatgtagagacagagtctcactatgtttcccaggctggttttgaactcctggcctcaagtgatctgcctgcttcaacctcccaaagtgctgggattgcaggcgtgagcccccgcacccagcccccttttcaatgcttatcactttgtaatttgtcgtttagtatttgtgtgcctccctatatagactaagtttaatgagggcaggcaggacctgcctgtcttactcaactctgtgttctctgcctagcacatagttggcactcagaaactctttgctgaattgatgacagatcacccagcgggcaagggaaaccattgaggcaggatttacacccaggcctctttgatgcaatgcctgtgttcttcctactcttctgtgtgactctgaactgtgaggcagaaggctgagccgagtgccagagaagagagttggaggtgaccgtgcccttttcacatagctgcgtcatcaggcatcggtgcccaggccttgtgcagatcccgtcgtgtggccgtcactgctgtagataaatcttatctgctgggaaaggcacctctgggcctaaacaacagatgtcactctaagaaatcccagcagaacccccaccctgtctctggctgagaactcatctacttttctctccctctgtccattttctcacactctaccagagccaggacagggcttttgccctaggaagggaagtggtcaactgtagccgttgataactgccttggaggaaccaaaaccagcagaggcagccctctctcttcccgctggggaaagccagagctggccactgccctggcccggccccagctgtcctggagcccagggatggcccagtcccccagggctgtactcagatcttcctcaaaatgctccatgtggccaggcgcggtggctcatgcctagaatcccagcactttgagagaccaaggcgggaggatcccttgagcctaggagcttgagactagcctaggcaacatagtgagaccctgtctccacaaaaaaataaaaattagccaggtgtggtgatgcatgcctgtggtcccaggtacccaggaggctaagatgggaggatagtttgagtccaggtggtcaaggccgaagtgggtagtgattgcaccactgcactccagcctgggtgacagagcaagaccccatccctaaataagtaagtacacgctccatgaacatcaaaaggcaggacacccagaaaattcaagcaagctgggctcactgcttggtaagaaatgcggaggaccgggggtggggcaaggactgccttgtgtaagagaactgctttggtattgcccaaaccggaacaagtccttcatctaacgcagttcctaatctttttgtaatctggggcctttgacatctggggaagcttctggacctcttccaagagtaatgtttttcaatgcataaaacagaacgaatgcatcgtattacaaatgatgccagctatcttgcattgaagttttgaatttttttttacttgtaataaatagatggagttcttatagtacacattaaactataagaacagctggctcagtaactactataattttgaagtaatgatacatataagttatattttgagatatctccaataactatactgtggtttaaaaacatctgtgattttgactgatgacaaagttagtgggtttttttttccgttttttttttcttttgagatggagtttcactcttgttgcccaggctggagtgcagtggcgtgatctcagttcactgcaacctccacctcccgggttcaagcgattcttctgcctcagcttcccaagtagctgggattacaggcatgcgctaccacacccggctaattttgtattttttagtagagacagggtttcaccatgttggccaggctggtcttaaactcctgacctcaggtgatccaccggcctcagcctcccaaagtgctgggattacaggcatgagccaccgcgcctggccagttagtgacgtttgtaatgcaactgtaatttgttacctacattcataattgaaggaaatattaaatttcagttaaaggccagtggctcatgtctattatcccaatttaaaaaaaaaaatttggggaggctgaggccggaggattgcttgaagccaggagtttgagaccagcctgggaaacaaagcaagaccccatctctacaaaaaataaaaataaataaataataaattagctgggtacagtagcatgtgcctgtagtcccagctacttgggaggctgagacaggggtatcacttgagcctgggagtttgaggctgcagtgagctgtgctcgagccactgcattccagcctgagcaacaaagtgagaccctgtctctaaacaaacaaacaaagtaataatacgtttcagttagaggttaatgaaaataaagaatttttttcccacccaagttaatagacctcctggattctttctgtggacctcagcttactcttccctaagttgttttgtttttgtttttgtttttgttttttaagagacagggtcttgctctgtcacccaggctggagtgctgtggtgcaatcgtagctcactgcagcctcgaactcctgggctcaagggattctcccacctcagcctcctgagtagctgggactacaggggcacaccaccatgcccagctaattttttaaaacattttttatagaaatggggtactgttctgtcaccaaggctcatcttgaactcctgggctcaagcagtcctcccgcctcagcctcccaaagtgctcagactacaggtgtgagccaccatgcccggccttctcctttaagtattgttggcctcactttcccaactaaaatgggagctcactaagaacaaaggctgttccttcatcttatacttagtaccttgaaagggcctaccacacagtaggtggtcacgtgttagtctgttaggtcttttggattttctaggtagacaatcacatcgattgcaaataatagtctttctcttttcagtctttgtatttcttttttcttgttttattgcattgactgagctcatcagtgaaatgttgaatagtagcaatgatggagggcaccccaatcttattatgctcaatactcattaatttatgcaataggaatgtaaagtacctactgcaggtcaaatcctgtgcctggggataacagtgtaacacatttgagatcttttcctgtccactgaaatgcctgagcagtagcagtatttcagtaaacacgacaatgctgagaatatcaccaaattctccagacttgctgaagtgttcctttgggatcctggttcccaaaaagtatggacataggtccctgctggtggccccaggttccaggccatcagtaaggttgggggctgcagactggaccactgcaccgtggagcagaggcaagtacccagggagaagactgagcgatgcctctgtaggggaagggatgggggaaggtagccaggggatcaagccaggccagggtttgagccttgccttgccttagcagggtctgttgaggtcaccacctgtctgcactaagggtctaactacaggcaagaccagatgttaagacagagggctgcaacttccaggtgtgcaactaggggacggggtacttgttcccttttcccttcctcaaccagaggggagtgaacacagaggaggggctgttgggagcagtccccacatcctctccactctgtctagctggccctgggggaggaggagaatttttaataaaatataaggaagttga

SEQ ID NO: 6058 - DNA, 6000 bp, Homo sapiens
aaacacagttctcttcttgaagacacctaaaatgtagtaaggaagaggagagaaaaaggctcatgcaaatataagcaaaatactatgcagaaagagggcacacatgaagacctatgggagattctttagctggagaatcaaatcattcaatgacagagaaatgcagactccctcctctgctcccaccacctcccaaatccccaaatcggaattcacaatggtctccttttgtcatgttgagaatttgttacctcgaaagagcacacccagggctgtgttccaaagttaaaagctgggatatgggcgtatactgcaagaccaaatatttaggaaatacctttttctggaaaggaaagaacacatttcacagctgaaaagagaagtgaaaaatgaaactaaagaagcgtggaggtaatatttacttgctagatttatacagtgcctacctttagaaaagctgggctataaatcctgcacgtgaccccctaacacacatacactctgttcccagtgacttggctctttgtgaattatctgcagcatattttgcaatcatttcaccctgttcatctccctgcagccctgcccccaccagctcacccacacttcacccctcagaagaatgagtaagataatagtagagactgagtttggtgtcagatatgcctgggctaagtccaggctccacatttactcagctgggtgaccctggacattgtaattcaagtctcgaagtctcagtttccatatctgtaaaatggggataatcatgacgataacacatagcttattggatcgcagtgaggattaaataagataaaggctgtaaagggcctatcacagtacctggcacagagcactcagtagtgttagctattattattattcctgcacttgtgtgtaaaggggatgcaaaccaattttactattcatttaaacaaattatcagctacagcagcctctgaaacacaggcctataatgcatcctaaagtaaatgcgaaatatttgaatttgtgtcatttctaattttctctattaagttgaaaattgagtatgaacacaccagaatggcaaagaggccagatttctcttgtaaccaacaaaattgagatcgctattaacattagaatgaagatgaccgaaacagcttaatacttctcccaggggcacttgcattttacactggggccagaaccactggacaaaggaaggaaacaggagtggtaaggtttcaggtaccaagggacggacagatgcattttcatagggggaattgcaacactcctgaaagtatctcaggcactcactcatttattcaatacatattatgtacttactatctgccagatactgctctaggcactggtgaacaaaatagatgagacacctgccttcatgggggttacattttagtggggggatacagacaataagcaataaagttaatgaataagtaaactatatagtatgttagacaggatttcagtaagagtaaggggagatagggagcgctgtgggggtctgtcagtactgaatcaggatgaggtcctggtgagcctcactgaacaggtgagatttgcggaaagccttgaagaagccgagggagtttgtgtttcaggcagtgggaatagctagagcaaaggccttacaatgtgcgtgtgtgttgaggggtcattcctggagtgtctggggcccagccaggaggctagtgtatcccgagtgagggggacagcagtaggagatgatgtaaggggatttgtactcagccattcctgtaggtcaccacaaggaccatggcttttactaagtgaaatgggtaaccatggatggttttgagcagaggagtgctgggatgtgatgttttaaatgggttactccgactgctgtattgagaaaataccagaggggagagggaaggtagaccagggggatcagccacaggagaaacctgggtgaaggatgctggttcagccccaggtggtggcagtgcaggaaatgagaagtggtcaggttctgaattcacctgaaggtagggtcaacaggatctcctgatggactagacgtggaatgatgagagaaaggagtcaagagtgactccaggattttgaactgagcaactagaagtatgggatggtcatcgactgcgatggggaaggctgtgtgaggaggagcaggctttgaagagatcaggaatccagtgtttggatgtattaggcttgaaatgtctatcagacggagtcagctgtagtctggaattcaggagagaggtctgggctggagatagacatttgatatagacagctgctgaaagccacgggaatggttagggtcacccagggaatgagggtggatgtggaggcgaggaggtcttatgtggaggcaggtagaggttttccccaagagggagttgtaggcccccctgaaagggatcacgaagccccactggaggggagcccggtcctgcagggggtgccgtggaacttgctgtggttgcagggagtgatggagggaagtgtttgcttctccgggaaggagaggtgctggatagattcctgccggagttgcagaaataattaagagaagtaggtaaggatatcctagtagaacacgtgctcggctgcctccaaggaattattaaacctgggtctaggaatctgttcagacatctgggcaccgctgcctcgcctaccaggctccgcctcgctgcccctcccgcttcccctcccctcctctatctgtcacttctacaaccgctctgattataattgatcaaacagaatcacggaatcacggctcatcttgccgttttgttcagtggcccgatccgaaacgagactctggtagtcgggcaaattgtattcctcctccttggaattccgctcacagaggccttcccggcgtggccggcccagcagggacgcgccgccgcagcggaggagagaacgcgggcggggggctgcaggccggcgcggggggcgcgacgccgccggcggggcgcgagggggtgtgtccgcgccgcggccaccgcggccaccgcggctggcgcccgggtgcgccgcgcgccccggcctccccgggggctcctcacgccgcccctcgcccgccggcggccggggcccgctccctttgacgtcatgcgggcggagggctcgctcgggcggcgctgccgcgggcgccgggagggggcccgacttcgggctccagtccgccgccgtgcgccccgcgccgtgcgcccggctccctgcgcgccgccgcagccacatctggaagcgttcagcgcgtctgcctccggcgcgccgggcgggcgggcgggcggcgcgggcaggggcgggcgcgggcgcggcggggctgggccggggggagtgagcgcggcgctctcgcgcgcccggtgtctccctctcgctgcctctgcagaaacagctcctgccagagcggcgctcggcgcggcgcggcgggcccggagcggcggcggcggctcttcctgcctccgcgcccaggagttgccggctccctttgacagcagagagccgggcaggggcctcaggaggactcgctgggagtgggcagaggcgcctcggcccctgccggcccaggcgggccccgcgcgccccccgcccctcctctccgcctcttctcgccctgcctctcccgatttattttttcaaatggtgtagccgccggaggtgcggtgctcagttcttggaaggggcccggatgtactgaggatgcgttacagtttcactcgaggaggcagtagtggaaaggagcagtttttggggtttgatgccataatgggaatcaggtaatcgtcggcggggaagaagaaacgctgcagaccacggcttcctcgaatcttgcgcgaaagccgccggcctcggaggagggattaatccagacccgccggggggtgttttcacatttcttcctcttcgtggctgctcctcctattaaaaccatttttggtccatggtcaatgagaatacgaggatgtacattccagaggaaaaccaccaaggtaaggctggaccccgccgcctcgccggggctccctgccttttccaccgggttcctgccctacccgcgctccccgcggccccggggccggtccctgcggagtggcccggggccgcgtccgcgaggggcgcctccgcctcgtcggagcgcccgggagcccggcgggaccggggcccgaaccgccgcgcgagacggagcggaaaattcccgcccctccccctccgggccccagcttctccagagcatgtgtttcctgtgaaattccaggcgaggggggaaaagttccccaagtggctgccgccgcctcgctttctcgcgtccgcctggagagcccggctgcctggccagccgcgcggggggcagagggcgccggcgccgcggagcccagaggcccggggtccctcgcccggctcggggcgcggctgggagcgcgcgcgcgcgcaccctgcgccggcagagcccggcgcccacggccgcccctggggcgccctcgcgctgcccggcgtccactctcgtccaggcgcccctgccctgggcggcgcgctccaggtggcgggtgggggcggcggtgcagatgtgaagcccagcgcgcccctctggttccccctctgtaggtccccttcttcctctctccctccctcctccgccgctcacctacacccacccacctctccactgctgttgaccccgagcgcgcccacgccgcgtgtgttctcattcgcacccacatgtgggctagcacctgaggatggaagcggcgaggagccgggcggtgtgtgggctttgctgtttcgtgtttgaaggagatcatgaaagggtgtgcctggctcacgcggctccatactattgcccagtgttttccgagcatctccatccttggccgcgagtgtcaccagctccccctgtgatggtgaaaggcagtcaggtaactccctacttcctggaaactttctccctcaccgctctccccccatattaacaagttgttttcttggacgttgcttagcatttaaggttttggggacggggggtgcagacagggtggtccagcggggctttctggcaacctccaggcatgacatctctttcttctcgccactgctctgtctctttgggtgtagtctctcccttttctctcccagttcccagagcctccctgtttgcactcttcctcttctcttcccctgaaagcctatctgtcactgctggtctctgttccttccctgggttcttcccagtgatcctctgaagaccagcctggtggaaggagttgtctccaggtctttttgtccagctttttccctctgtttgctcccagctccaccttttggggacagggccttcactctttagagccagaagctgccatccagcctgcctggtctccatctatcctgaaaccgattttggggccagtcttctctgctttccagcatgggtggcagcttggggattgtggcctcctttggaagaaagaatcttgtcaagggtcatgggttctagggtgagccagagctttggggtcacaagggcagtatccatgtttggatttctctactgttgaccccatccctcacctgatcccctctcccttctgtagctgatgggctagtgaatggtttaggagggaaggagtgagacacaaaagagggtggtatttgtgaagagtggggatgcaagatgactcccctccaggttctgagactgcgtgctttacccacctcctcagtctaagcagcattgaagaggagagctctgtagtattgccctaagtatcactgtcaatggcaatgtactgtggtaataatagtgattattcaccttattcacaggatgataatcttaactagtttacaaggtctcctcttagtgcaggataaaccccttctgaacccatttccttactctggttgttttctttggcccctttgcctctcagcatctccctgctgtatgctgggagcagacattaaaagtaggagtgc

SEQ ID NO: 6059 - DNA, 6000 bp, Homo sapiens
tctgtctgggtggctgtccagccagccatcaggctgtcatttttctgctgtctggctgtccagcttatctatctggcttgtctttctagatcttgtatttgcattgattttcaaatatttaatgtcagaaaacgtaatctaactttaaaataagacagagcatgtcatagttggagaaaaatcaagaagtagagaaaggcttatgtggcagcagcagcccctgccctgcctttccctcccgtcctccagaggcttctccttcttggctatttcttctgttagtcatctccacgtttctcaataataggttcacactacggttcttgatttaaatggtgtaaatattgcttatggcacaggcgaatcgtattcctgctgcaactggatggtgctggctttagtgactgcctcactcttcccagattgcacagctttctgtgtgctgaccctcccttcttcccaaattctccatcaaaactgtctgcacttgatctcttgagcccaggaggtcaagactgcagtgagccatgatcacaccactgcactccagcctgggcagcggagtgagaccctgtctcttaaaagaaacagaaaaccctgtgcccacacttgttacctctcatcctcagatctctgtgctatcagaccatctgaccattttctctgtgcttagaggccccttcctgaaaccctctggccctgtaacagctgccagctagacctgcgctcctgacatcacagcagagggaggggaagggaaaggagggccaacgaggagagcaggacaccaatgcagtgtcggtttagagagagaaccttaagaccccctgcggaagggggcaaggaggtacgagacccagccaggttggcagctgcagccccgggcccttcccacacctgccttccatccctgcagttgatggtggcatcacccttgagaaggaaatctccaaagaagagctggttgccgtcctggagctctaccgggaggcacggggggcctcctcggatgtcaccaggctgctggagaccctctcccagatggagagataccaggtgaggagcccaggccctggtccgaaggagggaggcaggtttcagtgtgggtggcataatcccttccctcagatattggtaacattttgagtgacacagttgcaaaagccagagaagtgggagacgccaactgtggcaccaggggtgggacctgaatatctgcagccgagccctgcagcctctgctcttccttagcaacattccatggtgtttctgggacggcgatcaaggaccaagagcgacctgagcctgaagatgtaccaggaggagatccaggtaggagcctggccgaccacgctgcgaatcctcccccaagctatgtcctgggaggggcagggagctgctctctggccctctgagtagagggagaaggctggtagagagatgcagaccgtccatcgggaccactgctggggttgtgtgggacctgagcggggctcacttagccttgaacccttgactcgtgcccagcagaggcagctctccagcctgcctgccgccatatgtccctgccccttatgaattctccagaacctcctctccatctcttactctgagtcagctgcaaactcaaacatgtgtactaagaaacacagtgagcaaagaggaaagagcggcgaccgtggtgaactggcaaggatgtccctgtccaaaggagacagtctcctcccagctccaggatgtgcctgtccaaaggggacacagcctcctcccagccccagcgagtgctgcccaataggaagaaggccctactgcggtcgggctgcttggtgttttgttttgagatggagtctcgctctgtctcccaggctggagtgcagcagcacgatctaggctcactgcaacctccgcctcctgggttcaagcgattctcctgcctcagcctcccgagtagctgggattacaggcacacgccaccacacctggctaatttttgtatatttagtggagacggggtttcaccatgttggccaggctgggagtgcttgggatttttcataattgggtgttttttgttttgttttgttttagagatggtatcgctctgtcacctgggctggagtccagtggcgtgatcatagctcactgtagcctccaacccctgggctcaagtgatcctccccactcagcctacccaagcagctggaactacaggtgtgcactgtgacaccctaattaccttatttttgtagcagtgaggtcttgctggggtctcaaactcctggtctcaagcaattcttccaccttggcttctaatttaagaaaaggcaggccaggcatggtggctcatgcctgtaatcccagcactttgggaggccaaggcaggcggatcacttgatgccaggagctcgagaccagcctggccaacatggtgaaaccctgtctctactaaaattacaaaatttagccaggcctggttccgtgcacctgtaatcccagctactgaagaggctgagtcaggagaattacttgactccaggaggcagaggttgcagtgagccaagatcatgccactgcactccagcttgggtgacagagctagactctgtctcaaaaaaaaaaaaaaaaggcagaatcagatgtttttctttttttgcatgacctcccaatctttacatattggcagctaaggaaaatatctcacaaagcaccgtgtgggctggcatttggcacggtgccttccagaccatgggccaccagcccatgagccctgcagagtcttctcaaccacctcagggttgccagggctccggggagcctctcccacaccagctatggtggctttgctctgttttctggcattctaatagcttgaagcccttctgtttcactaaaacagtgacaaccagggtccatgcctgaaaagcggggggtgctgtccccaaagcagcttacacattctccgggaacacaagagactcaggcagtgttctttgggctgatgtgtagtggctcactgaacttggtgtcacagaaacatggaaataatagaagcgtttgaccttgggcagtcactccatgcctccctgtctgtgcaaggggatgactgtgcagcagcacccattcaggtgtggttggaaggaggtgtgctgcccttggcctctgcccttctgcctgtccatctgctccaggcctcagtttccccctctgtaaaacaagggggccagaactaggccatctcgaagctctaaaagtctatggttcagtcttttaaaaagtagggtagggtatggtggtgcacacctgtatttccagctgcttgggaggctgaggcgggaggatcatttgagcccaggagtgggaggctgcagtgagccgtacctcgccactgctctccagcctgtgccacacagtgaatctctgtctcctaaaaaaaaaaaaaaaaaaaaggaaatgtggggtatacttaattccttaattacctgaatacctcagtccctgaaaatgtcagagtttataatcatggccttaggcaggtgaggtattcagcacaatacagctctaagcctcggtgtctcgggtgtgaaacagggacacaattcctgccaagctcaaaaggggtcactcggggggccctttagtgaaggacaaaaggttatgctcacaaacaaggggtgagggttgttcctgcctgggcctgttagagagctgttatgcgcaaacctccagacactagggaaagatttcattgtcatttttgcctctggggccacattcaaaattcccagcatttctgggcctgtgacgggggtttcagtaccagctgggtgaggctggcagccctgccccttccagcctggatgctgtgggctgtgtgaccttgtggggtgggcggggcagggggtggggtgcagccctcagcaccccttctgctctcttctccaggagtggtatgaggagcatgccagggagcaagagcagcagcgacaactcagcagcagtgcagcccccgccgcccagcagcccccaggcagccgccagcgctcccagaccgttacctagcccagcgcccgaaagccgtctcttctatgcaataacacaatagtattactctactgcgatgtacggaactgcggtgtgtgtacacatactcacgtatatgcacatatttatatacaggaagaaaaaagacagacaagatggggcttggtttataaccaccttgccctgtcttccttaactccagaagccagtttggtgaggggtgggggtgcggccaccaggtctgagctcttcctactgtggaaggctccagaaggcccttcacaaggagacccctcacctggatccagtcgactgcggggcttgcccctcatgtgggctggcctccatcggccacgtccaaagctgtcactgctactgcttcaggctcacatccccccgacctgatggcgtgcccgccccctctccctgcggcccatgccacaggtttctgtgttttgctttagggacagaaccacttaggaaggaaagaactcccggtctccagggtggtatttcagtgtctgtgataatgtcacgcaacacctcttcggggaccagtgcccaggatctaatggaagcggaattggggcaactgggcccatgtggccagagctcagttagccagtgccgggcggccacagattacactgaccaatctcctcccttggctctgcaagcctcccacccagccttctctggcttaacccttgttggcgaaaactcttccacagtggcctccttggggacccagaacccggaggaaggggcatgaggcaggaagtggggccgatgtctgcaacccagaccacttcgtggaatgggctcttgaccaaatccctttttttgcgatttacccgttcaagcaaaacaacgttttggttaactaaggattgtgctaaagccgataccaggtccttcacacgtgtgcactaggaacaggagcgaacagcacagagagacgctccctgtgggacgcagcagccccgtggccccggcccagttcccagccaccctccctggctctgctcacaccagagatttccatagcaggagcggttggtgcagaagtaggttcagatgaacctcagttaacgtcgccacccctcctcccaccatggtaccctgtaggagccctgtatgacatctgagcgtggtggaggtaggagggttgccagctgcagtgaccctgccacagaggcagggtcagtgcagaggtcgctttggttccgcttccctgggccacagaacggaacacagcataggttctgcagcaggagccgcagtggcaggatggagggtgcgaagggcaaggagtgcactgctgggcattcctggccagccccggccctctggtgcctgcttcctgtgacttcagaaggcaggtggacagagcctccctctggccttgtcctcttcccagccacagaacgggcagggtggcacccgaccccaggggagcagtacctggtcccccaccccctcctcccaaccacctccaaggccaagctgggtcccatagccagcacggcatggttctccccttccccccttcccaggtcaggggagttggacaagtagcaggtgtttgtttttaaagcacagccctttgggaaagcaacacattattgagactcactgtgattcccccgggagtcagactggctttgtcctcttcctctctggagggccatgggccatcagcaggagctccacatcgagccccaggccagaaccccctccctttcacagagagggaactttattgcacaattgggtgccttttagcttttgtgtgttgaaatgggcgttttggaagcaagggtcaggggacagcttctaaaggtgtgagtctctgacctgagcatctgggcctcgcctgggcccttcttcctccccaggggtggaaacgtggaggggccagcagcaccccggggtctgcccaggggagtcaaggccccg

SEQ ID NO: 6060 - DNA, 6000 bp, Homo sapiens
tcttctcagctcctccatcacccatgtaccagttagttctctgtgttaaacttcttctgtttgaaagacttagagtgtttcttgtttcccagctggatcacgaaagacaaatcttaccaataaatggctactataatgcccagccatccccaggaggataaagggagactccaggggtgagaaatccacaggttcaccgcgggcagggcattgtctttactcctgtccttttgtgtttttcaccagagcctcctgagactgatttccactgggcaacaccagacccagaccgagcaccccaggacgcctagaaggtgtgtgagggtgggactcttctcccaggccttcttccgaaggagctgctgagagagccttctttccacaggcccattaggcatccagaaagggggctgatggaaatggattcttcttcttcttcttcttcttttttttttttttttgagacagagtctcagtctgtcgcccaggctggagtgcaatggtgcaatctcagctcactgcaacctccgcctcccaggttcaagtgattttcctggcctcagcctcccaagttgagtagctgggactacaggcatgcgccaacaggcccggctaatttttgtatttttagtagagatggtgttttgccatgttggccacaggctggttttgaattcctggtctcaagtcatttcgcccaccttagcctcccaaagtactgggattacaggcacgagccactgtacccggccaggaatggattcttctaaatactttttctttctctcttcttctccactctgctcttagctgactagtgctcttggaaatggtctggcaaacacccagaagtgcataacagatgagggttgtccttttccagagtatttgcattttcagtggtgacaatgccttaacccagtcttttcaacgggggtgactttgccccccagaagtcatttggcaatatttggagatgttttggtcacaatgactcaggaggtgctactagcatctaatagatggaagccagggatgctgctgaacatcctgcacaggattgtagataggacagaatcatcctgtcccaccacaaagaatgatacagccgaaaatgtcaatagtgccaaggttgataaaccctgtcttcaatcaaagtgataaacttctagtagtgaacttctttttttgtttttttttttgttttttttttttttgagacagagtcttgctttgtctcccaggctggagtgcagtggcacgatcttggctcactccaagctccacctccccggttttatgccattctcctgcctcagcctcccgagtagctgggactacaggcgtgcaccacttatgcccagctaattttttttgtaattttagtagagacggggtttcaccatgttagccaggatggcctcgatcccctgacctcatgatccacccgcctcggcctcccaaagtgctgggattacaggcgtgagccaccatgcccggccaacttctagtagtgaacttctaagtaaactgccaggggactagatgaagagtggcatttttctggtccatcattttaaatgaaagagaaatctgtaccacataagggcagctgaaaggactgttgtcttccacagtgggcagcccccagtgtgaagtggctaattagctccaagtagtaagaataaagagttgcatttaactaagtaactgattcttatcctggaaaggatagaagtgaacagggaaaagtgaagaaaatttagataaattaatagaccacaaataaatgggttgtcagaggaagttaggatgtttgaagttttgcagatgctttttcgtagcatatcccgctctgtcaaagataaactaggaaagacgccagttctgctgtcttctgcagactgggtcagcaaacagtgaccgctagacactgaggtcaccaagatgaatacgcctggtctctgtccttgtgttgcgggaagtcagggaccccaaacggatgtatacgtacaaacacacatacatcaggataatagtaaataataataataaataatagtaaacagtggtaagtgcagagataggctctccctaggagggtggagtgattacttccgtcatctcctgtccgcggagaacaagaggcaggaagaccctttgcactcataaccctcatcccatggcagcccctctggtttcacttctctccctgcagccgtgcatattttatggccacaccacagggttagaggatagctggtgttgggaggggaaggcagccctgggttggcgggaagggctggggctctgggggagtctgggggtagtcctgggaaggcagggggtccttccaagacagagtctacaaagctcttgacttcttatagaacaaaactgtacttctctcaaagtcagagaaggagaactgggcttggaaaggagtggcctggttttcagtctgaccccacccctaactcctgggtgactgtggccaagtcactttgcttctgtgggcctcagtcccctcatgcatgaagcagggggctagatgcaaggtcagctggaaaaagtctttgtccatctgggttgccttacccaccccttcttgccctttcattttctcaggtaagatcaccggggcccatagaggtcaagtgcctttctcaaagtcacatagtttaaaagcaaaaataggggctgagtatggtggctcacacttgtaatcccagcactttgggaggctgaggcaggaggactgcttgagcctaggagttggaggctgcagtgagccatgatcatgctgctgtactccagcctagaggatagtgcatgatcctgtctctaagataaataagaaaataaaagcaaaaatggaagttgtagaaacatacctatagcatggtctctgtcataaaaaagaactatatattttgttttttaaaaatacatgtaagtttataaaggcacacaaaaagatatagacagatatacaaattatggtggctcccctttggggagggaaaggaaggggactaagggaagctctatatacttctgtattgctgaaaaattgtactgtgacaaaaacatatttgtgtattatttgtacactttaaaagatcatctttaaaatggacttctgaccaaagtccaggtctcagatttctattttcctcacaacaccaagcctgttctagcccgctccaggtctagaatgctgcagcactaggctcgcattgccactcccatacccggcaggacgtggcagggtcaccaccctttggctcagcccagaccaggcattgcaattcttctcacagagcccttgatatgaaaactatttgccatgctgccttaagctagtggttggatttcaggcatgagctggcaaatagaaaaggcagggaggtgcttttcagaacctttgagatcaaacagccagggtgctgagcaccttattgcagggaggaccatgcccaatgtaaggacctggctcaagggagactggagtttctaggggtctctgggatatgtggggcagtggggacagtgcagagaccttttcacagagccaaggagataacccagcacccagagagcagacgaatccacgggctctgtgtgggagtgagggaggccttcccggctttcacatccaggtgcacctgagccccgatcccccatgagtctgtctcaggaagtaaatggcaaaagcgctaagtagatagccccagaggaggaggagaattctgaattctgtttatagctctgctcctattttgttttctaacctcagaaaactgatttatccttgggaagggtcagtttcttcattaggacaatgaagaaaaatccagctgtcccttccaaggggaggtatcatgagcagtatcaaggtaagcaagggaacctggtttggaatcctggttgacaccggctttcactttaagaagtcgcaagagactgccgcaagagaggaagccacagaccaggttggaccctgagcctggagtactgccttttctcttctttgcctgctaaactccttgcttgtcaagattcagcagagatgacaccttctctgggaaggcttcctgagtctcctgcagtgagcccctaggctcccctagcccttggctcttatgtcttatctctgagaaatctgagatctgcacttttgttagaagtccgttttaaagacaatcttttaaagtgtacaaatagaaaccttatcttattgtattgcaggcctatctcctcccccggtgtgtatcaatgctcaggctgggcctttgtctgctggcttgtggagggaggcaggacaagccagtgaccacattcctgcactctgggctgcctcctgtggggcccgtgaggaagcggcagccttccctgccgcgtgcagggcctgggttgtgtgggtggctctcccgagtctcctccagccctttttgggtctgattctctgaccctcctctctctccttgctcaccacttggcactccactccttatccttttgctgcattaagtttggaaagagattttggagaaaatatagcccatcaacgaatttctcctcctcccagggcctgtctaggcgtgtgccatgcccaccctcttcctttccagcgctggccacatcctccctgcaccttcagtgcctgctttccctgcctcttcctgggctccgggtctgtgtccacagtgtcctgcgtggccctcgcgctgcctctggttgcccacattcctgcaactctgtgaccacagcaggggcgattacacattcctggcctggcagccaacagtgtaaaaaagaacagaatgtcctagggccccgcctagcccccagcttcacctgggcccctcccgggtctggacaaggttggagggggtggcgaggaatcagcaggaaagaggagggaccaggaggaggcagacgcatcccacctgagtgcgctgctcccacttagtgagcggggaggagacctgcagagacctcttctctcttctctgcagggcctgagggtgaggctgacctgtgggtgcccttggagggctgcccacttgctgagcctctagctcctggaagcacacttgggactccccccttgctctccttcctggagacagactccctttggtgctggctccttctatttgcccccaccactgccccccacctgcctctactcactcagtgcccctcctccatccctatctctctgtccttcgctgtccctctctattgtctccctctttctgccctcctgtcctcccggttccccacccaggccctctcagcctggctggccccttctccttgtgttgccctcctagctgtgggctcaggatccttctacttgttcagatctttgcccctcacctgccatcctgtcccccagcctccttgcctgtctgcgtctaaagcccctgcccagagtccgccttctcaggtccagtactcccagttcacctgccctcgggagccctccttccttcggaaaactcccggctctgactcctcctcagcccctccccccgccctgctcacctttaattgagatgctaatgagattcctgtcgcttccatccctggccggccagcgggcgggctccccagccaggccgctgcacctgtcaggtgagggggaggagaggtttggctgccagattcaactggaaaggaaccagtcccagtccagccgcaacctgggagtgggaagctggaggcagcccagacctcctggagccctgcagtcctggggcagagacagaatcaggacacagctcgaggtcagggccagaggctggagctgagggcctagagtgagagggggcaaggcaagggggggagaggaagagaggcaggattagagagaggaggcaggccagaaagaggagagcaggagagacccaaagagaaacagaaggcagatagagagggagtgagaggcaggagctgagacacagatcctggaggaagaagaccaaagga

SEQ ID NO: 6061 - DNA, 6000 bp, Homo sapiens
tttttatatcatcctctccaaaccagtaggcttgacctatcctttgacttctcccaccatgccgttccacaaagctggattgctctgcatagtgctgctagagatctggcccccccttaattgaatttgcctgcccttttggggctctgcaattgggttttctgtctttttaaacttttaattcacattatacactctgtcatttctttaacgtgtctaagggaattctggctatccagtgacatgcagcaggtctgctgtgggccgacggtcatgcctcttgtcacccttgcacaggagtcttaagagcctgagcctgtaggtcacttacccaggttactattgtccctgcagcttttggggccacagttctgcatgattctgtagctgacctcgaacaaaaagcaaatgagaagaaatcatcacatcacaaagtagaaaccagagtcttttttttttttaacttattattgaaaattgaagccatacacagaattatagtgtggtgatttcccctgtgccatcacgccacgtcaagggccatcagcttgggcactctcactcagtctgtatctactcctcctccccagcactcacaggatgaatttgacaacatattttattcctaagcattcaaaatctatcctaaaagaatagatattgttcttaaggtagccaagaagtgctaaacactgaggttctttttgctttcaaagatcccgggggcagggggtgaaccagaatcatctgcctctctctccacattggcaagacatcatgccccttttctcctgtgaactgttttttttttttcagggctgtgaattcttcctgtaattagacccccattctgtcatggtttgattttttaaaaatatacctgggctgcctctgcccttgggtagtaagaggagagtcaccatattgattaagctttaaaagattaagacttctcatttttagagcttaataaggaacaaggggatttagagaccacatggtctgatcccaactgtttctagattagcagacaggttcaggagtggcatgttcttgtgtttgtaaagctagttagtggcagagccaggatgggaagccaagggcctctttcttttctctttgttttgagagagagtgttgctctgtcacccaggcttgagtacagtgacacaatcatagctcaatgcagccttgaactcctgggctcaagtgatcctcctgcctcagcctcctgagtagctgggtccacaggtgcatgctactacacctggctcattttatttatttttgtagggactggctttcactatgttgcccaggctggtctcgacctcctggcctcaagtggtccttctaccttggcctcccaaagtgttgggattacaggcatgagccactgcacccagcccatatcactctcctctcctgtctcatctccactctgttattgagccctgctggtaagttgtgtttttgtttgaggttgttggttattgtatttgtcagttctcaagtgctcatttggtttttctgtctccttgctgagactccctatgtttccatttgctctaagagcattggcccttacttactggaacaggttaataatagctgctgccaggtctttgtcaggtaattccaaaaccttgtgtcaccttggcgctagcatctgtgagttatttcccacaggagttgagaatttcttggttcttgtgtattgagaaattttgattgtatcctaaacattttgaatattgttaaaggactccaggccttgtttaaatcctagggagaacattgatgtttttgttttagcaggcaattgacccagttgggctcaggctgcaagctctaaccagccttctgtagtttgtagttgcggtgacagtttgattttcaaagccttcaaatctgtcctagctgtgtgccatgctgtggcccgtctgtcctgggcagtatctcttgcagcattcagttctttcagtctgcgtatgcagtttaggggtagatcttgcagctgggtgtgggtctaggagttcatatacaacttcacaggctgctttctcaagctcctcttctccgcagttctctaagcttccctggagtccccttctctgatcggccagccagaaagctgggggtttggttattccccctttgccacccactttctgtaaccatgcctgtattttgggcccaggagcatgaagatagaaaaagcaaccagattctcccaatcctgctgagaccacagctcttctcatcagaaaagaaggttccttccctcagagttttgactcctgcagtctctggttgctgccacaggaatgctcaggtctgggtgcaagaaaataaagaaaaggactgagcatggtggctcacacctgtaatcccgcactttgggaggccaaagcagaaggattgcttgagtccaggagtttaagaccagcctgggcaacatagcaacacccctgtctctaccaaaaattttttaaaaaatagctgggcatggtggtgtgtgcctgtagtctaaactacttgggaggctgaggtgggagaatcatttaagcccagtagttcaagaccagcctgggcaacatagcaacacactcatctctacaaaaagttagttgggcatggtgatgcatgcctatagtctcaactacttggggaggctgaggtgggagaatcatttgagcctaggcgttcaaggctgcagtgagctatgattgtgccactgcactccagcctgggtgacagagcaacactccctctcaaaacaaaaaagagaaaagaaagaggcccttggactcccgtcctggctctgcccctaaccagcttcacaaacacaagaacacgccactcctgaacctggtctgtgaatcaagaaacagttgggatcagaccatgtggtctctaaatccccttgctccttattaagctctaaaaatgagaagtcttaaaattttaaagcttaattagccagatcccatatcttttaaaaaaaaaggaaagaaaaccaggatttcctcccagcctctctgcctgttagactctgttggcctccctggccactagagaccttctggaggtcttctgtcctggtgccatttcagggtttcaggctgcatcagtgctggcagcagcaaacagtaaactcactgttgggcattactccaaattctgttgtttcccccatctgcctgccatgatttacttctgagtccacagttagctgctgtgtgcatcccattctggctttgtagtgtcagtgaggaagacggggtagagtgtgcctgctccatttttcccagaacctccgaattccaccctgaaagtggagtctagtctgatcaaatgtgtgggacctgcttatgtggccctcttcctgttcatcacaccttaaccctgaagggcaatgagcaaacacaatgatttgccaaacagcagaagggctcatgcccatttcgtgggagtccccagctggaccctgtacaaaaaactgctttagagactgctttaaggtgtggaaggacttctgtgcaaggttgcagctctgttaggagaagcatattagcactgacctaaatggccatccaagtatggttaattgcattgtcgtatttataattccttgatacagaatgatctctaggttaagttaggcacaagaggaagacatgtacaactctgtgtggtgggccaccttgtgtgttttttgaagtgtgtgaataaatatgtgtattacacatatttacatgcacagaatctttgagagggtaaaatgatgagaaactgtacctttaagaagggaaactaggggcagggagacctgtttctctgcatccccttgattttctgtgcatttagcaccacatgtaagtgttgccattgaaaatatcagtttatttaaaaataatactggtggccttcagcagaatcccaggggcctgatttagcctggcggccctgcttaaagtccaggtgttggcagagggggtgggccataacttacctgccctgtatactgtgggaacacaggtggagtttcccgaagcccggatttatgaggagaccctgaacattttgctgtatgaggcccaggatggccggggacctgacaatgcgctcctggaggccacaggcggggcggcggggcgctcccaccacctggacgaggacgaggagcgggagcggatcgagcgcgtgcggaggatccacatcaagcgccctgatgaccgggcccacctccaccagtgagcaggcaagagaccgagccgccctcctctcaccgcccccactccctgccgtgctacacccagatcctgtgcaggctgccgggccccttctgcttcccttggagcctggagatacttttgtaacaagccagatgattattttggtattgcttgacaaggcaaattgattgtcttgacccaggcgtatgacccctgtcgttgaacaagctgtgtctaagatctctacttttcatgagaatctgagactctttggagccaggctttctcggttctcagaggaaaagtatgaatgagtgtgaagtgtatgtgagaacttttgtttgcaatatttatttttgtgggtgtcgacttcctatgtgggctttttgggtgacactcccttaagggttcagtttgacaattctgagagttgtcctgcagttggaggccaccagaggtatctgagctccctgcttcctatttcataatcctccagccccagcaggtccactcctggttcctgtgtgtttggcccgggcacaatccccactgctttgctagacgtgctttctgccatgtggctttgggcctagagcttgttgataattgcagcttgtggcagtggaaatatggctgaatgagcgtctaaatcgttgagaccagtgcaactttgggtgcaaggctttgtttagggatcaagccttttgccaccttgggctggtctttggcctggtgctcactgggaccccatatgtctgcgtaggagcagaactttccatggcagtaagtgtccagctctgtttctggttctttccccaactccagccccgtccagttgttctcctgattgacccgactccactccaggaaggccatctgaccctgtgacaggcatagctcataaactacccctccctgggatcccgctcctcttcagcctccttccccatgaagctgggctaactttctaagtcattttgcttagaaattcagtgtggcccataccctttgtcctcccagcctggcatccaggcagggacaccctcacaccaccagccccagggagcttccctgctataaacacagacccccttgtctttgcctctgatttttacacagtgtagagtggccagcagtgaacaggttgaggatgtgcgggtagatagataactttgggtctggtttgtgtctgtgttcatgtttgtttaagggatatgtgtgactgtgggtggggacgtgtgcttgtggggcacaggtggcggcccctgctggagcccggctgggcgcagcgcctatgtaggacgggtgttctcagtgacctacctcccaggctcctctgcacctgcaaaggaacaggagtgagtcgtgactgacaggggtggttgagactagactaggtagagtagttaccaggagatgtgaatgtgcgtcaggtgatggatgggtttgtcaagggaatcgttaccgttttataccaaaggtattaacatgggcagcctttgacacatgtattccaaaaacgagtttatattttcaaacggtttttacagcttagactttgtacttactgccctgcctgtgacagttgtatgccttcattttgtatccaacagcaaagtctacaataaaactttaaaacaatcatgactgaatgtcaaaatcgtgtattgggcagatgctttttaaactgtcgtgtgagaaacttttatattaggccatttggattttattaagtgctaaggaaagagggcttacaaaatgt

SEQ ID NO: 6062 - DNA, 6000 bp, Homo sapiens
tcgtgtggccgtcactgctgtagataaatcttatctgctgggaaaggcacctctgggcctaaacaacagatgtcactctaagaaatcccagcagaacccccaccctgtctctggctgagaactcatctacttttctctccctctgtccattttctcacactctaccagagccaggacagggcttttgccctaggaagggaagtggtcaactgtagccgttgataactgccttggaggaaccaaaaccagcagaggcagccctctctcttcccgctggggaaagccagagctggccactgccctggcccggccccagctgtcctggagcccagggatggcccagtcccccagggctgtactcagatcttcctcaaaatgctccatgtggccaggcgcggtggctcatgcctagaatcccagcactttgagagaccaaggcgggaggatcccttgagcctaggagcttgagactagcctaggcaacatagtgagaccctgtctccacaaaaaaataaaaattagccaggtgtggtgatgcatgcctgtggtcccaggtacccaggaggctaagatgggaggatagtttgagtccaggtggtcaaggccgaagtgggtagtgattgcaccactgcactccagcctgggtgacagagcaagaccccatccctaaataagtaagtacacgctccatgaacatcaaaaggcaggacacccagaaaattcaagcaagctgggctcactgcttggtaagaaatgcggaggaccgggggtggggcaaggactgccttgtgtaagagaactgctttggtattgcccaaaccggaacaagtccttcatctaacgcagttcctaatctttttgtaatctggggcctttgacatctggggaagcttctggacctcttccaagagtaatgtttttcaatgcataaaacagaacgaatgcatcgtattacaaatgatgccagctatcttgcattgaagttttgaatttttttttacttgtaataaatagatggagttcttatagtacacattaaactataagaacagctggctcagtaactactataattttgaagtaatgatacatataagttatattttgagatatctccaataactatactgtggtttaaaaacatctgtgattttgactgatgacaaagttagtgggtttttttttccgttttttttttcttttgagatggagtttcactcttgttgcccaggctggagtgcagtggcgtgatctcagttcactgcaacctccacctcccgggttcaagcgattcttctgcctcagcttcccaagtagctgggattacaggcatgcgctaccacacccggctaattttgtattttttagtagagacagggtttcaccatgttggccaggctggtcttaaactcctgacctcaggtgatccaccggcctcagcctcccaaagtgctgggattacaggcatgagccaccgcgcctggccagttagtgacgtttgtaatgcaactgtaatttgttacctacattcataattgaaggaaatattaaatttcagttaaaggccagtggctcatgtctattatcccaatttaaaaaaaaaaatttggggaggctgaggccggaggattgcttgaagccaggagtttgagaccagcctgggaaacaaagcaagaccccatctctacaaaaaataaaaataaataaataataaattagctgggtacagtagcatgtgcctgtagtcccagctacttgggaggctgagacaggggtatcacttgagcctgggagtttgaggctgcagtgagctgtgctcgagccactgcattccagcctgagcaacaaagtgagaccctgtctctaaacaaacaaacaaagtaataatacgtttcagttagaggttaatgaaaataaagaatttttttcccacccaagttaatagacctcctggattctttctgtggacctcagcttactcttccctaagttgttttgtttttgtttttgtttttgttttttaagagacagggtcttgctctgtcacccaggctggagtgctgtggtgcaatcgtagctcactgcagcctcgaactcctgggctcaagggattctcccacctcagcctcctgagtagctgggactacaggggcacaccaccatgcccagctaattttttaaaacattttttatagaaatggggtactgttctgtcaccaaggctcatcttgaactcctgggctcaagcagtcctcccgcctcagcctcccaaagtgctcagactacaggtgtgagccaccatgcccggccttctcctttaagtattgttggcctcactttcccaactaaaatgggagctcactaagaacaaaggctgttccttcatcttatacttagtaccttgaaagggcctaccacacagtaggtggtcacgtgttagtctgttaggtcttttggattttctaggtagacaatcacatcgattgcaaataatagtctttctcttttcagtctttgtatttcttttttcttgttttattgcattgactgagctcatcagtgaaatgttgaatagtagcaatgatggagggcaccccaatcttattatgctcaatactcattaatttatgcaataggaatgtaaagtacctactgcaggtcaaatcctgtgcctggggataacagtgtaacacatttgagatcttttcctgtccactgaaatgcctgagcagtagcagtatttcagtaaacacgacaatgctgagaatatcaccaaattctccagacttgctgaagtgttcctttgggatcctggttcccaaaaagtatggacataggtccctgctggtggccccaggttccaggccatcagtaaggttgggggctgcagactggaccactgcaccgtggagcagaggcaagtacccagggagaagactgagcgatgcctctgtaggggaagggatgggggaaggtagccaggggatcaagccaggccagggtttgagccttgccttgccttagcagggtctgttgaggtcaccacctgtctgcactaagggtctaactacaggcaagaccagatgttaagacagagggctgcaacttccaggtgtgcaactaggggacggggtacttgttcccttttcccttcctcaaccagaggggagtgaacacagaggaggggctgttgggagcagtccccacatcctctccactctgtctagctggccctgggggaggaggagaatttttaataaaatataaggaagttgaagttgaaaatggaccagactatgccttagaaactggcatggggctgttgtaataatacatgactgagaagtcaggagatctgaccaaaatgtttttaagaaagccttctggccagacgcggtggctcacgcctgtaatcccagcactttgggaggccgaggaggacggagcacgaggtcaggagatcgagaccatcctggttaacacggtgaaaccccgtctctactaaaaatacaaaacatttaaccgagcgtggtggcgggcgcctgtagtcccagctactcaggaggctggggcaggagaatggcatgaacctgggaggcggagcttgcagtgagccgaggtcgcgccactgcactccagcctgggtgacagagcgcgactccacctcaaaaagaaaaaagaaagcctgctgcagtccaggcatggtgtttcacgcctgtaatcccagcactttgggaggccgaggcaggcggatcacttgaggtcagaagttcgagaccagcctgaccagcatggagaaaccctgtctctactaaaaaaacaaaaattagccaggcgtggtggcaggcacctgtaatcccagctactcaggaagctgaggcaggagaattgcttgaactcaggaggcagaggttgcactgagccaagatcatgccattgcaccccagcctgggccacagagtgagactgttgccgggtggagtggctcacacctgtaatcccagcaccttcggaggccaaggcaggcagatcacttgaggtcaggagttcgagaccagtctgacccacatggtaaaaccccgtctctactaaaaatacaaaaattagtcaggcatggtgatgctggcctgtaatcatagctactcgggaggcttgaggcaggagaattgcttgaacccaggaggcggaggttgcagtaagccaagatcgcaccactgcactccaggctggacgacagtgagactccgttccaaaaaaaagaaaaaagaaaagaaagccagctgcccagcagaattggggaaagccgagtcagttgaagcagacaatacccctatgggaggcagaagaatgcacccccctaccaagatatccacatcctaacccctccaaacctgtatgttgccttaagtggcaaaggggactttgcacatgtggctatgtgaaggatcctgagctggagagattagcctggattatccaggtggatcccatataatcacagggctccttagaagggagaagacgctgtgaccatggaggcagaggtcggattgagacagccaaggatcacaggcacctctccagccgggaaaagcaaggaacacactaccctggcgcctccagaaggcacagccccacccacaccttgattctggccctgtaggacccatctgagacttctggcctccagggctgtaagataacacatttgtgttaagccactaggtttgtggtgatctgttaacagcggcatgaggaaactaacacaaccccaaggaggtgagcctctccccacagccccgactcaaccggaagggagaggtgtgcagaagacggctttgcaggatgtttgggacaaatggtctctgggggaagacagaagctaacagaactgattcgactgtgtgaacagggtgctgggagggcccacaggggagggacttcagagctgggcctgcgcctgcggggccgtacgagttggcccggagcaaggcggcccaggacaggcaggggctgcacgcggtaaggctccctcttgccagtaccatcccatgagcagcctcagagccctcgaccaagggaagttctgagggctgagaggttgctcattcgtcagagcgtgctgcccaccctccacccctgcatggcagaaactgtgcaggggacgaggccaaggaatcaggagacccagaggcaggggtggcccggagacggtgggatggagcagaagctccccgaaaggggttggcggggtggattcgccccgctccagccggcggaggaaggaagtggttcccccgcccacccttcccttaggctggcccggggcaggatttttgtgatccgcgattcgctcccacgggcgggacctttgtaactgcgggaggcccaggacaggcccaccctgcggggcgggaggcagccggggtgagggaggtagggacgaacgggtggactgaccacaggcagggacaaggggactaagacccgggccgaggcctagaagcccgccgaccgttgggggtctgcgggctgtgggggcggggacgggggcgggggcggcccgggcgggggcggggcctggtacggtacggggcgggacgggctgggccggacctgctctgaggctcccagtcgcagcggtgaccgcgggcgggtggggcgccgggtaagtgctcgggccgggcggggggcgtaccccgtttggcgtgcagccctttctacaagacccccagtgcccgatccttccgagaagaggggacccccccccgcatctccgctgtccaggcctcgccgtggagccccagcaggaccccagccctcggttgccctcggctctggcgtgtcccggcgcgggcgggcagtgcttcccctcggcagggactggagtccaggggaggggaacgcgggagacgctggccctagtgaccccccgatcccggagagttggtggtgcgcgccgccctgggccaggtgccttcagttcttcacactccgcgc

SEQ ID NO: 6063 - DNA, 6000 bp, Homo sapiens
taactcagggcaccggcagcaaatctgggaaggggtcagagattaatggcccaagtattgatggctaccaacaaattctgaatttacatccaaaggtagaactgatgctttgtagtttctcaaggggctgtacttggtatttaaagagagtggcaaaccacagaaactaaaagtgctgatcctgggataccacagatgtccaactccagcaagtccaatctctccttccatctcagcaggggattcatttgccaaggcgaaagggtaccaaagactctaaggatgacgtgggatcatgtaggaaacgcccagggcatcagtagacctcgggggccttgggggcaggggctgtggcttaggctgcttcctattgttaccatgtagaaatcactcagggattgctctctgatttcatcgcgagtggttattcatttatgagaccacggaccttgtaaacagctcctcatgtggaaacaggtgtgagcggtggtagaggcaacagtgtcctagctactcaaaaatgccctgtgaacagcatggcttaaggctcaagaaaaacttaatctttgagtctctagattcttccaaagttggtctctttggagagttgtcattaccggggcaggagaatgccacacagacatctcagagcgtcctcattcttcctctttctactgtcctcatagctgctcctgactttctcttgtctgccattatagagacatgccataggaaatgttaaatcaatacatgttactaaaatacaaaatactatcaagattatctgaacagatccaaagtcaagtcttgaagtgaaatatgacttaaataaatgaggtcttaaatgggagctataaaatgcaacaagaaaaaagacagttaagacaaatgtttaaaaatcccaaatgaaggattctgaatgtttaagaagtaaaacaggttttttttggttttgttttgttttgtttttgtttttttgatgcctagaggttggttcaattaggccaggcaagccaagtacctgggtgcgttgtcagaattatctccattttggtcctgttcaggctgggattgacccagaagaccttcaagcatttgcccagggttcttagaagtgatgagcagctgtgatggttttcaggatggatccaagaggccagcaatggctcaagcttcctgggagctctgcccaacactcaggagttaacatggtgtaggttacctccctctggacctccctccctgccccactgaagcctgagaaacacagaactccttgtccatgagcaagggagctcaagcactgggccaggagcggggcagaaaggtgccagtggatagctagacctgaccatcctgggcaactatcacacaccagagcaaaaggggtttaggtgctttgccaagaaatttcttctgtgcatgcctgtatgagagagagagagagaaagagagagagagagagagagagtgtgtgtgtgcgcgtgtgtgtgtctgcctatgtttgtctctgtgttcaatctcagtctgctagccaaatcctagggaccccacaccctgcaatcacaaggactgacctggcaggtggaatcttcatgaagcagaagctgagatctagagatccagatttagagtgttctgtaaagcctagagaagtgtccctttctttctcctccctcacctcaccctatatctccaccatcccctaaaagggcatcctaccaactagctatgaaaaaaaaaagaatttgctgagaaatctgttacccaagaaatattttcaggctgcaagcaaatgtctagttgtgcacatttccatccttcaaaaattccataacacattttccttgtttgtaccttaaaaacagaaatacaagagcaaccatctgaaagtggagagtaaaagccaagtcctgactttctagaaagagttagcagctcagatggtcaagatcagtcggggctgagccctctgtgctggagcccaaaacgtaagggcaccttcccagatccaggctccaggaactcggggagagggctggccctgggatactcaccagaggccagtttcctcagctcctacccccaaatgagttcagcagtcagacccgtgagaacagcttcctggggtgttagtgtcctaaattgtgtgcagggctttcaagtttagaaaacaattcaacagtcattatttcatgccaacggtcagggctcgccgcacctatagaccaacagctaagcaaggccatctcctgcctgagcctgagctttcagaacaagccccattatggagtgggttgaggccacctctggaggccctcctcagtgttgacttgaagtcggtctcccctaaacctgagaggccactgcccttgctttgtttaaatatatgtgggcaaggataggctctggggtcagcaaggcctctgtccttcagctggccctgcctggggtaagctaaagtgcacaaagcctaagtcctcataggttaacaatggctaataaaaaacaaattaaaacaggcttggcacagtggcttacaccggtaatcccagtactttgggaggccaaggcaggaggatcgcttgaggccagcccacgagtttgagaccagcctgggcagtatagtgagaccctgtctctaaaaaaattaaaataaaaaatttaaattagccgggcatggtggcacgttcctatagtcctaactactagggaggctgatgtgggaggatcatttgagcccaggagttcaaggctgcagtgagctgtgattatgccactgcactccagcctgggcaacagagctgagaccctgtctctaaaaccaaaccaaacaaaaaaattataaacctccatccacaaaatcccaaagacctcatctgcttatctaataatattatgaatgtgagttatttaaagggcataggtaggagaatgcctgtgggtccttgattgacatgagacccagcaacacagaccccacactcatggggacgccccaggacctgccaggcctacgctttcacgtttctttcacttgtttccttttgccctcttctgccactgtgttgctcccgtgtcagccaagacctagaataccgggcatcttcatgggagactcattacagcttatctctatctgcctttctttaaagccagctgaacatacccaatgctctccctctatggtaagaccaaccctcccgaccatgctcccggcttccgtgtccccctctaacacccccactctccccaccccgaactccagagtccctgggagccctgcctggctctcactgcatgtggccactgtgtctgccgtgtgccttgcctgcctgttcccttctcgtgtgagctgtgaagatgctgtttgtgcagtggtggtgttttacccctgagctttccttggggtggtaattcactgtgatcttgactatctaacaagccactgggagagaatgggacccgaggtccatttcctgttaaacaccctgaggactccaccggccaaagcctctaaccttaatctgataggagaaatttgcagagggtacctatgagagccatggtagggctccagggtaaggagggaagacaggtgctctaggcaggagatggaagggtggacgatgattcctgttaatcagtgtctgtggctcctagcttccctgtgcttcaagtgaaaggccaccataaaaggtttcagctgggatttgttactgagcgcgtgattgaatttccagtcactccaaccttgctatcccttgcatttttctaaattcctgaagtccgttaaaattaggctgcagccactgttccgcagcaagctggaagcagaaaaacaagctccgttgattggaccactcctgttgtaggagtctctgattcgcgttggttgaagtgataaaagagacgccattcagtgtgaccttgaagcctccttggcccagccgcctccaaaaggctgccgttatgcatttctaaccgggccaagtatgagtttttagaaggaccagtggggttgattgaccaagccaccaagtctgcaggccgaggcaagcttgggtgggttgatgtgttccccagtgcagcctggcgctgcctggccacaaggctgccacaggaaaggctgagcccgggtgctctaccccgcttcctggggactctgcttctgggatcagccatctggatctgcctcctttttgcattgttatttggtttattagagcaaattggtgcatccgaatggcagtgagtttattctccttctcgagcagcattaggaaactgcagccacaggggagggctctgaacagtggaatggaattcacgctgcaagcttggtgtttggcgttttttgggtttttttgtttgtttattttgtttttttaactgagcagatccagatgcccctgtggcaccaacttctcaaactcttgacacttgcagctaaagttctccacttaagcttgttcttttttttctcctttctcgaacacggtggaactgacagctgagttataaaatcctaagcctcctctgcatactcctctggggaaacacaacctccttttaaggagtgaaaatagaagttcaagcagatacacaggtgatagaaatacagagattaaggtcatcaaaggcttcagaacacacaggcagggaagagcccagggcaggacagggctgctgcctgcagctcttgacccagcccctcaggtacccgtgcagcaggtcccgagtcccacctgtctgtcccctgccttgaggggaacgggagccttaggaggaactgaggcagctctaattttgaaatataagaaatatttttgctcttctcctgtttggaagatctggaaagcaggagaggtctctggcttgcttctgggcagagtggtggctgccttcgggtctccctgcttccctcataatctcctgtcctgcatagtgaggggagcggcctctgacgcctcatcagggtgggccagagcaggcagcgcagttagaagggctttagcgctggatattgccagtgagagtctgacctagaaataattaaagataaaaggcaaggtaaagcaaggagtggggagggcccaggtggccctagtaacaacctgagccctcccacctcgcgggaggtgtggacgggaccagtaacaggaagccccgagggtccattctctcccggtgcccgcaggtctgggtgagctgcactagctccggatttggcagtggcttcctcctgggttcctgctcaccaggccgatgtgggcaggaggagggccaagtggggagtcagctcatgttctcaggtttggaggcagaggaccgcagggcagcccgtcctgccccctgagccctggccaggcatgtgcccaagcccccaggctcccccaggtccaacagcagcagcccaagcacctccagtcaccttggcctgcactccacccttcctccccttcaccttccctctccccttccccagggcccctgagggagaccatctgcagaagcctcacttgcaagggaggcctcccctcccttacgctgcccctctcccttccagggtcttgtacagcctgaagggttggagcctcctagaggccccagggcagaggggagtaggagggcaacagcttcggagcaagggctgcaaaccagaccctctccagcactgagtagcacccgtaatccctccctttgggacaggggctgtggaaagtagaaggaggtgatacaaggaaagtgctggagtcccaagcagctggggcatgaggtccttcagggggcagcccaccaggacccccaaatccacgcatacctacagctgggagagaggccagccaccaacccacatcctcggagagtgctgggctccacttaggacacaggactgtctgcccagacaaacgggagacaggctaggactgcttcctcagcagtgcagaggaggggttcccagggcagctggctctgggcctagaagattccaaagcc

SEQ ID NO: 6064 - DNA, 6000 bp, Homo sapiens
ggtcccaaggtcaagtcccatggcttcctcccacttctctcctggagtggctggggacctgggccaagaccagtcttctagggacagcatcgtaggataagacagacggacacgtgcaggaaggtcatggtgctcagggatggggagcagagagtgaaatctcccatgagcactccctttctcctgagccgccacagtgaaatcactgcacactgccattcattcatcctcaattcagagagtcctcttacatttggtctttacagcctcaagcaccgatgaagaaacagttttacaaagacactggtagctttgagacccagtttgagtgtcaagcttggtctggaaccagaagcctatagcagtgggtcccagactttagagcccattgcagtcaccagggagcttagtgcaagctccagacctcactcttgtgtctgatgcatgcgtgtgggaggaggctccctggtggcccaagcactagacttttataaacattagcatggatattaacagaacagccataaaagattggaaggaaagtggcaaataagagctcctcaaaacagggccaaccttttcaaatacttgctcaggccaagtattggggaagccccagtagggaattccttccctgggactgtggcctagtgtccagcctcaagagcagatcctagatggggcaggtgcagaggaggcccttgcctctcctccctcccctgcaagcaacggtgagagagaaggccctgcctgcagcagacaacttccaggtgacagaggtgggtcaggctggccaggggatcccgccaagcccagcaggcaggaatagccaagggcattccttcagcagggacccaggcatgaggtggagagggttaggcaggaaaccaggctgcgggcagaacagaaggatccttggccagaactcggtttgtttcagacttctgtcctctctggaggtgactgatcgccttgtgaccctccctcctttctcccttgtgctccggccagcacgagtacagtggcagatgcctaccgctggcgcaaccacaccgtgggcaacaggaccgtggtggaggaaggctactattatctcaataattttgacaacatcctcaacagctttggtgagtgggaaaaatcacagggggcacattccctggggaccccacccttgtcacccttgtcaccacgggtcccagaggtggtgtagcaagtgtctgggccacactttctggaagcctccctggcccaggtggaggacttggtctgcccagctttggcagtacagtccaggctggatcctggagctcactcagttgcctgattccactctttcctgatattttctcagtaccggggaggacaagagttgcaagccttagctgggcggggtcccctcatcacagtgccacttgcagaatgggacccagccacaccactgctgctgcagctgcactgccccctggctcagactgcacacagccctctgcccactcccatgaagaggcgaacacagccaaaccgcctctccagaaaaagggtgtgcccccatgacaccccagatctgcacccagtaagatccagatagtctgatgtggcacaggctgctgaggcagagggtgtgttctcttgggggcaggccatgatgtcctgtggagccagcgccctaggagtgccttgcctggtctttcctggagctcacaacccaagcggtcatatggtgaccctctcatcttagcacatggcacccaggataggtggcaagaggccacttgaaattgactttgaagtggggtctcatcaggatgcttctttctctcttccctcggcagtgaccctgtttgagctcacagttgtcaacaactggtacatcatcatggtaagagctcgggcagctctgggggtatcttcccgccagccctggggtcggccctgggtctcccccaacccagagtatataattcttcccgtagcttgcagggctgggggtcttgagtcatgctgtgttggtgttcagtggggaggccacaggatggctgggccccaggagccacccctcccagtgttggctggactcggctgttactcccatctccctgcatgtccccagcagccaggagatgccacttagactctgggtctctgtcctgtctcgcccactgtagagatgacttttccctctagtgacaaagtggcgagcattgctgatctctttattccattccttaaactttcccgactcccagccctactgggataaaggctgccctggttctggatccagtcgtccaggggagtggccagggctccttcagcagtcaggaattagtgttaggcccagaggggcaagcttcctctcctccatctctcacaaccagccacaaatcacggtggggtctgcgaagagccggggccatggagcagcctgtgtagacggggacctgccctgcatgggcaccccctcactggctgcttcccttggtctccaggaaggcgtcacctctcagacctcccactggagccgcctctacttcatgaccttttacattgtgaccatggtaggtcccggaccacagaacgctctttgtccttcgtcttccacatcaccagctgcccctgctcttcagcctgcagcgtcagggagtggggctgggtcccatctggccggactctgttgggcgtgggctgcgcagccacggacacctacccaccctcctcccctgcctctgcccctccctccctatccctggccaggtggtgatgacgatcattgtcgcctttatcctcgaggccttcgtcttccgaatgaactacagccgcaagaaccaggactcggaaggtctgtgcagggatgatgccttgggcatttgatatctgccgcctacccagctctgtctgtctgtctgggtggctgtccagccagccatcaggctgtcatttttctgctgtctggctgtccagcttatctatctggcttgtctttctagatcttgtatttgcattgattttcaaatatttaatgtcagaaaacgtaatctaactttaaaataagacagagcatgtcatagttggagaaaaatcaagaagtagagaaaggcttatgtggcagcagcagcccctgccctgcctttccctcccgtcctccagaggcttctccttcttggctatttcttctgttagtcatctccacgtttctcaataataggttcacactacggttcttgatttaaatggtgtaaatattgcttatggcacaggcgaatcgtattcctgctgcaactggatggtgctggctttagtgactgcctcactcttcccagattgcacagctttctgtgtgctgaccctcccttcttcccaaattctccatcaaaactgtctgcacttgatctcttgagcccaggaggtcaagactgcagtgagccatgatcacaccactgcactccagcctgggcagcggagtgagaccctgtctcttaaaagaaacagaaaaccctgtgcccacacttgttacctctcatcctcagatctctgtgctatcagaccatctgaccattttctctgtgcttagaggccccttcctgaaaccctctggccctgtaacagctgccagctagacctgcgctcctgacatcacagcagagggaggggaagggaaaggagggccaacgaggagagcaggacaccaatgcagtgtcggtttagagagagaaccttaagaccccctgcggaagggggcaaggaggtacgagacccagccaggttggcagctgcagccccgggcccttcccacacctgccttccatccctgcagttgatggtggcatcacccttgagaaggaaatctccaaagaagagctggttgccgtcctggagctctaccgggaggcacggggggcctcctcggatgtcaccaggctgctggagaccctctcccagatggagagataccaggtgaggagcccaggccctggtccgaaggagggaggcaggtttcagtgtgggtggcataatcccttccctcagatattggtaacattttgagtgacacagttgcaaaagccagagaagtgggagacgccaactgtggcaccaggggtgggacctgaatatctgcagccgagccctgcagcctctgctcttccttagcaacattccatggtgtttctgggacggcgatcaaggaccaagagcgacctgagcctgaagatgtaccaggaggagatccaggtaggagcctggccgaccacgctgcgaatcctcccccaagctatgtcctgggaggggcagggagctgctctctggccctctgagtagagggagaaggctggtagagagatgcagaccgtccatcgggaccactgctggggttgtgtgggacctgagcggggctcacttagccttgaacccttgactcgtgcccagcagaggcagctctccagcctgcctgccgccatatgtccctgccccttatgaattctccagaacctcctctccatctcttactctgagtcagctgcaaactcaaacatgtgtactaagaaacacagtgagcaaagaggaaagagcggcgaccgtggtgaactggcaaggatgtccctgtccaaaggagacagtctcctcccagctccaggatgtgcctgtccaaaggggacacagcctcctcccagccccagcgagtgctgcccaataggaagaaggccctactgcggtcgggctgcttggtgttttgttttgagatggagtctcgctctgtctcccaggctggagtgcagcagcacgatctaggctcactgcaacctccgcctcctgggttcaagcgattctcctgcctcagcctcccgagtagctgggattacaggcacacgccaccacacctggctaatttttgtatatttagtggagacggggtttcaccatgttggccaggctgggagtgcttgggatttttcataattgggtgttttttgttttgttttgttttagagatggtatcgctctgtcacctgggctggagtccagtggcgtgatcatagctcactgtagcctccaacccctgggctcaagtgatcctccccactcagcctacccaagcagctggaactacaggtgtgcactgtgacaccctaattaccttatttttgtagcagtgaggtcttgctggggtctcaaactcctggtctcaagcaattcttccaccttggcttctaatttaagaaaaggcaggccaggcatggtggctcatgcctgtaatcccagcactttgggaggccaaggcaggcggatcacttgatgccaggagctcgagaccagcctggccaacatggtgaaaccctgtctctactaaaattacaaaatttagccaggcctggttccgtgcacctgtaatcccagctactgaagaggctgagtcaggagaattacttgactccaggaggcagaggttgcagtgagccaagatcatgccactgcactccagcttgggtgacagagctagactctgtctcaaaaaaaaaaaaaaaaggcagaatcagatgtttttctttttttgcatgacctcccaatctttacatattggcagctaaggaaaatatctcacaaagcaccgtgtgggctggcatttggcacggtgccttccagaccatgggccaccagcccatgagccctgcagagtcttctcaaccacctcagggttgccagggctccggggagcctctcccacaccagctatggtggctttgctctgttttctggcattctaatagcttgaagcccttctgtttcactaaaacagtgacaaccagggtccatgcctgaaaagcggggggtgctgtccccaaagcagcttacacattctccgggaacacaagagactcaggcagtgttctttgggctgatgtgtagtggctcactgaacttggtgtcacagaaacatggaaataatagaagcgtttgaccttgggcagtcactccatgcctccctgtctgtgcaagggg

SEQ ID NO: 6065 - DNA, 6000 bp, Homo sapiens
tttatttatagtcattctttatggcttaagatgaaggtgggttcctccagagaggattggtatttgcttctgccaggtttctgagagcattatcagtcaaaaattcataattacgcctaggtacagtggctcatgcctataatcccagcactttgggaggcggaggtgggcggattacccgaggtcaggagttcgagaccagcctagccaacatggtgaaacccctgtctctactaaaaataaaaaaattagctgggcgtggtggcacgtgcctgtagtcccagctactcgggagggtgaggcaggagaattgcttgaacctgggaggcggaggttgcagtgagctgagatcatgccactgcactccagccagggcgacagagaatccctgtctaaaaaaaaaaaaaaaaaaaaatcttaattattagcctgaagtttttggggaccacccagctagtatgaattcaagctacgtttttgtgtgagaattggattgcagttccaaattctcagatacgattttgcttttcccctgtccaccaggtgccaaggtttaagacggctaattttctttgtagattctgggggatgggtgcctatgctagtaagcagcaagtttatttctagtatatccttacatcaaattaataatccttggaattgcagttgtttgtgtgtgtgtgtgtgtgtgtgtgtgtgtgtgtgtgtgtataatgcaggtaatgggttttgtgtctttcttacaaggtcacgaaaaccaatgctcctagtaactgggtttagcacatgcccttgagataaaagttggctgactctgctaaactctaggttcctgccttcatttagttttttaacttaataatttcttaccctattgtcagttaatcaatatatttaataagatttaaaaaatgttttttccagggattttgttttcagtgtgacaagtgtgaactagtccttgatatttctagaaacagaatcctatattctctttatactttactatccaaattttcctcaagggatatttaagacaaataatactaaacagaaatatttaaaatcagtatgtaaatatcttacatgcaaacattttgcatgcaaatttacagattttataaagactgcttcttaacataaattttaggtggatatttaccaaatagctggttgactagtttgtagatgtctgttatttattttattaaatagacaaatattattgttccacagtacatttagcctttgactcatgagtttgttggctcaaattcactttagatgatttgcaagattatgctacgcaacaaacaatctcaaaaatatttgtgattcacaacaacaaatatttttgttttactcttgtttcacatcagtagccgtatgtcaggagctgcaagtcagttgcttcagttctgtacagggtgagagtttcaggtctgctccatctattttcttattctgagatcttatctggaacatacctttctcatggcaggtggcacaagagtaagagattgacctgaattttgcaatcaaatttaaagcctctgctttgatttagcatttaacatctgctcacaaagcactggctaaagcaaatcacatgaccaacaagaatacaagtcttcaaagctgtgttgaataccttatttatggctgaggttgctcttaatctaaattctcttccagaaaatgaggattttagtctagaatcctgattagtaattgtcagcaacataattgtctaatgggataagccaaatggaaaaaagcaaacaacctcaagcaacatctctgtcattctaggtcagggttgaaatatactgtgggaaaggctgtcaagcctgtcagtgcttaaactaatttggaaagaacttcccattcttagaaatgtataattaataaagcagtaggcaaaagagatgaattctcattggagttaaaatcggatcgttataataaaaaagctttatttcaaaatgtcattcttaaaatcattgtaagagtagcaaacttgcagggcatctctgggagttactgaatatttttcagttacagtgcaggatcacatattagtttctgtttatgttgtcattacattgaaaatgctagattgaattatcattcctggaatcacaatatcagatttgaaaggatctgaaaaaatgatttttcaactgtagtggattaatatatttttgtgttgcaatcagttgttaagtatgtcaaaatcattagttattcatgacaagtaactattatactagtgataatcaaagtagagaagattgtgaaagatatacttacatttgttttgcaatatcttcactttcaattacttgcattaggactttcttttttttgagtggagctgaaagaagttaaacgtaggctgtcagtaatttgcataatcctgagtataccgtgtctgtttgtttccaatgtgattgccatccaccgggaaaaaaaaaaggtggtttagtatcatttctcaaacagcatgtggtcctacttgattggaacttgaaatgcagggagtaatttatctagtcatacatctcattagctaagtctgtaacctaggcttccttgcttccagtacattgctttttccaacaaatgatcaaattttcaaaagccaatgtatgaaattggggctgaggcagaagagaattaggcaaggcaatttgccacctttttctaatctttagtctcagtttccaaagtaaaataaaagtaccagaaaaacggggtccagatggtgtattttgcatattatctatgctctaggaacattcttttccaaatctatttgattgcaactcacagtaagaaattgtttaaatcacaacataggacatactctcaccttccaccatatttgaaacaaaaagtttcaggaagcaatttttgcccttactagacattatgcactctggtattttatattgtattacatcctagcctatttcatataaaaatgaaattgatttttgagttgcaggttgaaaaacatgcctctagaaaacaggagacaagttaatctgttaacaaactccaaagttactagctttgctgaaataatgtcacagaataataaacttccttcacatttatttgtactacagtctctcaggcttcagaacagaacctggtagaatcttttcctctttggaacaccagttcatgacaatatctcagagattctaagactcgttgtttcccagttcatgacaatatctcagagattctaagactcgttgtttcccagttcatgacaatatctcagagattctaagactcgttgtttctgacatgtttacatctctgaattcaagatgtgtctcaggccgggcgcggtggctcatgcctgtaatcccagcattttgggaggtcgaggcgggtgaatcatttgaggtcacgagttcaacaccagccttgccaaaatggtgaaacctcctctctactaaaaatacaaaaattagctgggcatggtggcgcatgcctgtaatctcagctccttgggaggctaagggaggagaatcgcttgaaccgggaggcggaaattgcagtgggccgagattgcgcctctgcactccagtctgggagacagagtgagaccctgtctcaaaaaaaaaaggaaaaagatgtggcttaaaggtgccttacatatcagcggtatggcatagtttcattggcagcctttgttttctttcttgggtaacataaaacaatgtaagtctatgatttttttagagctgctatgaaatatattaataataattatataggccaaactctattgcttattcatttcaatgtatccagcttatcagaatgccttctgatttcttgttaagaaaatgtaatgagatgagaatagcttaagaaaaaaatccttagttctgggctacaagggaaaatgagttatgaccccaatttaattattacagaaagctttctcatttgccttcattgtgatcagggtttgagtatgatctttattctacctcccttacttctgtatagttaggatttcattaggcggctagagggttcttcggatcatggctaaaaaagaaagcaaaaggttaagtcctagagttaaggaattaggaaaaaaaaattaaggcattagaaaaaaaatcaagaattaggctttattttaaaaaatggaacaaactgtcaaattcctgcgtacccgtttaaactgtcaccaacctaacacactgtaaaacttaatgactgtaaaactggcagcaggatcctgaacataacaaggaacaaaaataagtttgctaggctgttttcatcccagcatgattgaaatacaccgtttcctcaaaaaaaaaaaaacctctaatgaggaaagcagtaaattaaatgccacggttaatgtgccactagaaataggaacaagtagtttagttaccgaatgcttcttaggccatacactctacaccacgatgcgttcttttttctgtttcgctaaagctttcaccaagcctaaggctggagaggggtcctaactgagccctgaccagaccagggagccctactgtgcaatctcctcaggttaggaagggcccagtatgaccggcccagaaggcctggccgatcaacaggcgctgggccgacggtggtgggctcgcttcctgaggctgcccttgggcatgcggaaggggactggctggcgataacaccctggcgaagcaaggtggacagtgactcccgcccggttcgagcccgcctagcaggggaagcaactccaccaccgcctccgcgcaccgtcacgtgacgggaagagggcgtggccgaagcccgtgatccggggggcgggcggggcagggggagggcactagaatgtgaaggatcttcgcggttctgggtgcccagaaaggcggcgacgcggcggatgacaacattaggccgcgacgcgctcctggccaggcggcggctgtagtgttagctttggacgccgcagtagccgctgccggtagcaagccgactgagggaaggtgggggtccgcccgggctggtggacctcggggccgaaagttcccgccccgctcgggggctgagccggcagtgcctccgcggccgctgggcagcgcccttcgtccaggctcgcgccccagctgccgccgacgacagcggccgagagaagttggggtctgactagacgcttacggggcctcggaccccggcgccgcggcgacctcggaggaaccggctccttgcgtcccgcctccctgggagctccgcacgggtgagtgttgctccattcctgaggttggggtgctgggttcgcacccctcagggcgactgcgcacccttattgccacgttctgagctcgggctgtcggggactcctggccacccccgccgaggagttctttggctcctttgttcccttttggagtagggggattggaaaggctggcagggtggagtgtttaggggcccacagtaggtgcatctgcagccttacaaaagccgcggcaggggaacgggggtgggaggctgttggagcatttcgaccgccccgggtgtctgtccctcctgaagtttgataggttgatggcatgggcctcgttgggagcccccgcgcccaggagagctggcgctttgtcgctcggtgcggttaaggcgaggctccttctttcctgtgacagccccagagaaggctgtgccgcgcaccgcagaccgcacccgcctttgcagagccaagcgacacggtgttgttcctctaagcctcagttctcccggccttcttgtaacgtaggaggaaagccaagcctttgctgtgcttttaaatttaatgtttgtttctaagccctctctcaagagtggaatcaggttccaaggagcttcacaggcagcatgctttaggttcattgaaccacccactcaagactggctgaggcgaagcaacagtatatgcagattttccattcacaaaagtcatttaacactcttctttatgagacacat

SEQ ID NO: 6066 - DNA, 6000 bp, Homo sapiens
tattaagatgtacaacttgaatccaatcatgaagaaacatcagacaaaaccaaaatgagggatattctacaaagttactgtcctggggctgggctcggtggcttacgcctgtaatcccagcactctgggaggccgaggcgggaggatcacctcaggtcaggagttcgagaccagcctggccaacatggtgaaaacccatctctaccaaaaatataaaaagttaacagggtgtggtggcaggtgcctgtaatcccagctacccgggaggctgaggcaggagaatcgcttgaatccaggaggcggaggttgcagtgagccaagatcgtagcactgcactccagcctaggcgacagagtgagactccgtctcaaaaaacaaaaacaaaaacaaaggacattactgggacaaatggcaaaccttgaataaggtctgaggattaggtggtagccgtacatcagggtgaatttcctgcatggatggatgtactgtgattctgcaggagagcgtccttgtttggaggaaatacacattcaggtgtttagggtgattgggcattgtttcagcaacttatgctcagatggttcaggaaggaaaccttgtgactgtagttgtaacttttgtgtgagtttgagattgtgtcaaagaaaaaaaagaaaaaatgctttgtgtggctgacatcttgttcttaacaaattcaagttagttgccaacatttaaaaatcaagcaatttttacctacggatctagttttctggtttcccttgaagaactggaaaagctagcagctctgggggatgagtagtcaggtgaagagcctgatagttccatttatttgtttatttattttttaattttaagagatggattcggccgggtgcagtggctcatgcttgaaatcccagcactttgagaggctgaggcaggtggatcatgaggtcaggagatccagaccaccctggctaacacggtgaaatcctgtctctactaaaaatcaaacaaattagccgggtgtggtggcgggcgcctgtagtcccagctactcgggaggctgaggcaggagaatggcgtgaacccggaaggcggagcttgtagtgagctgagattgcaccactgcactccagcctgggtgacagagtgagactccttctcaaaaaaaagaaaaaaaaaagattttttctcattttgttacccaggctggagagcagtagcacaatcacctcactgcagcctccaactcctgggatcaaggggtcctcccacttcagccttccacatagctgggactacaagcacttgccatgatgcatgactaatagtgcccttttgatgggctatgtggcccccagttctccaaagtctccaccactcctcattgtgtgacactcagcccacagcacccatttatgctactagcctggcccctgtcacaagctatgggaaagcaaaaatccaccctaggccaggcactaatcatattttttggattgatgaaggggtagatgaatggatggatgaactttcaagatgctgcattatctcagagcaatgacctatctcagtgcatcaagcctatgttctatggcaaggtgcttcttgaatcagccatagtgtctgaatggtttgtttggaatggaaagtgttgagaaatcagggtgttgtctgatgccagaggtccccacatagggtgcaatctctgtgtggaattgatagaggcgtctgacaggtgggtggggttctggcactaggacagggtgcggggcggggcagtgaggcttcaaggagatggtatcataggatgctcgaggtagtgaggttgggtggggtgggaacaagcctagttgatggcttgggatcctatcagtaggagatctgacttgatggagcatgtcagggtctgggtatgagcaagagttgatgttagctttatcttccccagcccctctcacttcctgattctacctgggtcatggtttgaaacaacctcttctctcacctgccctctgaaagattaaaacattcaggctgggcacagtggttcacacctataatcctagcactttgggaagccaaggtgggaggatcgcttgagcccacgggtttaaaagcaggctgggaaacatagcaagacaccatctttaccaaaaaaaaaaaaaaaatagggtagcatgttggcatgttcctgtagtcccaggtacttgagagactgaggcgggagaatcccttgagcccagaaggttgaggctgcagggagctgtgatcacaccactctagccttggctacagagtgagatcctgtctctcaaaaaaaaaaaaagaaaaaaaaaagaaaacattctataagattcagcagaaatgcactagtgatttcttattgcctttaacatgaaatccaaactcttggccaggcgcggtggttcacacctgtaatcccagcactttgggaggctgaggcgggcggatcacaaggtcaggagtttgagaccagcctggccaacatggtgaaaccccatctctactaaaaatacaaaaaaattagccaggcgtggtggcaaatgcctgtaatcccagctacttgggaggctgaggcagagaattgcctgaacccgggaggcggaggttgcagtgagccgagattgcaccaccactgtactccagcctgggcgacagagtgagactccatctcaaaaaaaaaaaaaaaaaaaaaaaaatccaaactcttcaccactcccttcctgccccaatatactccagcctctgcccacctccctgacctcaactcctatcaccctactcactcttgccctcacttacccattcccatttcctcccctggccccccgattccttgcaccacactaagctctttgttaccttaaggcttttgctcatgtgcctcacaccccaagtctttttttttttttttttttagacggagtctcgctcgctctggctggagtgcaatggcacggtcttggctcactgcaacctccacctccctggttcaagcaattctccctgcctcagcctcctgagtagctgggattacaggctcctgccaccacacccagctaacttttgtatttgttagtagagatggggtttcaccatgttggccagactcacaccccaagtctttgacctggctctatcctacttctcctctaggtctcagctcaaatatcacctcttcagaggtactgctcccaaacccctacatccgatctcagccaacaggcttcagtcatcctccgtcactacactgttttattttcttcacatactcatcagtgtctgaagttgtcttaccaatttgtgtattgcattgtgttgtgttcccaaccagattgtcagctccacaagggcagggattttgctgtatcattcactttatcctcagtgcccagtgcagtgcatgacacatagtggtggagggtgggggaggggtgggaaggatggcaaatgtttattctggaatgaataagaggctctcaacaatggtgtgttagatttttgcataagctgggcattgggtttaggacataagcatctaggtgggttgtggctgagatgacttgtgattcaaggtgtgagaagctggaccctgggctgttggagagacattaggtttgggaaacaagtgtccaggttgtgggtgaattggtataaactgggctggctccagctgttaccagtagaaggtgtccaggtacttggcatcttggagaaaacacacaaacgaagcaaggaaagcaaaagcaaggatttactgagaacgaaaagtccaccccacagtttgggagcaggcttgagcgtagaggctcaagagctctgcttacagaattttctagggtctcaatactctagaggtttcccattggttacttggtgaatattctatgtaaatgaagagaatgaagtgaagtcacagagtcatttactcagaatgtgccctattgcaaatggagaggatgtgcaaatggagaggatgttacttggtgggagaggatgaatgtgaagttacaaagtataaatggagaggatgtttcttggagtgtgtggtctgtgtaaatggagaggatgaatgtgaagttacaaagtgtaaagggcgtgaatggagaggatgaagtgaagttgcaaagccgtttacattcctgtcattgctaaggtgctttttgatttaggtctaggaagtcagccttatgttccctgcctccaggccctatttttctgcctcacaacaggtaacatcagactgttgagggcagactggaccccagatttcgggaagcaggagttgtccagcagggcagtggctgagttagactgtgacttcagcagtgttcaacaggtataaggtcattgaagaccaagaatcaagcaatcgagcgtcctcgtcggttgtagcgaaagagaaccgtgaccaacaggagagcagtgtccacccaggtcacttggggttactggggtacaattttgggggaaacgggggtcctggggagcgttggctgggtggggctgtaacccgagctggtgggcgggttgtgagctgtgacctggcccgagtcggcccgcccggattggggggccaaaccgggggcggcgggaggcacacctggggaagactcacctgggagcggctcacttgggccctccgggacccatgaaccggcgcacctcctctgcgtcccgcccccggccggccccccggccaatgggggcgcggagacctcggcggcgggcgcggattgggagccggtgagcgggggcggggcggcgcgcccggcagtttaggcgctcggccggcgggcggcgctgagcgctcggctacgagggcgccgtgcgggcggaagtggcgacgctggcgtccccggagcctgcggcgggcggctgtgacggccccggcgctgacggcggcggccgggggggcggtgtcgacgcccgcggcgccggctggggcatcaccgcgggcctcgaccccgaaatggcgctgctggccgaacacttgctgaagccgctgcccgcggacaagcagatcgagaccgggcccttcctcgaggcggtgtcccacctgccgcccttcttcggtgagccggaatggaggggggaggcggcccgcagccccacgcgcacccgaatcctccttcccccgagcatcccctaaccatctctgccctagacacccctaagtactgtttccccaggcacccaagatcctctttccctccactcaccctaaattctccctttcccggaccactcccaagtcctctccgctctaaacatgtcacatcctgcctgtcctccccaaatcctccctctccctagacacctcacagtcctacatatcccccaaatgccccctgatcatccgtgcccccaacacggatgatcttccatctcccttaggcattctgtaatccaccatctcccccaaagcctcctgccccttcttccccaaagtccttcatccctggcgctttctgatggctctcaactcgctccccttacaatgaatccccccatttcataagccttctctttgaacgcttccagcctctccctcatgggacctacaaacccttccttcttccctcagaattcgcccattccagatcaaagactcccatctccccctccaagggtaggaagcctggtgaggcggggacaaggagagggttttgaagatggagttgcaaaattccagggcctctttctaggggaaaccacctaaagtttttcctccttttaggacaggggtgagggttgtcgggggagctgttttgtgaggtgacatcagacatacagagcttggcaccaattcctccctcagtttgggctctacgagaggaagcccctcccctgtatgtcgtgtggaagttcctgggcgcattgggaaggcggtccactttcagaccctcttcccgcactccctcagcctagcccagtccagccaaggccccagatggaaaatgggaactagaagccagcaccactgcccct

SEQ ID NO: 6067 - DNA, 6000 bp, Homo sapiens
catccaacactctcccctcaaagtaccttaaacttcagctatgataccatatttgatgttcttcacatgttttaaacttctcatgcctccaatgcctttcctgccatccagcctaaaacaccctttccttttgttattggttgtcattttcttcctctcattcaacatttagcctggcatcatctgctgctctctgtcttgaccaccttgtctggaagaggtatccttcccatgttcccatgcccttctgcacatgccttcatcacaggtgttaaggaactgactgtattgtcattgtctgtctcttgttgagcacccagctaacctgaaagcttcttgaaggctgagactgtgtgtttccgtctcttatccctagtgcctagcaatgtacttgcttatacgaggtacctaatatttttattaagtgaatgaaatctgggcttggatctgcaccattatttgggacagattctttaatctctcagaacattctattttcttatacacactggaaataacacccatgacaaaaggtagacttaagtgagctgatactgtaaataaagtccactgcgtgggcctgggacatggtatgcgctcaataaatactggtccttttccctctctccgcctgccatcagacctttccgggatacccttcctacgcacacttccttaactgaccactaggtggtgctagcctctggcttgacattcagttccagagctacccaattaacgccccagcccaggccctgctatactcagaaaaggcgggtattttgtaatttgctgagcgacccgaaaaaagagatgccctttacccacactagcttctttgccctcatcaccattccaggtatcaatcatgaatttcagagaattcctccatgattccctactattatggttataatctcaacccaaggatttgaagatgcctcttaagaacagatgtggggaggaagagaaggcactgaggcagagaggattaaacaatgaatgctataagagaaatagagggaagaagatgcttgaagtcacatcctgttccaggaaaggcaactctagtcctaacattcctttcaccaatcaagagcctctcacgctgggtggaaacgaagaagaaaaagacatggtccctgccctcaaggagtatatagtctagtggtggatacagagcccacaaaataaagtgctaaactctggatactgaagctttcctgaatacaagtttggaacaggagagataggcagagcgagaataacaggagggcttttctgaggagggtagaggagcaggggaactgtatcattaatggctcagatagaaatatgcattctcagcagggtgaggtggctcacacctgtaatcacagcactttgggaggccaaggtgcatggatcacctgaggtcaggagtttaagaccagcctggccaacatggagaaatcccatctctactaaaaacacaaaaatgagccaggcatggtggtgggtgcctgtaatctcaactattcgggaggctgaggcaggagaatcgcttgaacctgggaggtggaggttgcagtgagctgagatcacaccactgcactccagcctgggcaacaagagtgcaactccatctcaaaaaaaaaaaagaaagaaagaaagaaagaaagacataaatatgcattctctcaccttacagacataccctcagcagttcacctgctggaaataacccaagtgcccaacaatcccaacaaactgtggaacatccaagcaaggagattccaagtagccaagatcaaagggtgagctaaatgcgttcatacggtatggaaagggatcaagctaagttaattgaaaaaaaggcaagttacagaacactatatatcatatgagtttctttatagttttaaaggatattcacttatatttgtatgttactgttttatttatttatttatttgagacagggtctccctctgttgctcaggctggagtgcagtggcacgatctcggctcaccacaacctccacctcctgggttcaagcgattctcgtgcctcagcctccccagtagctgggattacaggtatgcgtcacgatacgtggctcatttttgtatttttagtagatatggggttccgccatgttggccagtgtggtctcgaactcctgaaaagtgatcctcccaccttcgtctcccaaagtgttgggattacaggcatgagccaccacgcctggcctgtatgttactgttttaaaaactctcctggccgggcacggtggctcacgcctgtaatcccagcactttgggaggctgaggaggccagatcacgtggtcagaagttcgagaccagcctagccaacatcgtgaaaccccatctctaccaaaaatacaaaaaaaattagctgggtatagtggcgtgtgcctgtaatcccagctacttgggaggtcaaggcagaagaatcgccgaacccgggaggcagaggttgtagtgagccgagattaggccactgcactccaacctgggcaacggggcaagactccgtcttgggcgggggggaaacctctgctggtaggggagacctgaagaactgttagtagaagttactctgagggtgcagctgaaaaatgggggtgtggagagcatcaagtttccttttactttttaccttcctgtactttttttaaccactaggtattatcttttctttctttcttttttttttaacaatataaagttaataaaaatacacattcacattcaggagacagcaggggatgggaggttgcaagtgagaagtgcatgctgactgaggccaggttttggaaagccatgactgaagaggagttcacatttgactggtctatagacacccactagaggttccccagcaaggaagagacaccgggaaagcagtttttggaagattcacctgacagatgggtagggggagggaggaaagccccttcaagccctcaggctacatgtggttgctccagataccgttttcctctcaaagctgtcaagctgtctaaagtctgtttcgacctgatttcacttggatcccaatactgggaggggccctgggaggaacctcgtaggcatttggtgagtccgcatagtgcgtctcacattgtgttgggccatgggagctggataaaaggagaaataagaccccgttcctgcctggagcaactctctggcagtggaaatggaggaaatctgagatatacttcagaggaaaaaaatgacaagcctggagcacaggctggcaagattggatataggaaggaaaggcccccttgagttggcataaagtctgaggtttctagcccaggagactaaaggcaggtggccaccgcgctgagcaaagccggctggaagaagctaaaggttgagctcactgtcattaggaggcaagtccttcgtgctgctcctgtttctgccaaggacagactggagtggggacttttccgtaactagaacgtaaaagggggaacagtccctcctctccagcgtcaatttttggcagccgacgtcgtctgccccgctccttgaactctgacatgcagacacctagaaagtcagacactaaggtaacagccataaaacgccgcccagaagggggcagtgaccaaaagcacgttcactggcccctgggaaccgcctggcgcctgccttctgcaaagtatcattcccgtgtgggctgagcctggggacaaaggtccggcgctcagcagacacctccttggaacccgaggcctggaaacgaaggtccagagtccctcatcttattccaaatcctggcgctcggaatctaaaaccctaacttgatggcaagccagtcagaaggtattaaaaaaaaaaaaaaaaaaaaaaacagaaaaataaatgagccccgacttcttgggcgaaagggggtggcctttcctcaaccccacccgctggtgactcacctccctccaaaccagggcctgcccctcccgcgcctagggctgggcgagcagggcgggcgggtactaaggtgggctccatccccgagccccacgcgggcggacaagctccggcgtgtcccctcgggtgtccctgtttactccgagcccgggagcgaggtgggggcgggtcctcgcggtccctccccaaccccgccccctccttcgcaggccccaatcccagtccggtcttccaaagtctccaaatcaaagctcagcctttccctgcaccttccccgcggactggcggtccctgtccccaccccgggcagaggaggcaccttcagggttcccctagaaaatcgagcctcggcccagaccactgagtcccggacgcccccggagggagcctgaaatcctagagtatgacactgagtttcaaaggggagccgctcagctctccgcccactgcccaatcccaccctcgaccccttctgctctctggagcaccagggaggagggcccagccaggggagagggcgccccaggccccaaactagccagcgagtccccgggaccctcactcttggaccgctttccagaactccgaaccctgtcgcgggtccgcgtcgccctcccccgggcagcgcgtcaaatcggcgcatgcgcactcactggattgccgcgtagctctttctccccccacccaccaaccttttttctttccccgccccttccctccctccctcctcaacccgtcccctccctctcccccatcagcccccccctcggcacttcagtccggggaacagcggtgcgagctccaggcccatgcactgaggaggcggaaacaaggggagcccccagagctccatcaagccccctccaaaggctcccctacccggtccacgccccccaccccccctccccgcctcctcccaattgtgcatttttgcagccggaggcggctccgagatggggctgtgagcttcgcccggggagggggaaagagcagcgaggagtgaagcgggggggtggggtgaagggtttggatttcggggcagggggcgcacccccgtcagcaggccctccccaaggggctcggaactctacctcttcacccacgcccctggtgcgctttgccgaaggaaagaataagaacagagaaggaggagggggaaaggaggaaaagggggaccccccaactggggggggtgaaggagagaagtagcaggaccagaggggaaggggctgctgcttgcatcagcccacaccatgctgaccccgccgttgctcctgctgctgcccctgctctcagctctggtcgcggcggctatcgacggtgagtgagattccgcgtcccccttggacccctgggggcaccctctccccagcccccactcctgcatacggatggggaagggagacgcgggagggggtgccttttgttatcccagtccagctgacacagcagcggcccgactgggggcggggatggggtccgatttgggggatgggggccctgggcaaatgatgcttccggggccccccagcacaaacaaagaccagaggcctgggtagagagaagagggctccccatttttctgatcctggggaggagaggccttcttttcctatctctgttcggggagggcctccgcctcccctacatcctcacaaccccccaccccccatctgaattgtgaaggaatccggatttgcaatgttcggctgcaaaagggggtgggggtggggggggtggcttttgcactggcctctgtagctcgaaaggggagccaggccaggggtaccctgccgggcagagggcaggcaggcccgggaaggctgtgggtggggagagggagggccccctgcttgggcgtggaatcgaccccagagccccggctggaggcctgggtgctgaagtaggctcttccccctctcagggcctctgtcagtagcctggggtagggctgtgttggggggcagagagggggagctcgccatactatgtgactttgaattttccttcttaattcctgggagctttgagatgaaaaaacgtcagatgtc

SEQ ID NO: 6068 - DNA, 6000 bp, Homo sapiens
ctgtggggatggctctgacgagatcccttgcaacagtgagtgaggcgcactggcataacccatctgtacctcagttcctgccccacccctccctggccaagctttgtccctgggccccgtggtgtctggttcaaggcactctgtgacaggccagggcaggtgctgtgggccaggagctctgtcctgcgtccttctggcccccacagagaaaactctggcctgacgatacggggcgggcactgttctagagacagcctgtggtgtgggcgagttccgctgccgggacgggacctgcatcgggaactccagccgctgcaaccagtttgtggattgtgaggacgcctcagatgagatgaactgcagtgagtgacgccctttgctggcacctcctgggctcctccccatcgctcactgcatctcccgccttcaggccctcctgcacctgcccacattcctctctgccttccctcatccccgctgacagcctccatctccctgaggccctgtccccatcccgctcctgctcctgggctctcgtggggttccgagagggggcagtgagcagatggtgcagacagtgccccaccagaagggcaccgttcaacttttggaaacacatgaaggctccatagggctggcagctgccccagtcgggggtgatccagggggaaccaggtatcaccctcacccctgcccccaccaggtgccaccgactgcagcagctacttccgcctgggcgtgaagggcgtgctcttccagccctgcgagcggacctcactctgctacgcacccagctgggtgtgtgatggcgccaatgactgtggggactacagtgatgagcgcgactgcccaggtgggcgggggcaggtgtgtggtgggtggtggcctgcggtgagcagggccctcacacctgcctcgccccccaggtgtgaaacgccccagatgccctctgaattacttcgcctgccctagtgggcgctgcatccccatgagctggacgtgtgacaaagaggatgactgtgaacatggcgaggacgagacccactgcagtgagtgaccactgcacccactcagtgctccaagagcctgctgggccccacttcttagtcccccccagcaaatgcccccttggaaaagggcatccagagccttcaaccccctgccccacaccccaactcttgaggtcagactcagagactctgcctctagctgctgctgagcccccccacagaggggtgctgtgggcatctctcctgtccttcccatggcatcagcctccccaggtgggtgacccccacccttccccatctaactgtggcttctgactgccccagacaagttctgctcagaggcccagtttgagtgccagaaccatcgctgcatctccaagcagtggctgtgtgacggcagcgatgactgtggggatggctcagacgaggctgctcactgtggtaaggaagctgggattgggccgggggaggtgccccagggagggacagaccccacccaactccaccccacacacagacacccctgcagacgacggcgaaccatcacctccactgctagacctgatctacccgctcctaagtctctcagtggccctctctccccctacagaaggcaagacgtgcggcccctcctccttctcctgccctggcacccacgtgtgcgtccccgagcgctggctctgtgacggtgacaaagactgtgctgatggtgcagacgagagcatcgcagctggttgctgtgagtggcggggccacgtggagcgggtggacagcaaatggccacagtctcactttgcagatggggaagccggggtgcaggagaggaaatgcctcagcggggtccactgggggcggagccatagctgtagcccaggtgtccagactcctcatccagtgccctgcccactctaccaggagaaccacaggaggttagagtgagggacggtcggccgctggccaggcagggctgaagggctgtgtccacctctgtccacagtgtacaacagcacttgtgacgaccgtgagttcatgtgccagaaccgccagtgcatccccaagcacttcgtgtgtgaccacgaccgtgactgtgcagatggctctgatgagtcccccgagtgtggtgagccttcggcggtggtgggaggaggccctgccctctgccgggccagggcatcagcctcacaggtccattcctcccccagagtacccgacctgcggccccagtgagttccgctgtgccaatgggcgctgtctgagctcccgccagtgggagtgtgatggcgagaatgactgccacgaccagagtgacgaggctcccaagaacccacactgcaccagccaaggtgggccccagacctggctcccctctgccccctccccagactgcctgagaccccgctgacctgccgcctccgcccctccgcagagcacaagtgcaatgcctcgtcacagttcctgtgcagcagtgggcgctgtgtggctgaggcactgctctgcaacggccaggatgactgtggcgacagctcggacgagcgtggctgccacatcaatgagtgtctcagccgcaagctcagtggctgcagccaggactgtgaggacctcaagatcggcttcaaggtatgcccagccctggggaggagcttccacaccccagacgtgccaggaacgcctttctccactgccttattcattcattcatcccctagacagtggggatacagcagtgaatgagacagaaatctgcttggttggggtctgcctctatctggcaggtagagagccagcagatttgctgacagatgagatatgcagtgtgagaggaagagaggagtgaggcatcaagtaggcaagagatacacaggtctggagttcaaggagaggcccaggctggagagggaagtctgggagttatcaccatagagatgctatttgaatctgtgagcctggatatgattcccaagggagcagtgtaggtggagaagagaggagtccaaagtctgagccccgagctgagcaacagccaggagcagggaagtgaggggaccagcagaagagcctgagaaggagcagctgctgaggcaggagaacagccacgagaagaaagcatttccatggggagggcacacgcagctctgtcaaatgacactcgggggcacacagaaggaggcctgcactgtgggccagctgggtgggctcagtacccatatgctgctgcccctagtgaggccgggtagagggaattggagtctctgagccaggtctccagggtgggaggcccagaccctgccacatgcccagcccaaggctccctgtgcctgcagtgccgctgtcgccctggcttccggctgaaggacgacggccggacgtgtgctgatgtggacgagtgcagcaccaccttcccctgcagccagcgctgcatcaacactcatggcagctataagtgtctgtgtgtggagggctatgcaccccgcggcggcgacccccacagctgcaaggctgtgactggtgagatgcgcgcttggagggcatgaggtgacccaggctgtgtgggactgcccgggtggcagagctccagacaggcaggagaccagggccgctagaatgtgccaggagctgaggcaagatcctctgtctgcagacgaggaaccgtttctgatcttcgccaaccggtactacctgcgcaagctcaacctggacgggtccaactacacgttacttaagcaggtaccaaacccaggccctcctccccgctgcccatctcccagacccagcacagcctcccttgcaagtctccccgcttaggtccaaccatccctcccccagatgcaaatgtggcccctgttgccacaaccgacttctgctgtccttcactccccaaatccagggcctgaacaacgccgttgccttggattttgactaccgagagcagatgatctactggacagatgtgaccacccagggcagcatgatccgaaggatgcaccttaacgggagcaatgtgcaggtgaggcgggcggccctcggcgaccaacactggcccgcctcagatgactgttttcagatcgtctctccttcccgccccaccaacccaaattgcttccttctcactccactagtcactatatgactgcttgttctagctgctcactctcctctgggcccagacagcaaggactgggagattcctcttgcccttcccctcgctgccagcctcatgtctccttaatcatcaggaagttccctgtgaggtctggccaagcactgtgaggcttggggcgtggtcccattcacctagagccccctctcctagagcctctgctgacacctacacagtgtcaggcccaggactgggcattttacttccatggttctcccaccagagctgtcagagggagctctaccccattttacacgaggggaggctgagcctcacagaggcttgcaggtcctcccccaggtcacccagagctctccctcccctgccccttcctgcaggtcctacaccgtacaggcctcagcaaccccgatgggctggctgtggactgggtgggtggcaacctgtactggtgcgacaaaggccgggacaccatcgaggtgtccaagctcaatggggcctatcggacggtgctggtcagctctggcctccgtgagcccagggctctggtggtggatgtgcagaatgggtatgtggctgaggagggttgggggagcccctgaaagcagcatccaagcccagcctccctgcaggccactggtgcgatgggttacgggatctcccagggctcactgcctacccatcgccaggtacctgtactggacagactggggtgaccattcactgatcggccgcatcggcatggatgggtccagccgcagcgtcatcgtggacaccaagatcacatggcccaatggcctgacgctggactatgtcactgagcgcatctactgggccgacgcccgcgaggactacattgaatttgccagcctggatggctccaatcgccacgttggtcagtgtgccagtgaggctgtccaggcacagcagactcagtggggatggaggtctgaagcgacaggggatcaagttttgggggcaagagtggacataaaaagcggaggatatggcctgaggacaccactcactggggtgtggggttcagagcaccccgggggcttccccagcctggccaccacccagctcccttgggaaggaagaggagaggcccttcccttgtatacacagttctggaggactggccccaaggagggtgggggtgggaggcctgcgattgagaactgcagtgctccccacttcccgaggggagccatacactggcagggcaggaacttgccatgaggcagtctaggtttgaactccagctctgacacttgttagctgtgagaccatggggggtctgtaccatgaaccatctgtaactggggctgacacccacctctcagggtggtggtagggcttgaggaggtggagtgggccggcaccctgtccgagctccggctgactggcactgtgcctgccccttggccctgcagtgctgagccaggacatcccgcacatctttgcactgaccctgtttgaggactacgtctactggaccgactgggaaacaaagtccattaaccgagcccacaagaccacgggcaccaacaaaacgctcctcatcagcacgctgcaccggcccatggacctgcatgtcttccatgccctgcgccagccagacggtgagcaggcaaggggtgggagcaggcgaacggtgagccaggcaccggggtccctgggagttcctgctcatcccttctctagcattgaccaagccctcctggccagacactgggagactccaggagggtctagacaggggatggtctggctcccgggagcttcagcccggcctggatccagccctggagtctggcagcagcaagtccctgaggccagtcaagtgggggtctgggtgcccagcccccagaa

SEQ ID NO: 6069 - DNA, 6000 bp, Homo sapiens
cctcagtggctgctccctcactctccccaccctcccggcacactcctggaaggagtctcatcctcaccccatgcccacccgcttgcagcccagatgacctgtggtgtggacgagttccgctgcaaggattcgggccgctgcatcccagcgcgttggaagtgtgacggagaggatgactgtggggatggctcggatgagcccaaggaagagtgtggtgagccgagaccccactccaggaggaagacagtctacctgggtgggaggcatggcacccctggcaggtggagggctgggggccgcctgcttaccggtctcagcgtggccctgctgctgggcttcctgggcctgctgtggggctggggaaggaggcctggctggagctcacttccccacatccacccgtgccccatgtctcccagtttccctatccctgcccctgcccacgcctcatccacacatacctgtgtggagttttccctgcccaccctatgggatctgttcatctccttcccaaggcagctgcccacacacacacccccaaccatgtctcctgtccccaaacctccttatagaccccacgtctcaaaacaccgcctgggctccccgcggctgacccttcccaagctgggatgcccaccctccctgccaggccagcctgaccatgcctgcttggaccctaatgtctgccccagccctttccctgactgccctgacacttgcctcctccagatgaacgcacctgtgagccataccagttccgctgcaagaacaaccgctgcgtgcccggccgctggcagtgcgactacgacaacgattgcggtgacaactccgatgaagagagctgcagtacgtccccacccacccagccccgcatgagcccctcccaggcctggcccttgtctcgcggccctcctgccacaggccgcgccagagctggtggccacctcccagggtgggggcaggagccgccctcctcacccatcccactccatgtcgtgtatttgagtttgtgccatttcacctcatctcatgtttctctccattttcacactgtcctctcggggttgcagaggtaggtgtctctgatgtgcccgtgctcccaccatacccccacctctgtcccagagccccccatccctgtgctgtgcctctacccatcatccttgattgacctctccccaaaccctggtgcttgtctcagtggtcttgcccccgctcccctccccaaacacagtctgttctgagggcaaggccagggacctgtgtcctctctggtgtctgtcccatggggtaagtgcgagcccgcctgtgcccagctgttccataggagcagccagtgggctctgccaggactggctcggcctctgggtcagtcagctgtggccttcagagacacggggatgggccttgggctcgggactgtggcactactgaggcctggagtccttgtgcccaccctcctgggcctgtctccccctgtccttcccagcccctcggccctgctccgagagtgagttctcctgtgccaacggccgctgcatcgcggggcgctggaaatgcgatggagaccacgactgcgcggacggctcggacgaggtgggcagggagatgagaaggaagcagatggcctcagaggagttcaggcagggcttggggagtgccgagaggtgaccggctgcctgtgcccatgcccacagaaagactgcaccccccgctgtgacatggaccagttccagtgcaagagcggccactgcatccccctgcgctggcgctgtgacgcagacgccgactgcatggacggcagcgacgaggaggcctgcggcactggcggtgcgccccttggcttggtctccctgggtcctccctctgctgcccaccccgccacatggcccagtcattcactcattctttctcttctgtattcattcttcatgcaacaaatatttattaagcatttaccatgtaccaggcactgccataggtgttagggacgtagtagtaaacaagacacagggcccctgaatacacatttttgtgcgggttgtgcccagctcaatgccccctagtctaggggaccagttgagctgaaatccagcaaaccctgagggctgtgcccatctaggccccaccccacaagtccctccgagacagtctgctgccacaagaagaaaagccctgcctattttcccttcctgggggcagtgagacagtgcctgtccctcgctgacctgcctgggctctgcagtacagagggggcaggtgaagcccgggatgagaaaagactgggccttggagcggaaatcccaactgtgcgggcagatgtcttggctctgccttggtaggccaggcacagggatgggaacccggtcttccattcccagcccagtgctgttcccgcgtccccgctgtggaactacacagcccagtgctgttcccacgtccccgctgtggaactacacagcacagtgccctgccacataccagagaaggagtgccctctgaactcctccagacacccctgaaaaatggcctcttctcccctaaataccagagggggcagtttggccccaccaagtagaaatttaagagacctggttccaatttggctgtgccactgcttgcctggtgacccctctgagcctggaacccccacctgtggagacaggggtctgggtgggctcatggctcattctatctcttggctccccctggcaccagtgcggacctgccccctggacgagttccagtgcaacaacaccttgtgcaagccgctggcctggaagtgcgatggcgaggatgactgtggggacaactcagatgagaaccccgaggagtgtggtgagatttggggcggggctcccaggcttcccagtggccagcaaccacccccactcccaagactaattctggctctgtgtccccctggctgctgcagcccggttcgtgtgccctcccaaccggcccttccgttgcaagaatgaccgcgtctgtctgtggatcgggcgccaatgcgatggcacggacaactgtggggatgggactgatgaagaggactgtggtgagcagggggccgacgagaggcctgcaggggacgggtagtgcacagtggggtgagtctggtcctcgtgggagctgcactggggttagggttaaccaggaggactcgcccaggaaggggaggatccattgctaggagcctgggggcttttcgttaggaaagagaagcccctggggaaggctctgggggctgcctgatgccttaggtcttggaggtggggctgggaacccaaatgtttgacctgctccccctgcaagccttgtcacttaggaattgggagccactgttatctatggggttgccgtgggaggaggaggcaggggagaatacccagggcctaaagcctctgccctcctcagagccccccacagcccacaccacccactgcaaagacaagaaggagtttctgtgccggaaccagcgctgcctctcctcctccctgcgctgcaacatgttcgatgactgcggggacggctctgacgaggaggactgcagcatcggtgaggcccggcagcggaccggacgctggtggggagtggggagagccaagccctggcctggggtggctcaagggagggcatccactctctgtcccccacagaccccaagctgaccagctgcgccaccaatgccagcatctgtggggacgaggcacgctgcgtgcgcaccgagaaagcggcctactgtgcctgccgctcgggcttccacaccgtgcccggccagcccggatgccaaggtaggaaagcggggcagagcaggggtggacaccccaactgtggactctcatgaccctccctgtaacccttagacatcaacgagtgcctgcgcttcggcacctgctcccagctctgcaacaacaccaagggcggccacctctgcagctgcgctcggaacttcatgaagacgcacaacacctgcaaggccgaaggtgccggagccaccagagggcagaaaggctgggtggggcagggcgaccaggatatcaaacggggccgacttggaatggaatgtcttcctgcggacatcttgcccagacaagaagccccagactcatagttgcagctgcctgagcacagtgctggcccagcagtgggggcaggtcctggggctggctgactgaaggagtctggggtgtggcagtgctctgaattgcacacacacctcctcacccaccactgccaggacgagagtacactcagacacgcattgcacactcacagtcatgggggcctcacctgcacattccccacatgctttgatgcccaccttgccttccacatgcctgtacacagacattcacacacacccctggcacacacacccccaccatgcactcccatgcacaccctcgtgctccatgccaagcacacacaccccatgtgcctatgcacccccgagcatgtgccaggcagtttgtagcagagagcgtggtgatgccatccagcagccgtgaggaggtggaagtctctgggtctggaggggcagggacagctttctgactgaaaggagcgggtcacagtggatcagctcaggggaggagaggaggaggtccagaggctgaggttggagcctgcaaccctgagcagggagggtaagcagcagcttctggccggagcagatggtcctaccaggagatgggacagtgttcatgtgaaaggagctgagctgggtggggtgcacacctgcatcccacagccccagccctggcctcttgcttctccaggctctgagtaccaggtcctgtacatcgctgatgacaatgagatccgcagcctgttccccggccacccccattcggcttacgagcaggcattccagggtgacgagagtgtccgcattgatgctatggatgtccatgtcaaggctggccgtgtctattggaccaactggcacacgggcaccatctcctaccgcagcctgccacctgctgcgcctcctaccacttccaaccgccaccggcgacagattgaccggggtgtcacccacctcaacgtgagtgcccaacctggcgtggatggagtggaagagctccatagagcaggcggttcagagcaggatttgaaaagggcagtgctggctaggcgcagtggctcacgcctataatcccagcactttgggaggccaaggcgggcagatcacctgagatcaggagtttgagaccagcgtggcaacatggtgaaaccctgtctctactaaaaatacaaaaatttggctgagcgcggtggctcatgcctgtaatcccagcactttgggaggcagaggtgggtggatcacgaggtcaggagatccagaccaacctggctaacacagtgaaaccccgtctctattaaaaaatacaaaaaaattagccgggcatggtggcgggcgcctgtagtcccagctacttgggaagctggggcaggagaatggcatgaacccgggaggcggagcttgcagtgagccgagatcgcgccactgcactccagcctgggcgagagagtgagactcggtctctaaataaataaataaataaataaataaataaataaataaatagagactcggtctctaaataaataaataaataaataaataaaataaaataaaataaaaatacaaagattagccaggcgtggtggcgggcgcctgtaatcccagctactcaggaggctgaagcaggagaatcctttgaacccagaaggtggaagttgcagtgagccgagtgccactcggttgcagtggcaccaaggttgcagaatagcactgcactccagcctggatgatagagcgagactccgtctcaaaaaaaaaaaaaagaaaaagaaaacaaaagggcagtgcgaggggcaaaggttgagagtggggcagggggcagtcttaggattgtgttctgaggcatggccagcgggaagacagagcagtgggaatggtcagcagctggctgtgctgcaggcagcccaggg

SEQ ID NO: 6070 - DNA, 6000 bp, Homo sapiens
atgctgtgacggtgatggtgctgtctccacaggtgatcctaaagtcagagcctgtccaccccttcgggctggccgtgtatggggagcacattttctggactgactgggtgcggcgggcagtgcagcgggccaacaagcacgtgggcagcaacatgaagctgctgcgcgtggacatcccccagcagcccatgggcatcatcgccgtggccaacgacaccaacagctgtgagtggggctgccgccagctgcctcaccctcctgcctgtcgtgcatggacatacaaacacacaccccacacacacatcgcacataccacacgcaccctacacataccacacacacacatcccacacatactacactacacacaccacaccacatacacacaccacacccctcccacacactcaacacatacacaccacaccatacacaccccccacacaccacatacacatacacccccaacacatacacacacatacacaccccacatacacacaccacacatatcacatgcacaccccacatataccacaccacacacataccacacacacaccacacaccacatacacaccacacataccacacacaccccacacataccacatacacacaccaccacacacactacacataccacacacacaccacatacacacaccacatacacacaccacacatgacacatacacaccacacataggacacacatacacatgccacacacctaccacccacaacacacatcacacacacaccacacagcacacacacacaccacacaccacacgtaccacaaacatgccacacacacacacacacatctcacagacatactataaacaccccacaccccacacaccacaccccacacacacttgcctggtcctgctctccctgggcctccattacacagacacacacagctgtacacacctttggaaccgcaaaacccccagtgctcctgtaccccttcccaccaaggcatctacgcacacagatggactctgcacacgcctggcatctcctccacgttgcacacacacattcatgtcacacccgcccctcagggctcatccatgccctcggtgcccctaccctcaccctggtcactctcctcacttggagccacacagacagccgagagcctgggtgcacgtgccctcagtgggcacgagtacatgccccagcgccccccaccacagacctgcagctttcccaggtgtctcccatgcgccctggggctcactactgcacccgtgatctcagggccctcagactcgaatctctcagaaacactcctcaaagcccacggtgccctgcctaaaagcacacacatcctcaacggcacacctgccgaaaaccccatgcacctggccctcccacagcagccatccccatgccctccccactggctgcaagccgctgtgcctgccgtgactgagcagaggcttgggagctccatgaagtcagtgaatgggtgggtgcactctgggtgcatgcacagcagagaacactctccagccctgcgcccaccctgtccctgctcaggtgaactctctccatgccgaatcaacaacggtggctgccaggacctgtgtctgctcactcaccagggccatgtcaactgctcatgccgagggggccgaatcctccaggatgacctcacctgccgaggtgagagaggcgggggggaggggctggcggggaacccaagcacacaccagggatggtgaccatctcccctacatgctccagcccagccccccaaagccttttgccaagaagacgctgatgatgacctcagctccccgggggaggaggcgtgggcactggggcccacagcgctggctcagaaagctccctccacctccctccccagcggtgaattcctcttgccgagcacaagatgagtttgagtgtgccaatggcgagtgcatcaacttcagcctgacctgcgacggcgtcccccactgcaaggacaagtccgatgagaagccatcctactgcagtaaggagccccctgcagcccctgcctcttccaggcccagagcccaggtcctcctcccccaggcccctgcaggatggagcaggatcaggacccagcttcctgaccatgagttttgggagctcatgaagggcagaaccactgttagcctggactgggcctttgggtttgggggtggccagctggacacgtgcatgacgtctcagggaggcagccctttccctgtgcctgtggctgacacgcagcctactcctccatttgcagactcccgccgctgcaagaagactttccggcagtgcagcaatgggcgctgtgtgtccaacatgctgtggtgcaacggggccgacgactgtggggatggctctgacgagatcccttgcaacagtgagtgaggcgcactggcataacccatctgtacctcagttcctgccccacccctccctggccaagctttgtccctgggccccgtggtgtctggttcaaggcactctgtgacaggccagggcaggtgctgtgggccaggagctctgtcctgcgtccttctggcccccacagagaaaactctggcctgacgatacggggcgggcactgttctagagacagcctgtggtgtgggcgagttccgctgccgggacgggacctgcatcgggaactccagccgctgcaaccagtttgtggattgtgaggacgcctcagatgagatgaactgcagtgagtgacgccctttgctggcacctcctgggctcctccccatcgctcactgcatctcccgccttcaggccctcctgcacctgcccacattcctctctgccttccctcatccccgctgacagcctccatctccctgaggccctgtccccatcccgctcctgctcctgggctctcgtggggttccgagagggggcagtgagcagatggtgcagacagtgccccaccagaagggcaccgttcaacttttggaaacacatgaaggctccatagggctggcagctgccccagtcgggggtgatccagggggaaccaggtatcaccctcacccctgcccccaccaggtgccaccgactgcagcagctacttccgcctgggcgtgaagggcgtgctcttccagccctgcgagcggacctcactctgctacgcacccagctgggtgtgtgatggcgccaatgactgtggggactacagtgatgagcgcgactgcccaggtgggcgggggcaggtgtgtggtgggtggtggcctgcggtgagcagggccctcacacctgcctcgccccccaggtgtgaaacgccccagatgccctctgaattacttcgcctgccctagtgggcgctgcatccccatgagctggacgtgtgacaaagaggatgactgtgaacatggcgaggacgagacccactgcagtgagtgaccactgcacccactcagtgctccaagagcctgctgggccccacttcttagtcccccccagcaaatgcccccttggaaaagggcatccagagccttcaaccccctgccccacaccccaactcttgaggtcagactcagagactctgcctctagctgctgctgagcccccccacagaggggtgctgtgggcatctctcctgtccttcccatggcatcagcctccccaggtgggtgacccccacccttccccatctaactgtggcttctgactgccccagacaagttctgctcagaggcccagtttgagtgccagaaccatcgctgcatctccaagcagtggctgtgtgacggcagcgatgactgtggggatggctcagacgaggctgctcactgtggtaaggaagctgggattgggccgggggaggtgccccagggagggacagaccccacccaactccaccccacacacagacacccctgcagacgacggcgaaccatcacctccactgctagacctgatctacccgctcctaagtctctcagtggccctctctccccctacagaaggcaagacgtgcggcccctcctccttctcctgccctggcacccacgtgtgcgtccccgagcgctggctctgtgacggtgacaaagactgtgctgatggtgcagacgagagcatcgcagctggttgctgtgagtggcggggccacgtggagcgggtggacagcaaatggccacagtctcactttgcagatggggaagccggggtgcaggagaggaaatgcctcagcggggtccactgggggcggagccatagctgtagcccaggtgtccagactcctcatccagtgccctgcccactctaccaggagaaccacaggaggttagagtgagggacggtcggccgctggccaggcagggctgaagggctgtgtccacctctgtccacagtgtacaacagcacttgtgacgaccgtgagttcatgtgccagaaccgccagtgcatccccaagcacttcgtgtgtgaccacgaccgtgactgtgcagatggctctgatgagtcccccgagtgtggtgagccttcggcggtggtgggaggaggccctgccctctgccgggccagggcatcagcctcacaggtccattcctcccccagagtacccgacctgcggccccagtgagttccgctgtgccaatgggcgctgtctgagctcccgccagtgggagtgtgatggcgagaatgactgccacgaccagagtgacgaggctcccaagaacccacactgcaccagccaaggtgggccccagacctggctcccctctgccccctccccagactgcctgagaccccgctgacctgccgcctccgcccctccgcagagcacaagtgcaatgcctcgtcacagttcctgtgcagcagtgggcgctgtgtggctgaggcactgctctgcaacggccaggatgactgtggcgacagctcggacgagcgtggctgccacatcaatgagtgtctcagccgcaagctcagtggctgcagccaggactgtgaggacctcaagatcggcttcaaggtatgcccagccctggggaggagcttccacaccccagacgtgccaggaacgcctttctccactgccttattcattcattcatcccctagacagtggggatacagcagtgaatgagacagaaatctgcttggttggggtctgcctctatctggcaggtagagagccagcagatttgctgacagatgagatatgcagtgtgagaggaagagaggagtgaggcatcaagtaggcaagagatacacaggtctggagttcaaggagaggcccaggctggagagggaagtctgggagttatcaccatagagatgctatttgaatctgtgagcctggatatgattcccaagggagcagtgtaggtggagaagagaggagtccaaagtctgagccccgagctgagcaacagccaggagcagggaagtgaggggaccagcagaagagcctgagaaggagcagctgctgaggcaggagaacagccacgagaagaaagcatttccatggggagggcacacgcagctctgtcaaatgacactcgggggcacacagaaggaggcctgcactgtgggccagctgggtgggctcagtacccatatgctgctgcccctagtgaggccgggtagagggaattggagtctctgagccaggtctccagggtgggaggcccagaccctgccacatgcccagcccaaggctccctgtgcctgcagtgccgctgtcgccctggcttccggctgaaggacgacggccggacgtgtgctgatgtggacgagtgcagcaccaccttcccctgcagccagcgctgcatcaacactcatggcagctataagtgtctgtgtgtggagggctatgcaccccgcggcggcgacccccacagctgcaaggctgtgactggtgagatgcgcgcttggagggcatgaggtgacccaggctgtgtgggactgcccgggtggcagagctccagacaggcaggagaccagggccgctagaatgtgccaggagctgaggcaagatcc

SEQ ID NO: 6071 - DNA, 6000 bp, Homo sapiens
aagctcctttcttatgaggccaggggattccatcacgcattcagcgagtggcttttgagggcaaagaaggtgcagaggacccagtggggagcgcgaggggcgtcatgaagagcttcgtggctgtgtgctgaggactggccccacctggaagtcagggaacgtgtccttgaagaggcggcatgttagccagcgtctgaggatggcaggagtggctgggtgggagcatggtcccagtgcccaggagaaagagctgagctggcaggaggggccctccccctggccacaaggagcaggcactttcggggaatcagaaggagccagtgtggaccccagtggagagggcaggggcaagtggagactccaacaacccagcctcctcctgagccctccccgcgtcagcactggagcactgatggccctgtagagctcacagtaggatagttagaaggtccgccatgttcctggacactgagcacctaccccaggaaagcctctctctccctcctgccccattcctgggaagcaggttcacccagaccacagttgtgtcacatggaggagtttgttgacgccaggaggaaaaccacttctcactgcaggtgtgagtagtttcacctgaggtgtaggagttcctggtggggactgacaggccaagtccaatcctgacaagccaggaagatgactggccactgccccaggatacccattttcccttatggaggctagaaggacacgccgcctccctcccaacttacatcccgattccagagccaccgcaaacccctgctctcctccaggatgaggcccttaagatcagagcttctcacgagctcgccgaggctcagggcagccagtgtctccagaggggcagagcagcaccattttcctacgtgagcccagcagaaggcgggatagttcaatggtgctggagacgctgggggtgggcaagaagggtgtgacctggagaggtctgaggagacaagttcacaggccagaggacagatctgtggccagaatggtgaggggcagaggtaggaggaggccagaggcactggggtgggggcgggggcaggtcctgttagggaactggagaacggagctggcttttgtgtggcttggtggtctcagactccactgtgcctaaggatcgcctaggagcaagagaatgtggagtcccctgccccgccctgggcctagctgagtgacaagctctgggaccgaggacccagggctcaccatccaatgccggtggtccaaggaccactctgtcacacccagggtagtgcatgaccagccctgaggccttccacagcccccctccagcctcagcaccaccccacaaggagcacggcataattgggggctggctgttcccattgcctcctttactgagaggaaaccagggctcagaggggcgacaggctcattcaaagttggagccgttacgaggcagaacggtggctccaaccccaaacatgcaaaggcctcaaagtacggagaaggggactcttgagagctgcttgaggataggacccacataccccaggacctgggacacatgccacactcagctccacaagggcttcctgaatgatctggaagacagccagcctccctgcacagaagagagcagttaagaataaactcctgggaaatactcacatagtgtgtgccatctgtccttaagatggagattaacttcttccactctcacatcctgcgaggcaggtggtgctaccatccccacctcatagaggaggaaactgaggcacagggcagttgagtaagttgcctaagggcacctagctggtgggtggtggagccagggctggaaccccagggcctgtctcacttggctgcaccggctctcttctcagcaagtagacggtcactgcccagatactgcaatgtgaatatctcacacttggccctcatcccctcacactcagccacctcgtgtgtgaactgtctgtgcaatagtggggcccttcctgggcattggggcactgctggcctctatggctctggggtggctttgccctggcaggcttccaggttccaggtgcctacgcgtcctggcctgtgccctctgttgtggattctcaggctttgcctcctgatctctggaccctcttcccccagcctcatgttctggaccaactggaatgagcagcatcccagcatcatgcgggcggcgctctcgggagccaatgtcctgacccttatcgagaaggacatccgtacccccaatggcctggccatcgaccaccgtgccgagaagctctacttctctgacgccaccctggacaagatcgagcggtgcgagtatgacggctcccaccgctatgtgagtctgcggggtgggtgagctggcgggcggctgaggggaggccagggccagggtcagccgtcaaccaagaccgtccaggcacagacatggtgggaacagctgggaggaggtgagtgcctccaggccccagcctcggtcaaccccaccctgtccagcttgctcctcatcagctagacgagggagatagcaggatgcctctgcgggccctcattctgtagctgtcagaggccaggccaggctgtggtccggtggagactgggcaagaggcctgagcgatgctgtgacggtgatggtgctgtctccacaggtgatcctaaagtcagagcctgtccaccccttcgggctggccgtgtatggggagcacattttctggactgactgggtgcggcgggcagtgcagcgggccaacaagcacgtgggcagcaacatgaagctgctgcgcgtggacatcccccagcagcccatgggcatcatcgccgtggccaacgacaccaacagctgtgagtggggctgccgccagctgcctcaccctcctgcctgtcgtgcatggacatacaaacacacaccccacacacacatcgcacataccacacgcaccctacacataccacacacacacatcccacacatactacactacacacaccacaccacatacacacaccacacccctcccacacactcaacacatacacaccacaccatacacaccccccacacaccacatacacatacacccccaacacatacacacacatacacaccccacatacacacaccacacatatcacatgcacaccccacatataccacaccacacacataccacacacacaccacacaccacatacacaccacacataccacacacaccccacacataccacatacacacaccaccacacacactacacataccacacacacaccacatacacacaccacatacacacaccacacatgacacatacacaccacacataggacacacatacacatgccacacacctaccacccacaacacacatcacacacacaccacacagcacacacacacaccacacaccacacgtaccacaaacatgccacacacacacacacacatctcacagacatactataaacaccccacaccccacacaccacaccccacacacacttgcctggtcctgctctccctgggcctccattacacagacacacacagctgtacacacctttggaaccgcaaaacccccagtgctcctgtaccccttcccaccaaggcatctacgcacacagatggactctgcacacgcctggcatctcctccacgttgcacacacacattcatgtcacacccgcccctcagggctcatccatgccctcggtgcccctaccctcaccctggtcactctcctcacttggagccacacagacagccgagagcctgggtgcacgtgccctcagtgggcacgagtacatgccccagcgccccccaccacagacctgcagctttcccaggtgtctcccatgcgccctggggctcactactgcacccgtgatctcagggccctcagactcgaatctctcagaaacactcctcaaagcccacggtgccctgcctaaaagcacacacatcctcaacggcacacctgccgaaaaccccatgcacctggccctcccacagcagccatccccatgccctccccactggctgcaagccgctgtgcctgccgtgactgagcagaggcttgggagctccatgaagtcagtgaatgggtgggtgcactctgggtgcatgcacagcagagaacactctccagccctgcgcccaccctgtccctgctcaggtgaactctctccatgccgaatcaacaacggtggctgccaggacctgtgtctgctcactcaccagggccatgtcaactgctcatgccgagggggccgaatcctccaggatgacctcacctgccgaggtgagagaggcgggggggaggggctggcggggaacccaagcacacaccagggatggtgaccatctcccctacatgctccagcccagccccccaaagccttttgccaagaagacgctgatgatgacctcagctccccgggggaggaggcgtgggcactggggcccacagcgctggctcagaaagctccctccacctccctccccagcggtgaattcctcttgccgagcacaagatgagtttgagtgtgccaatggcgagtgcatcaacttcagcctgacctgcgacggcgtcccccactgcaaggacaagtccgatgagaagccatcctactgcagtaaggagccccctgcagcccctgcctcttccaggcccagagcccaggtcctcctcccccaggcccctgcaggatggagcaggatcaggacccagcttcctgaccatgagttttgggagctcatgaagggcagaaccactgttagcctggactgggcctttgggtttgggggtggccagctggacacgtgcatgacgtctcagggaggcagccctttccctgtgcctgtggctgacacgcagcctactcctccatttgcagactcccgccgctgcaagaagactttccggcagtgcagcaatgggcgctgtgtgtccaacatgctgtggtgcaacggggccgacgactgtggggatggctctgacgagatcccttgcaacagtgagtgaggcgcactggcataacccatctgtacctcagttcctgccccacccctccctggccaagctttgtccctgggccccgtggtgtctggttcaaggcactctgtgacaggccagggcaggtgctgtgggccaggagctctgtcctgcgtccttctggcccccacagagaaaactctggcctgacgatacggggcgggcactgttctagagacagcctgtggtgtgggcgagttccgctgccgggacgggacctgcatcgggaactccagccgctgcaaccagtttgtggattgtgaggacgcctcagatgagatgaactgcagtgagtgacgccctttgctggcacctcctgggctcctccccatcgctcactgcatctcccgccttcaggccctcctgcacctgcccacattcctctctgccttccctcatccccgctgacagcctccatctccctgaggccctgtccccatcccgctcctgctcctgggctctcgtggggttccgagagggggcagtgagcagatggtgcagacagtgccccaccagaagggcaccgttcaacttttggaaacacatgaaggctccatagggctggcagctgccccagtcgggggtgatccagggggaaccaggtatcaccctcacccctgcccccaccaggtgccaccgactgcagcagctacttccgcctgggcgtgaagggcgtgctcttccagccctgcgagcggacctcactctgctacgcacccagctgggtgtgtgatggcgccaatgactgtggggactacagtgatgagcgcgactgcccaggtgggcgggggcaggtgtgtggtgggtggtggcctgcggtgagcagggccctcacacctgcctcgccccccaggtgtgaaacgccccagatgccctctgaattacttcgcctgccctagtgggcgctgcatccccatgagctggacgtgtgacaaagag

SEQ ID NO: 6072 - DNA, 6000 bp, Homo sapiens
gaggggcgacaggctcattcaaagttggagccgttacgaggcagaacggtggctccaaccccaaacatgcaaaggcctcaaagtacggagaaggggactcttgagagctgcttgaggataggacccacataccccaggacctgggacacatgccacactcagctccacaagggcttcctgaatgatctggaagacagccagcctccctgcacagaagagagcagttaagaataaactcctgggaaatactcacatagtgtgtgccatctgtccttaagatggagattaacttcttccactctcacatcctgcgaggcaggtggtgctaccatccccacctcatagaggaggaaactgaggcacagggcagttgagtaagttgcctaagggcacctagctggtgggtggtggagccagggctggaaccccagggcctgtctcacttggctgcaccggctctcttctcagcaagtagacggtcactgcccagatactgcaatgtgaatatctcacacttggccctcatcccctcacactcagccacctcgtgtgtgaactgtctgtgcaatagtggggcccttcctgggcattggggcactgctggcctctatggctctggggtggctttgccctggcaggcttccaggttccaggtgcctacgcgtcctggcctgtgccctctgttgtggattctcaggctttgcctcctgatctctggaccctcttcccccagcctcatgttctggaccaactggaatgagcagcatcccagcatcatgcgggcggcgctctcgggagccaatgtcctgacccttatcgagaaggacatccgtacccccaatggcctggccatcgaccaccgtgccgagaagctctacttctctgacgccaccctggacaagatcgagcggtgcgagtatgacggctcccaccgctatgtgagtctgcggggtgggtgagctggcgggcggctgaggggaggccagggccagggtcagccgtcaaccaagaccgtccaggcacagacatggtgggaacagctgggaggaggtgagtgcctccaggccccagcctcggtcaaccccaccctgtccagcttgctcctcatcagctagacgagggagatagcaggatgcctctgcgggccctcattctgtagctgtcagaggccaggccaggctgtggtccggtggagactgggcaagaggcctgagcgatgctgtgacggtgatggtgctgtctccacaggtgatcctaaagtcagagcctgtccaccccttcgggctggccgtgtatggggagcacattttctggactgactgggtgcggcgggcagtgcagcgggccaacaagcacgtgggcagcaacatgaagctgctgcgcgtggacatcccccagcagcccatgggcatcatcgccgtggccaacgacaccaacagctgtgagtggggctgccgccagctgcctcaccctcctgcctgtcgtgcatggacatacaaacacacaccccacacacacatcgcacataccacacgcaccctacacataccacacacacacatcccacacatactacactacacacaccacaccacatacacacaccacacccctcccacacactcaacacatacacaccacaccatacacaccccccacacaccacatacacatacacccccaacacatacacacacatacacaccccacatacacacaccacacatatcacatgcacaccccacatataccacaccacacacataccacacacacaccacacaccacatacacaccacacataccacacacaccccacacataccacatacacacaccaccacacacactacacataccacacacacaccacatacacacaccacatacacacaccacacatgacacatacacaccacacataggacacacatacacatgccacacacctaccacccacaacacacatcacacacacaccacacagcacacacacacaccacacaccacacgtaccacaaacatgccacacacacacacacacatctcacagacatactataaacaccccacaccccacacaccacaccccacacacacttgcctggtcctgctctccctgggcctccattacacagacacacacagctgtacacacctttggaaccgcaaaacccccagtgctcctgtaccccttcccaccaaggcatctacgcacacagatggactctgcacacgcctggcatctcctccacgttgcacacacacattcatgtcacacccgcccctcagggctcatccatgccctcggtgcccctaccctcaccctggtcactctcctcacttggagccacacagacagccgagagcctgggtgcacgtgccctcagtgggcacgagtacatgccccagcgccccccaccacagacctgcagctttcccaggtgtctcccatgcgccctggggctcactactgcacccgtgatctcagggccctcagactcgaatctctcagaaacactcctcaaagcccacggtgccctgcctaaaagcacacacatcctcaacggcacacctgccgaaaaccccatgcacctggccctcccacagcagccatccccatgccctccccactggctgcaagccgctgtgcctgccgtgactgagcagaggcttgggagctccatgaagtcagtgaatgggtgggtgcactctgggtgcatgcacagcagagaacactctccagccctgcgcccaccctgtccctgctcaggtgaactctctccatgccgaatcaacaacggtggctgccaggacctgtgtctgctcactcaccagggccatgtcaactgctcatgccgagggggccgaatcctccaggatgacctcacctgccgaggtgagagaggcgggggggaggggctggcggggaacccaagcacacaccagggatggtgaccatctcccctacatgctccagcccagccccccaaagccttttgccaagaagacgctgatgatgacctcagctccccgggggaggaggcgtgggcactggggcccacagcgctggctcagaaagctccctccacctccctccccagcggtgaattcctcttgccgagcacaagatgagtttgagtgtgccaatggcgagtgcatcaacttcagcctgacctgcgacggcgtcccccactgcaaggacaagtccgatgagaagccatcctactgcagtaaggagccccctgcagcccctgcctcttccaggcccagagcccaggtcctcctcccccaggcccctgcaggatggagcaggatcaggacccagcttcctgaccatgagttttgggagctcatgaagggcagaaccactgttagcctggactgggcctttgggtttgggggtggccagctggacacgtgcatgacgtctcagggaggcagccctttccctgtgcctgtggctgacacgcagcctactcctccatttgcagactcccgccgctgcaagaagactttccggcagtgcagcaatgggcgctgtgtgtccaacatgctgtggtgcaacggggccgacgactgtggggatggctctgacgagatcccttgcaacagtgagtgaggcgcactggcataacccatctgtacctcagttcctgccccacccctccctggccaagctttgtccctgggccccgtggtgtctggttcaaggcactctgtgacaggccagggcaggtgctgtgggccaggagctctgtcctgcgtccttctggcccccacagagaaaactctggcctgacgatacggggcgggcactgttctagagacagcctgtggtgtgggcgagttccgctgccgggacgggacctgcatcgggaactccagccgctgcaaccagtttgtggattgtgaggacgcctcagatgagatgaactgcagtgagtgacgccctttgctggcacctcctgggctcctccccatcgctcactgcatctcccgccttcaggccctcctgcacctgcccacattcctctctgccttccctcatccccgctgacagcctccatctccctgaggccctgtccccatcccgctcctgctcctgggctctcgtggggttccgagagggggcagtgagcagatggtgcagacagtgccccaccagaagggcaccgttcaacttttggaaacacatgaaggctccatagggctggcagctgccccagtcgggggtgatccagggggaaccaggtatcaccctcacccctgcccccaccaggtgccaccgactgcagcagctacttccgcctgggcgtgaagggcgtgctcttccagccctgcgagcggacctcactctgctacgcacccagctgggtgtgtgatggcgccaatgactgtggggactacagtgatgagcgcgactgcccaggtgggcgggggcaggtgtgtggtgggtggtggcctgcggtgagcagggccctcacacctgcctcgccccccaggtgtgaaacgccccagatgccctctgaattacttcgcctgccctagtgggcgctgcatccccatgagctggacgtgtgacaaagaggatgactgtgaacatggcgaggacgagacccactgcagtgagtgaccactgcacccactcagtgctccaagagcctgctgggccccacttcttagtcccccccagcaaatgcccccttggaaaagggcatccagagccttcaaccccctgccccacaccccaactcttgaggtcagactcagagactctgcctctagctgctgctgagcccccccacagaggggtgctgtgggcatctctcctgtccttcccatggcatcagcctccccaggtgggtgacccccacccttccccatctaactgtggcttctgactgccccagacaagttctgctcagaggcccagtttgagtgccagaaccatcgctgcatctccaagcagtggctgtgtgacggcagcgatgactgtggggatggctcagacgaggctgctcactgtggtaaggaagctgggattgggccgggggaggtgccccagggagggacagaccccacccaactccaccccacacacagacacccctgcagacgacggcgaaccatcacctccactgctagacctgatctacccgctcctaagtctctcagtggccctctctccccctacagaaggcaagacgtgcggcccctcctccttctcctgccctggcacccacgtgtgcgtccccgagcgctggctctgtgacggtgacaaagactgtgctgatggtgcagacgagagcatcgcagctggttgctgtgagtggcggggccacgtggagcgggtggacagcaaatggccacagtctcactttgcagatggggaagccggggtgcaggagaggaaatgcctcagcggggtccactgggggcggagccatagctgtagcccaggtgtccagactcctcatccagtgccctgcccactctaccaggagaaccacaggaggttagagtgagggacggtcggccgctggccaggcagggctgaagggctgtgtccacctctgtccacagtgtacaacagcacttgtgacgaccgtgagttcatgtgccagaaccgccagtgcatccccaagcacttcgtgtgtgaccacgaccgtgactgtgcagatggctctgatgagtcccccgagtgtggtgagccttcggcggtggtgggaggaggccctgccctctgccgggccagggcatcagcctcacaggtccattcctcccccagagtacccgacctgcggccccagtgagttccgctgtgccaatgggcgctgtctgagctcccgccagtgggagtgtgatggcgagaatgactgccacgaccagagtgacgaggctcccaagaacccacactgcaccagccaaggtgggccccagacctggctcccctctgccccctccccagactgcctgagaccccgctgacctgccgcc

SEQ ID NO: 6073 - DNA, 6000 bp, Homo sapiens
agaggtctgaggagacaagttcacaggccagaggacagatctgtggccagaatggtgaggggcagaggtaggaggaggccagaggcactggggtgggggcgggggcaggtcctgttagggaactggagaacggagctggcttttgtgtggcttggtggtctcagactccactgtgcctaaggatcgcctaggagcaagagaatgtggagtcccctgccccgccctgggcctagctgagtgacaagctctgggaccgaggacccagggctcaccatccaatgccggtggtccaaggaccactctgtcacacccagggtagtgcatgaccagccctgaggccttccacagcccccctccagcctcagcaccaccccacaaggagcacggcataattgggggctggctgttcccattgcctcctttactgagaggaaaccagggctcagaggggcgacaggctcattcaaagttggagccgttacgaggcagaacggtggctccaaccccaaacatgcaaaggcctcaaagtacggagaaggggactcttgagagctgcttgaggataggacccacataccccaggacctgggacacatgccacactcagctccacaagggcttcctgaatgatctggaagacagccagcctccctgcacagaagagagcagttaagaataaactcctgggaaatactcacatagtgtgtgccatctgtccttaagatggagattaacttcttccactctcacatcctgcgaggcaggtggtgctaccatccccacctcatagaggaggaaactgaggcacagggcagttgagtaagttgcctaagggcacctagctggtgggtggtggagccagggctggaaccccagggcctgtctcacttggctgcaccggctctcttctcagcaagtagacggtcactgcccagatactgcaatgtgaatatctcacacttggccctcatcccctcacactcagccacctcgtgtgtgaactgtctgtgcaatagtggggcccttcctgggcattggggcactgctggcctctatggctctggggtggctttgccctggcaggcttccaggttccaggtgcctacgcgtcctggcctgtgccctctgttgtggattctcaggctttgcctcctgatctctggaccctcttcccccagcctcatgttctggaccaactggaatgagcagcatcccagcatcatgcgggcggcgctctcgggagccaatgtcctgacccttatcgagaaggacatccgtacccccaatggcctggccatcgaccaccgtgccgagaagctctacttctctgacgccaccctggacaagatcgagcggtgcgagtatgacggctcccaccgctatgtgagtctgcggggtgggtgagctggcgggcggctgaggggaggccagggccagggtcagccgtcaaccaagaccgtccaggcacagacatggtgggaacagctgggaggaggtgagtgcctccaggccccagcctcggtcaaccccaccctgtccagcttgctcctcatcagctagacgagggagatagcaggatgcctctgcgggccctcattctgtagctgtcagaggccaggccaggctgtggtccggtggagactgggcaagaggcctgagcgatgctgtgacggtgatggtgctgtctccacaggtgatcctaaagtcagagcctgtccaccccttcgggctggccgtgtatggggagcacattttctggactgactgggtgcggcgggcagtgcagcgggccaacaagcacgtgggcagcaacatgaagctgctgcgcgtggacatcccccagcagcccatgggcatcatcgccgtggccaacgacaccaacagctgtgagtggggctgccgccagctgcctcaccctcctgcctgtcgtgcatggacatacaaacacacaccccacacacacatcgcacataccacacgcaccctacacataccacacacacacatcccacacatactacactacacacaccacaccacatacacacaccacacccctcccacacactcaacacatacacaccacaccatacacaccccccacacaccacatacacatacacccccaacacatacacacacatacacaccccacatacacacaccacacatatcacatgcacaccccacatataccacaccacacacataccacacacacaccacacaccacatacacaccacacataccacacacaccccacacataccacatacacacaccaccacacacactacacataccacacacacaccacatacacacaccacatacacacaccacacatgacacatacacaccacacataggacacacatacacatgccacacacctaccacccacaacacacatcacacacacaccacacagcacacacacacaccacacaccacacgtaccacaaacatgccacacacacacacacacatctcacagacatactataaacaccccacaccccacacaccacaccccacacacacttgcctggtcctgctctccctgggcctccattacacagacacacacagctgtacacacctttggaaccgcaaaacccccagtgctcctgtaccccttcccaccaaggcatctacgcacacagatggactctgcacacgcctggcatctcctccacgttgcacacacacattcatgtcacacccgcccctcagggctcatccatgccctcggtgcccctaccctcaccctggtcactctcctcacttggagccacacagacagccgagagcctgggtgcacgtgccctcagtgggcacgagtacatgccccagcgccccccaccacagacctgcagctttcccaggtgtctcccatgcgccctggggctcactactgcacccgtgatctcagggccctcagactcgaatctctcagaaacactcctcaaagcccacggtgccctgcctaaaagcacacacatcctcaacggcacacctgccgaaaaccccatgcacctggccctcccacagcagccatccccatgccctccccactggctgcaagccgctgtgcctgccgtgactgagcagaggcttgggagctccatgaagtcagtgaatgggtgggtgcactctgggtgcatgcacagcagagaacactctccagccctgcgcccaccctgtccctgctcaggtgaactctctccatgccgaatcaacaacggtggctgccaggacctgtgtctgctcactcaccagggccatgtcaactgctcatgccgagggggccgaatcctccaggatgacctcacctgccgaggtgagagaggcgggggggaggggctggcggggaacccaagcacacaccagggatggtgaccatctcccctacatgctccagcccagccccccaaagccttttgccaagaagacgctgatgatgacctcagctccccgggggaggaggcgtgggcactggggcccacagcgctggctcagaaagctccctccacctccctccccagcggtgaattcctcttgccgagcacaagatgagtttgagtgtgccaatggcgagtgcatcaacttcagcctgacctgcgacggcgtcccccactgcaaggacaagtccgatgagaagccatcctactgcagtaaggagccccctgcagcccctgcctcttccaggcccagagcccaggtcctcctcccccaggcccctgcaggatggagcaggatcaggacccagcttcctgaccatgagttttgggagctcatgaagggcagaaccactgttagcctggactgggcctttgggtttgggggtggccagctggacacgtgcatgacgtctcagggaggcagccctttccctgtgcctgtggctgacacgcagcctactcctccatttgcagactcccgccgctgcaagaagactttccggcagtgcagcaatgggcgctgtgtgtccaacatgctgtggtgcaacggggccgacgactgtggggatggctctgacgagatcccttgcaacagtgagtgaggcgcactggcataacccatctgtacctcagttcctgccccacccctccctggccaagctttgtccctgggccccgtggtgtctggttcaaggcactctgtgacaggccagggcaggtgctgtgggccaggagctctgtcctgcgtccttctggcccccacagagaaaactctggcctgacgatacggggcgggcactgttctagagacagcctgtggtgtgggcgagttccgctgccgggacgggacctgcatcgggaactccagccgctgcaaccagtttgtggattgtgaggacgcctcagatgagatgaactgcagtgagtgacgccctttgctggcacctcctgggctcctccccatcgctcactgcatctcccgccttcaggccctcctgcacctgcccacattcctctctgccttccctcatccccgctgacagcctccatctccctgaggccctgtccccatcccgctcctgctcctgggctctcgtggggttccgagagggggcagtgagcagatggtgcagacagtgccccaccagaagggcaccgttcaacttttggaaacacatgaaggctccatagggctggcagctgccccagtcgggggtgatccagggggaaccaggtatcaccctcacccctgcccccaccaggtgccaccgactgcagcagctacttccgcctgggcgtgaagggcgtgctcttccagccctgcgagcggacctcactctgctacgcacccagctgggtgtgtgatggcgccaatgactgtggggactacagtgatgagcgcgactgcccaggtgggcgggggcaggtgtgtggtgggtggtggcctgcggtgagcagggccctcacacctgcctcgccccccaggtgtgaaacgccccagatgccctctgaattacttcgcctgccctagtgggcgctgcatccccatgagctggacgtgtgacaaagaggatgactgtgaacatggcgaggacgagacccactgcagtgagtgaccactgcacccactcagtgctccaagagcctgctgggccccacttcttagtcccccccagcaaatgcccccttggaaaagggcatccagagccttcaaccccctgccccacaccccaactcttgaggtcagactcagagactctgcctctagctgctgctgagcccccccacagaggggtgctgtgggcatctctcctgtccttcccatggcatcagcctccccaggtgggtgacccccacccttccccatctaactgtggcttctgactgccccagacaagttctgctcagaggcccagtttgagtgccagaaccatcgctgcatctccaagcagtggctgtgtgacggcagcgatgactgtggggatggctcagacgaggctgctcactgtggtaaggaagctgggattgggccgggggaggtgccccagggagggacagaccccacccaactccaccccacacacagacacccctgcagacgacggcgaaccatcacctccactgctagacctgatctacccgctcctaagtctctcagtggccctctctccccctacagaaggcaagacgtgcggcccctcctccttctcctgccctggcacccacgtgtgcgtccccgagcgctggctctgtgacggtgacaaagactgtgctgatggtgcagacgagagcatcgcagctggttgctgtgagtggcggggccacgtggagcgggtggacagcaaatggccacagtctcactttgcagatggggaagccggggtgcaggagaggaaatgcctcagcggggtccactgggggcggagccatagctgtagcccaggtgtccagactcctcatccagtgccctgcccactctaccaggagaaccacaggaggttagagtgagggacggtcggccgctggccaggcagg

SEQ ID NO: 6074 - DNA, 6000 bp, Homo sapiens
tgctctccctgggcctccattacacagacacacacagctgtacacacctttggaaccgcaaaacccccagtgctcctgtaccccttcccaccaaggcatctacgcacacagatggactctgcacacgcctggcatctcctccacgttgcacacacacattcatgtcacacccgcccctcagggctcatccatgccctcggtgcccctaccctcaccctggtcactctcctcacttggagccacacagacagccgagagcctgggtgcacgtgccctcagtgggcacgagtacatgccccagcgccccccaccacagacctgcagctttcccaggtgtctcccatgcgccctggggctcactactgcacccgtgatctcagggccctcagactcgaatctctcagaaacactcctcaaagcccacggtgccctgcctaaaagcacacacatcctcaacggcacacctgccgaaaaccccatgcacctggccctcccacagcagccatccccatgccctccccactggctgcaagccgctgtgcctgccgtgactgagcagaggcttgggagctccatgaagtcagtgaatgggtgggtgcactctgggtgcatgcacagcagagaacactctccagccctgcgcccaccctgtccctgctcaggtgaactctctccatgccgaatcaacaacggtggctgccaggacctgtgtctgctcactcaccagggccatgtcaactgctcatgccgagggggccgaatcctccaggatgacctcacctgccgaggtgagagaggcgggggggaggggctggcggggaacccaagcacacaccagggatggtgaccatctcccctacatgctccagcccagccccccaaagccttttgccaagaagacgctgatgatgacctcagctccccgggggaggaggcgtgggcactggggcccacagcgctggctcagaaagctccctccacctccctccccagcggtgaattcctcttgccgagcacaagatgagtttgagtgtgccaatggcgagtgcatcaacttcagcctgacctgcgacggcgtcccccactgcaaggacaagtccgatgagaagccatcctactgcagtaaggagccccctgcagcccctgcctcttccaggcccagagcccaggtcctcctcccccaggcccctgcaggatggagcaggatcaggacccagcttcctgaccatgagttttgggagctcatgaagggcagaaccactgttagcctggactgggcctttgggtttgggggtggccagctggacacgtgcatgacgtctcagggaggcagccctttccctgtgcctgtggctgacacgcagcctactcctccatttgcagactcccgccgctgcaagaagactttccggcagtgcagcaatgggcgctgtgtgtccaacatgctgtggtgcaacggggccgacgactgtggggatggctctgacgagatcccttgcaacagtgagtgaggcgcactggcataacccatctgtacctcagttcctgccccacccctccctggccaagctttgtccctgggccccgtggtgtctggttcaaggcactctgtgacaggccagggcaggtgctgtgggccaggagctctgtcctgcgtccttctggcccccacagagaaaactctggcctgacgatacggggcgggcactgttctagagacagcctgtggtgtgggcgagttccgctgccgggacgggacctgcatcgggaactccagccgctgcaaccagtttgtggattgtgaggacgcctcagatgagatgaactgcagtgagtgacgccctttgctggcacctcctgggctcctccccatcgctcactgcatctcccgccttcaggccctcctgcacctgcccacattcctctctgccttccctcatccccgctgacagcctccatctccctgaggccctgtccccatcccgctcctgctcctgggctctcgtggggttccgagagggggcagtgagcagatggtgcagacagtgccccaccagaagggcaccgttcaacttttggaaacacatgaaggctccatagggctggcagctgccccagtcgggggtgatccagggggaaccaggtatcaccctcacccctgcccccaccaggtgccaccgactgcagcagctacttccgcctgggcgtgaagggcgtgctcttccagccctgcgagcggacctcactctgctacgcacccagctgggtgtgtgatggcgccaatgactgtggggactacagtgatgagcgcgactgcccaggtgggcgggggcaggtgtgtggtgggtggtggcctgcggtgagcagggccctcacacctgcctcgccccccaggtgtgaaacgccccagatgccctctgaattacttcgcctgccctagtgggcgctgcatccccatgagctggacgtgtgacaaagaggatgactgtgaacatggcgaggacgagacccactgcagtgagtgaccactgcacccactcagtgctccaagagcctgctgggccccacttcttagtcccccccagcaaatgcccccttggaaaagggcatccagagccttcaaccccctgccccacaccccaactcttgaggtcagactcagagactctgcctctagctgctgctgagcccccccacagaggggtgctgtgggcatctctcctgtccttcccatggcatcagcctccccaggtgggtgacccccacccttccccatctaactgtggcttctgactgccccagacaagttctgctcagaggcccagtttgagtgccagaaccatcgctgcatctccaagcagtggctgtgtgacggcagcgatgactgtggggatggctcagacgaggctgctcactgtggtaaggaagctgggattgggccgggggaggtgccccagggagggacagaccccacccaactccaccccacacacagacacccctgcagacgacggcgaaccatcacctccactgctagacctgatctacccgctcctaagtctctcagtggccctctctccccctacagaaggcaagacgtgcggcccctcctccttctcctgccctggcacccacgtgtgcgtccccgagcgctggctctgtgacggtgacaaagactgtgctgatggtgcagacgagagcatcgcagctggttgctgtgagtggcggggccacgtggagcgggtggacagcaaatggccacagtctcactttgcagatggggaagccggggtgcaggagaggaaatgcctcagcggggtccactgggggcggagccatagctgtagcccaggtgtccagactcctcatccagtgccctgcccactctaccaggagaaccacaggaggttagagtgagggacggtcggccgctggccaggcagggctgaagggctgtgtccacctctgtccacagtgtacaacagcacttgtgacgaccgtgagttcatgtgccagaaccgccagtgcatccccaagcacttcgtgtgtgaccacgaccgtgactgtgcagatggctctgatgagtcccccgagtgtggtgagccttcggcggtggtgggaggaggccctgccctctgccgggccagggcatcagcctcacaggtccattcctcccccagagtacccgacctgcggccccagtgagttccgctgtgccaatgggcgctgtctgagctcccgccagtgggagtgtgatggcgagaatgactgccacgaccagagtgacgaggctcccaagaacccacactgcaccagccaaggtgggccccagacctggctcccctctgccccctccccagactgcctgagaccccgctgacctgccgcctccgcccctccgcagagcacaagtgcaatgcctcgtcacagttcctgtgcagcagtgggcgctgtgtggctgaggcactgctctgcaacggccaggatgactgtggcgacagctcggacgagcgtggctgccacatcaatgagtgtctcagccgcaagctcagtggctgcagccaggactgtgaggacctcaagatcggcttcaaggtatgcccagccctggggaggagcttccacaccccagacgtgccaggaacgcctttctccactgccttattcattcattcatcccctagacagtggggatacagcagtgaatgagacagaaatctgcttggttggggtctgcctctatctggcaggtagagagccagcagatttgctgacagatgagatatgcagtgtgagaggaagagaggagtgaggcatcaagtaggcaagagatacacaggtctggagttcaaggagaggcccaggctggagagggaagtctgggagttatcaccatagagatgctatttgaatctgtgagcctggatatgattcccaagggagcagtgtaggtggagaagagaggagtccaaagtctgagccccgagctgagcaacagccaggagcagggaagtgaggggaccagcagaagagcctgagaaggagcagctgctgaggcaggagaacagccacgagaagaaagcatttccatggggagggcacacgcagctctgtcaaatgacactcgggggcacacagaaggaggcctgcactgtgggccagctgggtgggctcagtacccatatgctgctgcccctagtgaggccgggtagagggaattggagtctctgagccaggtctccagggtgggaggcccagaccctgccacatgcccagcccaaggctccctgtgcctgcagtgccgctgtcgccctggcttccggctgaaggacgacggccggacgtgtgctgatgtggacgagtgcagcaccaccttcccctgcagccagcgctgcatcaacactcatggcagctataagtgtctgtgtgtggagggctatgcaccccgcggcggcgacccccacagctgcaaggctgtgactggtgagatgcgcgcttggagggcatgaggtgacccaggctgtgtgggactgcccgggtggcagagctccagacaggcaggagaccagggccgctagaatgtgccaggagctgaggcaagatcctctgtctgcagacgaggaaccgtttctgatcttcgccaaccggtactacctgcgcaagctcaacctggacgggtccaactacacgttacttaagcaggtaccaaacccaggccctcctccccgctgcccatctcccagacccagcacagcctcccttgcaagtctccccgcttaggtccaaccatccctcccccagatgcaaatgtggcccctgttgccacaaccgacttctgctgtccttcactccccaaatccagggcctgaacaacgccgttgccttggattttgactaccgagagcagatgatctactggacagatgtgaccacccagggcagcatgatccgaaggatgcaccttaacgggagcaatgtgcaggtgaggcgggcggccctcggcgaccaacactggcccgcctcagatgactgttttcagatcgtctctccttcccgccccaccaacccaaattgcttccttctcactccactagtcactatatgactgcttgttctagctgctcactctcctctgggcccagacagcaaggactgggagattcctcttgcccttcccctcgctgccagcctcatgtctccttaatcatcaggaagttccctgtgaggtctggccaagcactgtgaggcttggggcgtggtcccattcacctagagccccctctcctagagcctctgctgacacctacacagtgtcaggcccaggactgggcattttacttccatggttctcccaccagagctgtcagagggagctctaccccattttacacgaggggaggctgagcctcacagaggcttgcaggtcctcccccaggtcacccagagctctccctcccctgccccttcctgcaggtcctacaccgtacaggcctcagcaac

SEQ ID NO: 6075 - DNA, 6000 bp, Homo sapiens
cacctgtaatcctatcactttgggaggcaaggcaggaggatcacttgtttccaggagtttaagaccagcctgggcaacatagtgagacccctttctctacaaaaaataaacaaaattagctgggcatggaggcacatgcctgtagtcccagctactcagaaggctgaggtgagaggttgagcccaggaggttgaggctgcagtgagctgtgagctcgccactgcactccagcctgggtgacagaataagaccttgtctcaaaagaaaaaaaaagtttaaaaaaaactacagaccaaactcttcctgcaggcctcatctgacccatggaccactagattacagcctctgccttatagagttagggcacattcccaccctagtaggagaagactggacagcgttgagtgcccaccttgagccctgccctgagagggaggacagagaaggccacaggaagcttgggaaatagtaattgcgtctccagggctatctctgtgaaggggagggtgaggggcacaggtgatatcccttagggttctgagaaggggcctctggaggctgtgtggtgtggtgagaagagctccctgccgctcccagataagctgggcaaatttggacaagttgcttcccctgagcctgggcatcctcctttatgaaatgagctgaggtatgtgaggcctggcgtggaggagcagggtgtcactattggtagcagttgttaactatggtatgagctggatggtctgggaccattcaggaggagttgtgtttagactgcaggtaaatggacaggagggagggtcttccagtggggatggcatggtccggagaatgctgtcgtcaagacttagagggtgaaactgagcacttccgtagggtgacagtggggccaggtggagccgttcagaccgagggaaaggctcgtgcagggacagtggggaatgaggctgtcctcaaagggggcagatgatgacagcaggtgtaaatcgtgagaggcttgatttgggaggcactgggaacctttgaaggatttccaagccggaaggtgctgtgatgtaggaggtgatttcggaacacagccctagaggaagattagattgagaagaggttcaggggccccaagaaaggaaaatcagttcagagactgctgctgaaagtcccggcatgagatgagagcatcagctgggtccagggtagggaagggggaggagcggggtgtctgtggcagcatgagtgtatgagtgtggggctccaccaggcagtgctcctgctcctctcctggcctcctgagtcagatctcaggacagcagccagagtgatcctgacaacataagtcagatcatgccctggccctgccctccagcctgtactggctccctgcacccttggaacaaatgccaagcccctctgcacggcctgcagggcccccacccctacccctctgacctgcattcctgccctcccctccccctgcactctactccagctgtggcgttttcttttttctttttttttttttttgagatggagtctccctctgtcgctcaggctggagtacagtggcgtgatctcggctcactgcaagctctgcctcccgggcagctgtggcgttttcttttctttcttttttttttgagatggagtctctctgtcgcccaggctggagtgcagtggcgcaatctcagctcactgcaagctccgcctcccagttcacgccattctcctgcctcagcctcccaagtagctgggactacaggtgcctgccaccacgcctggctaattttttgtatttttagtagagacagggtttcaccatgttagccaggatggtctcgatctcccgacctcgtgatccgcccgccttggcatcccaaagtgctgggattacaggcgtgagccaccgcgcctggcctgtgtgctgttttctgaagtgctggcgtagtcctatctcggagatgagactttgcagcggctgttccccttgcctggagtgtgcctccagggatcctctgggctcactcgctcttcatgcaggcctctgctcagattccttctgcccagaggtcttccctgaccatcttacctgacagatcacccccatccctctcagcttctacccagctttatctccatagctttatcaatacctgaaattacagtctagatttatgggttatgtcttgtctctcttccccattagaacctaagctccatgagggtagggactttgtctggttcagtgctggccccaggacagcgcctggcacacaggaggcactcagtaaacatttgtggcatgaatgaatgaaatagaggctaaggaggtgggcatttgggctcaggccttagcaaattgcttctccagctgagatctccggtgtcaatggggggattagatgaggtgattgtggggcccttggaggtgtgatgcctcctgactctactactgagttggtgcttccaaggagtgtcagcaaagcttggcagactctccaggcctgcctctgctcatatccccaggctgggcttaccggggtggcagggcacagggatgaggagggctgacctgggcaacccctccctcctgaggccctccactgtccctctgcagccacgaggccccctggtggctgccacactgatgagttccagtgccggctggatggactatgcatccccctgcggtggcgctgcgatggggacactgactgcatggactccagcgatgagaagagctgtgagggagtgacccacgtctgcgatcccagtgtcaagtttggctgcaaggactcaggtgaagaggatggttggagggcgtctggaacagcacaatgtgggcaggaggagaccgtgttgagagcagagtagcggcaaaggggatggcactgtgctgtgtggagtggtgctggggacagtgcaaggcaaaaggcagtccagaggaagcttgtgtgtcatgggtgggggaaggcatgaagggccagagcctgcacagaggacctgagaagccaaaaccctaccagagttgagcttcagcacctcctgctgcagattcctgccttgtttgttgcctatgtgaatttgacccaaaaagcctcggggttcctcgtggaccccacagcgttgcaatcctgaccctattagagaagcccacagggtctggaaggaagggcagggggagccccagtccccgggcctgggccctcatagtgcacctgtccctcagctcggtgcatcagcaaagcgtgggtgtgtgatggcgacaatgactgtgaggataactcggacgaggagaactgcgagtccctggcctgcaggccaccctcgcacccttgtgccaacaacacctcagtctgcctgccccctgacaagctgtgtgatggcaacgacgactgtggcgacggctcagatgagggcgagctctgcggtgaggcctggtcccaggagaagggtagggagggtggctgggtaggagtctgggccaaggacagtctttgggggacctgagtctaggagagagcagctctggcagccgggcaggcgagcagcacccagagtggtcaccagcagcctgtgtggacctggcgctccccatggcgctgtgctgagtgagccacgccattagagcagtttatccacaaggcatccctgggggccaggtgctctgttttctccgtttgacagatgggagcactgaggcatggaggggttccatagtggtcccccagacttgggccaaggtagtacagctcctaaactgctgtggagactcagaccccttgcccacatgcataccacagagagatgcggagtgctcttgtggagacaaaggcaccagggttgactgctgatggtcagggcaggcttcctggaggatgtggggattgcatggggttcccaaggacaggcagtacttgcagagtgagtgagaaggcatgggggcaggcgcggtggctcacacctgtcattccagcactttgggaggctgaggcgggcagatcacttgagctcaggaatttgagatcagcctggccaacatggtgaaaccctgtctctgctaaaaatacaaaaattagccggacatgtctgcagtcccagctacttgggaggcagaggcaggagactcgcttgaacctgggaggcggaggttgcagtgagccaacatcctgccactgcactccagcctgggcgacagagcaagaccccatcccaaacaaacaaacaggcaaggggaggagggtgcccattcaagaccaaaagagatgaggttgggggagtccaggagtcagggaggaccatgtggtgtgacttggggatgaggagcagagcagccttatctggtcctcttagccaggcagagcccccagttccttggaagggaggagtggaagataaggccacagggactggctgggagaactgccgacaggctatcagtcaggctggcagtttccagggtgtgccagaggaccaagggtggtataggccctgctgcaccccaccccaaacccctccaaatcaggagagatcagcacaaggggactggacctaaggacctcccagggtccctcccagggaggcaaaaagctggggcccccgccctgggcccaagaaggcaggaacatatcgagaccagacagagatattgaggggtgctccctgtgggaaggggaggtatggtgccagctggtgggtgcaagggtcccaactctggtcctgagggagcccaggaagtcctgggctgaagctcagcctgaagctcagcaggaatggagacgaatggggccgtgggcagggcacaaggacttggtccaggctgcccaggacttggggcccagcagggccgtggtcttgcctcctctcagcttctgaccctgggtctgttccatgcctgcccctcccctagaccagtgctctctgaataacggtggctgcagccacaactgctcagtggcacctggcgaaggcattgtgtgttcctgccctctgggcatggagctggggcccgacaaccacacctgccagatccagagctactgtgccaagcatctcaaatgcagccaaaagtgcgaccagaacaagttcagcgtgaagtgctcctgctacgagggctgggtcctggaacctgacggcgagagctgccgcagcctgggtgagacaacagtgaggtgtggtggggcaggccgaggcaggcctctgagctgcagtgggttgggcttggtggccaggtgccaaaggctgagttttccaccctagcccccagtgcccggaccagcagagacctgcctgcgccaggacgggtggcacacaggcagctagccccttgctgaccccatcacatccctcccatcccagaccccttcaagccgttcatcattttctccaaccgccatgaaatccggcgcatcgatcttcacaaaggagactacagcgtcctggtgcccggcctgcgcaacaccatcgccctggacttccacctcagccagagcgccctctactggaccgacgtggtggaggacaagatctaccgcgggaagctgctggacaacggaggtgaccaccgattgctgccaggcaggatgcacacaggcggagcgctcaggcgctaggggccacaggtcccatccaagtggccccaaagcagaggcttggctcccccatcccccacacttctgttcattgggttagattttgctgtgggtctccatgcctgacgccccgtaattatcgtcagcagaactgccagcctgataattaacaaaatgatcagccttacctttgaatggcctggagctctgctccccagatctagaattgcaggcttgaaagaaaaaagccacttaggagtggcgtacctgaacgctgctttctgtcccaggcagcgtggtgcaccccagacttccttcagtcacacacaatagtgagtgcccactgtacacactgggcagtgggcatgcagcagtgatcaaaacaggctgttttcagttgtgtggtcaaggaagg

SEQ ID NO: 6076 - DNA, 6000 bp, Homo sapiens
ctgaggcctggagtccttgtgcccaccctcctgggcctgtctccccctgtccttcccagcccctcggccctgctccgagagtgagttctcctgtgccaacggccgctgcatcgcggggcgctggaaatgcgatggagaccacgactgcgcggacggctcggacgaggtgggcagggagatgagaaggaagcagatggcctcagaggagttcaggcagggcttggggagtgccgagaggtgaccggctgcctgtgcccatgcccacagaaagactgcaccccccgctgtgacatggaccagttccagtgcaagagcggccactgcatccccctgcgctggcgctgtgacgcagacgccgactgcatggacggcagcgacgaggaggcctgcggcactggcggtgcgccccttggcttggtctccctgggtcctccctctgctgcccaccccgccacatggcccagtcattcactcattctttctcttctgtattcattcttcatgcaacaaatatttattaagcatttaccatgtaccaggcactgccataggtgttagggacgtagtagtaaacaagacacagggcccctgaatacacatttttgtgcgggttgtgcccagctcaatgccccctagtctaggggaccagttgagctgaaatccagcaaaccctgagggctgtgcccatctaggccccaccccacaagtccctccgagacagtctgctgccacaagaagaaaagccctgcctattttcccttcctgggggcagtgagacagtgcctgtccctcgctgacctgcctgggctctgcagtacagagggggcaggtgaagcccgggatgagaaaagactgggccttggagcggaaatcccaactgtgcgggcagatgtcttggctctgccttggtaggccaggcacagggatgggaacccggtcttccattcccagcccagtgctgttcccgcgtccccgctgtggaactacacagcccagtgctgttcccacgtccccgctgtggaactacacagcacagtgccctgccacataccagagaaggagtgccctctgaactcctccagacacccctgaaaaatggcctcttctcccctaaataccagagggggcagtttggccccaccaagtagaaatttaagagacctggttccaatttggctgtgccactgcttgcctggtgacccctctgagcctggaacccccacctgtggagacaggggtctgggtgggctcatggctcattctatctcttggctccccctggcaccagtgcggacctgccccctggacgagttccagtgcaacaacaccttgtgcaagccgctggcctggaagtgcgatggcgaggatgactgtggggacaactcagatgagaaccccgaggagtgtggtgagatttggggcggggctcccaggcttcccagtggccagcaaccacccccactcccaagactaattctggctctgtgtccccctggctgctgcagcccggttcgtgtgccctcccaaccggcccttccgttgcaagaatgaccgcgtctgtctgtggatcgggcgccaatgcgatggcacggacaactgtggggatgggactgatgaagaggactgtggtgagcagggggccgacgagaggcctgcaggggacgggtagtgcacagtggggtgagtctggtcctcgtgggagctgcactggggttagggttaaccaggaggactcgcccaggaaggggaggatccattgctaggagcctgggggcttttcgttaggaaagagaagcccctggggaaggctctgggggctgcctgatgccttaggtcttggaggtggggctgggaacccaaatgtttgacctgctccccctgcaagccttgtcacttaggaattgggagccactgttatctatggggttgccgtgggaggaggaggcaggggagaatacccagggcctaaagcctctgccctcctcagagccccccacagcccacaccacccactgcaaagacaagaaggagtttctgtgccggaaccagcgctgcctctcctcctccctgcgctgcaacatgttcgatgactgcggggacggctctgacgaggaggactgcagcatcggtgaggcccggcagcggaccggacgctggtggggagtggggagagccaagccctggcctggggtggctcaagggagggcatccactctctgtcccccacagaccccaagctgaccagctgcgccaccaatgccagcatctgtggggacgaggcacgctgcgtgcgcaccgagaaagcggcctactgtgcctgccgctcgggcttccacaccgtgcccggccagcccggatgccaaggtaggaaagcggggcagagcaggggtggacaccccaactgtggactctcatgaccctccctgtaacccttagacatcaacgagtgcctgcgcttcggcacctgctcccagctctgcaacaacaccaagggcggccacctctgcagctgcgctcggaacttcatgaagacgcacaacacctgcaaggccgaaggtgccggagccaccagagggcagaaaggctgggtggggcagggcgaccaggatatcaaacggggccgacttggaatggaatgtcttcctgcggacatcttgcccagacaagaagccccagactcatagttgcagctgcctgagcacagtgctggcccagcagtgggggcaggtcctggggctggctgactgaaggagtctggggtgtggcagtgctctgaattgcacacacacctcctcacccaccactgccaggacgagagtacactcagacacgcattgcacactcacagtcatgggggcctcacctgcacattccccacatgctttgatgcccaccttgccttccacatgcctgtacacagacattcacacacacccctggcacacacacccccaccatgcactcccatgcacaccctcgtgctccatgccaagcacacacaccccatgtgcctatgcacccccgagcatgtgccaggcagtttgtagcagagagcgtggtgatgccatccagcagccgtgaggaggtggaagtctctgggtctggaggggcagggacagctttctgactgaaaggagcgggtcacagtggatcagctcaggggaggagaggaggaggtccagaggctgaggttggagcctgcaaccctgagcagggagggtaagcagcagcttctggccggagcagatggtcctaccaggagatgggacagtgttcatgtgaaaggagctgagctgggtggggtgcacacctgcatcccacagccccagccctggcctcttgcttctccaggctctgagtaccaggtcctgtacatcgctgatgacaatgagatccgcagcctgttccccggccacccccattcggcttacgagcaggcattccagggtgacgagagtgtccgcattgatgctatggatgtccatgtcaaggctggccgtgtctattggaccaactggcacacgggcaccatctcctaccgcagcctgccacctgctgcgcctcctaccacttccaaccgccaccggcgacagattgaccggggtgtcacccacctcaacgtgagtgcccaacctggcgtggatggagtggaagagctccatagagcaggcggttcagagcaggatttgaaaagggcagtgctggctaggcgcagtggctcacgcctataatcccagcactttgggaggccaaggcgggcagatcacctgagatcaggagtttgagaccagcgtggcaacatggtgaaaccctgtctctactaaaaatacaaaaatttggctgagcgcggtggctcatgcctgtaatcccagcactttgggaggcagaggtgggtggatcacgaggtcaggagatccagaccaacctggctaacacagtgaaaccccgtctctattaaaaaatacaaaaaaattagccgggcatggtggcgggcgcctgtagtcccagctacttgggaagctggggcaggagaatggcatgaacccgggaggcggagcttgcagtgagccgagatcgcgccactgcactccagcctgggcgagagagtgagactcggtctctaaataaataaataaataaataaataaataaataaataaatagagactcggtctctaaataaataaataaataaataaataaaataaaataaaataaaaatacaaagattagccaggcgtggtggcgggcgcctgtaatcccagctactcaggaggctgaagcaggagaatcctttgaacccagaaggtggaagttgcagtgagccgagtgccactcggttgcagtggcaccaaggttgcagaatagcactgcactccagcctggatgatagagcgagactccgtctcaaaaaaaaaaaaaagaaaaagaaaacaaaagggcagtgcgaggggcaaaggttgagagtggggcagggggcagtcttaggattgtgttctgaggcatggccagcgggaagacagagcagtgggaatggtcagcagctggctgtgctgcaggcagcccagggcacagggcatgatgggcaggcagacagccctccggcaccaatcccccatccttgccacttcccactgtgtacgtcttagctacctcatttaacctctttgggtttcactttgtttatcaataaaattaggtgatcatcgccattgcacaggcttcagggagggctcaccagccacgtgtgagagctgcgagtctggcgcataagctccatgccggttgaatctctttaaagccagggtcctggctgtgagcctggggtgacgttccagcaggctggcagagtggtggcggggggataatggcaggaagacaaagcagtggcccctgaacctgtggcttccattcagatttcagggctgaagatgcccagaggcatcgccatcgactgggtggccggaaacgtgtactggaccgactcgggccgagatgtgattgaggtggcgcagatgaagggcgagaaccgcaagacgctcatctcgggcatgattgacgagccccacgccattgtggtggacccactgagggggtgggcaagggccctggggggaggcctctgggctggtggtaggaagcccccgggacagggttgggggctgcacccacatgcgtgcccttccctcccaggccagcctgaggacagagtccttttcagtcccttgggtcttctcggccacccctgcctggccctccccatgctgcctctgcccagggcccccagctgggcctgcttgggcagggatctgacctctgcttggccggctgtcatgcacagccacactctgccctggggaacagctctgccagcgtcggtggctctgaatgagcacactgtggttttagaggaaaagcccctcaacctgctcagaagcagactcccgcctgcttctctgtagaaggacagaatgccctcctcccagtccccagcagtccctgtccccagaccaagaagctggtgtcctgcctgggcctgcctcctctggccctccggcctgcccacactcaccccttctccctccccaggaccatgtactggtcagactggggcaaccaccccaagattgagacggcagcgatggatgggacgcttcgggagacactggtgcaggacaacattcagtggcccacaggtttgtggggcagggtgcaggagggacgggcatggagggggcccggctcgcagagcccagctgctgctgaagtcacacaaaagcaagggatgggatggggcttggactggggcagggcagattggccgtggaggcttttcccgaaagaggtgactgtgagtggcgtatgaacagggtggagctgtcccgggcatggaggcagttctttccaccccgagcctgggttggggaggccaagctctcacagtgctctctctctccccaggcctggccgtggattatcacaatgagcggctgtactggg

SEQ ID NO: 6077 - DNA, 6000 bp, Homo sapiens
tgctgtaaatacagatgaagcttcactcactcacccacctttcacctcctgctgtgtggtccaggtcctaacaggccacagacccgtatcagtctgtggcccatgcattggaaacacctggcccacaggaccaaatatgatctacttatactttgtttccttacctctgtggggaaacattttctgcttttcccttcgttcacatatgttctagctacattgctttcctcctattcctcaaacttctgccttaggaccttggcactggcagcttcttcttacctgcagactcttccctcagatatctgcatagctaattttctccctacttcaaatcattgctcacatgtcaccttttcaatgacacctactatggccatcctatttaaaattgtaaccctttaatccctgggtagtcttagcctgttttactttttcctatagcacttactatcttctaatatataatttattaatttattatttttattgtttgtcttccccttccagaatataggctccatgagggcagggtttgtttgctttgcaaattgatgtattcaaagtggtcagtataatacctaggaatagatggatccctaaaattgaatggatatcatgaaaaaaatcagtaaaatatttttcaaagtaaaagctgcttatgatattttgttattttgttgttaatattgcaaatttttagaatataataatgcagtattcaaatacaagtatcagtgtgcatcccatagacataatttttatatcatctgctgttttggattcttatttattcacttagataattgagttggcagtattagttaagtgcaacaactgttaatgaaatgtctaccatgcaaagcactggaaaaacagatcagtaaaatagcctctgtccttgaagagaattggctcatgggaacaaataattaccatatattataatacatgtagtcaaggaaagtttatataatgtttctaaattgaaagtcagagtagtctcttgggctactctattgattatatcaaaggagccaaatgtcaaccttacaaagtccaattaaataatgttttcaccagcctttatatttcagtaaggccttttatacttgtagaaataagaaaatgtttttgaaactccaagaaaatgattagaagtctactgattttattggttttggctttgttatctgtttgaaggaataattgttagagaggttatccgagacctctgaatatttatagttactgtgagagttcaggttgtaggttttgttagtgaaaaagtcaatcctctcgaaccctgccgctgttttatcaactaaatttatgtagtattctaaatctttttttctttttgaagtaggatatttccctgaccccttcatggaactcctgacaggggtgcctcatttactcagcctgctactctccactcctcatgagagggagtgagtgagtgaacaacgtgggaaatggagtgcatgagcactggaactgggtggccatttcagtgtcagcaggatcaaactccactcacttggacctgctgtgttccaccccttgcaggagggagtgtgtaggtgagcaggtgcaggagtcagagcgagtgcttttgggcactggcaggagcgaactccgtgcaggctctgctgcagcatccaagtggggtgcctgtgactcctgaagccccagagggcatattacagtgctctgttagctctgctgtctgtgggtggcttaagtgttaacaacaattcagtgggccctctgcctttttgcatgagatggctgccttctgccaataagggcaaggggccagtgtgacagccttttgtatccacacttgtggctcccaagctcttgtccagtgtccaggaaaaaaatgaggttacatgaacaaattgaaagatggtaaatgtgggggattttattgccatgaaagtggctcttaaccagaaggggagctgaaaaggggatggggcaggtaggtaatctttccctgaagcccagccttctccgaccggattcttctctgaagttacgccatcaggctctttctgaggtcaagctgcttctctccaacgtccagccatagtccccgacgtccagcagcttctcctctcttcgggctgagtctggggtctttataggcataggatggggttgggcaggacaggtccatgggtggtttaggaaaaggcaacattcgagccggaaaacagggatataagttcttgttttggtctgccgtttcacgcttttcgacttgagggtggggcttttgccagggacctgccgttttctgcctagaatttctctgtcccctgtccctgtcaatttcagcagtgttcacagcatctttaccaggagtagattctatcttcagaaaccactttctttgttcatccataagaagtaagtcctcattcattcaagttttgtcttgagattgcagctattcagttacatcttcagactccacttctaattctagttgtcttgctattttcgccacatcagtagcaacttcctgcactgaggtcttgaaatgcacaaagtcatccgtaagggttggaatcaacttcttccaaattcctgcgaatgttggtattttgacctcctcctgtgactcacaagtgtacttagtgacatttagaatggtgaatcttttccattaggttttcaaactttgcccagatccatcagaggaatcactatctctggcagcttatggccttactgaatgtatttcttaaataataagacatggaagttaaaattactccctgattcatggactgcagaatagatgttgcgttagagatgaaaacaacattaatctttttgtacatctccaccagaacttttgggtgaccaagtgcattgtcagtgagtggtaatattttgaaaggaatattgtttcttagcagtagtctcaacagtgagcttaaaattttagtaaaccatgctgtaaacagatgtgctatcatacaggctttgttgttttatttatagtgcacaggcagagtagttacagcataattcttgaaagggccctagaatttttggaatggtaaatgaacattggcttcaacttcaaaccaccagctgcattagcccctaacaagagagtcagtttgtcctttgcagctttgaagtctggcattgacttctcctctctagatatgaaagtccttaatggcatcttctaatagaaggctatttcatctatattgaaaacctgttgtttagtgtagccatgttcatcaatgatcttagctagatcttttggataacttactgcagtttctccaagtagcacttgctacttcaccttgcattttgatgttatagagatggcttctttccttaaacctcatgaaccaacctctgctggcttgaaacttctcttctgcagctttctcacctctctcagcctgtatagaattgaagagagttagggccttgcctatataattagcctgatcttctatccagaccactcaaacttgctgtatatcagcaataaggctgttttgctttcttatttgtgtgttcattggaataggacttttaatttcttccaagaacttttactttgcattcacaacatggctgtttggtgtaagaggccatgcttctggcttttgacatgccttcctcactaagcttaatcatttttagcttttgatttaaagtgaaatatgtgggtcttccttttacttgaacacttagaggcctttgtagtgttattaattggactaatttcaatattattgtgactgatggaatagagaagagccgggagaaagagaaaatgggagaatggcagatgggtggaacagtcaaaacctcctacatttatcagttcagttacttgttttatatggctgcagtttgtggtgccccaaaatgattacaatagtaatatcaaggattattgatcacagattgctgaacagatactttaatgaaaagggttgaaatatttgagagttaccaaactatgacacagagacacaaagtgagcacatgctgttggaaaagtaccgatagacttacttgctgcaaggctgtcaccaaccttcattttgtaaaaaaggcagtatctctttgtgcagtaaagcgaaacacaataaaacaaggcatgcctgtagatatacatattcatggtaaaaatggaaatatacagaagcaaagagtatcttatatatataaaatgttccatcactcacatttcccaccttatgtgttgtgatcctctttccagtttagtatatatagatctacttcattttttaaaattgctgcatgatattctattgtatgtctgtaatataatttaaggaagcttctagccatcaacatttaagttgtttctagtttttttcatcagatttattactgtgttggaattgtttatatatttctgggcatttgtatatctgtgggaaaatttctagtcttgaaattgctggattaaaacatacatatttttaattgtccttcaaaaaattgtcctgatttatattctcataacaaaagtacatgagaatatctgtttccccacattctctcccatgatggattttagcatactttttagtttttaccaatgtaataatgaaaaactaatttatttcattagttgtaagtagatttatgcatcctttcaaattttaggcagtctcatgtttaaccttgctcttactatttttcttcacttggaatatttttttcttctttcatttttctctgaacctttaccattcttcaagcccatgtcaattttttttttaattattgaatttccaaataacctcagactaaaatgatttttcccttctaacaaactcaatgctttatttctacttgtcacagttttataccagtcctaataaatatcattttcttattttaggatttgcagatttacagaatggctgcacattaatggaaagagaagcataaacctatcttctttcattatggagggaggtttggcagatggagaacctgatcgaacttcggtgagtagttcatatatgacataggttctatcatctgtaactgtgaagtgtttgatgtaagctagggttttgtttttaaaatatattaacaacaaacttttaaaaagtatttttaaaataatgctttaactccttgagaattacagatactttaaatgatatgaaaattacagatagctagctaggcatggtggctcacacctgtaatcctagaactttgggaggccgagatgggtggattacctgagctcaggagttcaagaccagcctgggcaacaatggcgaaaccctgtctctattaaaaatacaaaaattagccaggtgtggtggcacatgcctgtagtcccagttacttgggaggctgaggcacgagaattgcttgaacttgggaggtggaggttgcagtaagccaagatagcgcctctgcactccagcctgggcgacaaagtcagactcggtctctaaaaaaaaaaaaaaaaaaaaaaaaatgaaaattgcaaatagcttaaagtttgttggagcacaccagttttctgatatttctgctccatcctcctcctcttattttatctatccttccagccatatagtgaaagacatactgatagaataatttgttttctcccaaaacctctttgtcttaagtgaaatcaagagaatgttaacatttgaggaaattaaatgcctccaaatctcaaatcacatgcagctatgagtaatagtgggaatgaaacagttaaaataagagcaattgccacatatattctttttataaaaatataaagatttaataaacatttctaccctgtgatcataattgaattctgaaattaaacaagtagtgggtagcaggaaaagtataccttacctaatacattaaaacaaaatcactagtaggatggactaaatgatgatttgtcatttttttctcactgtacaaaaagattttactccagaataattt

SEQ ID NO: 6078 - DNA, 6000 bp, Homo sapiens
cctaattccttgaccagcaggtgcttgcagggtccttcagttgcccctcagcctccccagagccctagcttagtgcctgttctcaccatctgctcccttccctggatccccagccctgggccagactccccggcagtgactcccccttttccaggcctggctattgacttccctgaaagcaaactctactggatcagctccgggaaccataccatcaaccgctgcaacctggatgggagtgggctggaggtcatcgatgccatgcggagccagctgggcaaggccaccgccctggccatcatgggtgagggctgctgggcgaagcagagatgacgcagagcaggccaggccagacctactgggagacaggggctggcttggggcagtctctcaccatgtggggcgggcctgatgacttagggccaatgggcccttcaggagagctgggtgtggggccttcccaagggtctcatcccctcctgctgccccaggggacaagctgtggtgggctgatcaggtgtcggaaaagatgggcacatgcagcaaggctgacggctcgggctccgtggtccttcggaacagcaccaccctggtgatgcacatgaaggtctatgacgagagcatccagctgggtaggtgcgaggccgggcggccgctgggggctcaggggcaacaggggagccgtccagagctgcaggctgcagggccatggggcaagggagtaagtgggttaggctgtacccaccacccaaaggggctccttgtttccttaccacaaaggcgccttgtaggctcccagcagccctgttcacaaggccaggggcccaggaggacagaaaacctgagagctgggtagggtggtgacccccattaggtccagggtagtcagtgaccatcctgtttctgagcagcccaagcctgaccctgaggtcccaaggagggccacctaaccctttccctctgcctcccacctgcccccagaccataagggcaccaacccctgcagtgtcaacaacggtgactgctcccagctctgcctgcccacgtcagagacgacccgctcctgcatgtgcacagccggctatagcctccggagtggccagcaggcctgcgagggtcagtgcctggctttcctcccagccttgtcccagctccccaaccctgacccctcctaccctacagccccaccttcctcttcttaccttggggacaagactacattcgtcgtgtaggggacactggactatgaagtggctatgactctccagtgcctccagtaggattttggaaaaatagatgtcagcaggcagatcggggcagctgcatggaagaggcatgctctgagctgggttttctaggacaagtaggatttggatgcattgttcaaaggagagggaactatacacaaggcaaggtgtgtgcaggagccccagccaagagtggtgggcaaagtgtggggaagtcctggagataaggctgtgagctaggcggggctcctgtgttctgagccaggagtgcctggaaagtgatgtttggggaagatcaacctggccgcaatggtggtggggaagaaacagaggcggttaaaccagttaggaggccattaggagtaatcagagtgtgagatgatgggcctgggctgggctcagtaagggttgaagaaaagaaatgaaacccagacgcatttcacaagaacctgctaactgatttatgagcttgctgggggacagcatttcccaaaagtgcattcctaggagcctccctctttgatgtgggtagattttaccaaaagaaactctgagttgaacaaagtttaaaagtgttttgtgctgcagaacttctcagagccttgaatatgtttatgtgtgccaagaatttttcaagcgtttggggttttccaaaactcacttgaccattcatttttttttcactgagtctgagcaaccagggaccatgtggggattcactttgggatgtgctgtatcaaagggataaaggcaagggaggattctgaggtgcatgggtagtggtgcctcaagacatgggaaaactgggccaggcgcagtggctcaagcctgtaatcccagcactttgggaggctgaggccggccgatcacttgaggtcagaagtttgagactagcttggccaacatggcaaaactccgtctctactaaaaccacaaaaattagctgggcgtggtggtgggcacctgtaatcccagctactcagaagacctaggcaggagaatcacttgaaccgggaaggttcaagggttgcagtgggccaatattgtgccactgaactccagcctgggcgacagatcaggactccatctcaattaaaaaaaaaaaaaaaaaagagccaggtgcgtggctcatgcctgtgatcccagcactttgggaggctaaagagggcggattaccttgaggccggggttcaagaccagcctgaccaacacggagaaaccctgtctctactaaaaatacaaaattagccgggcatggtggtgcatgcctgtaatcccagctactcggaaggctgaggcaggagaatcacttgaacctgggacgcggaggttgtggtgagccgagatcgcgtcattgtactgcagcctggggaacaagagtgaaattccgtctcaaaaaaaacaaacaaagaaaaacaaaagaaaagaaaagaaaaagaaatgggataactgggaatgagactggcttcggagtgaccttagggggttgagtttttgatgttggagagagggtgtggcatagaccagacagagggaggacaaagaggaaactaggatcaggctgagcaccaaactggaagtctagattttggagtcacctagtcctgattgtctggtctgaactcccagactttccctaaggaacttgcaggggtgcagggttgggttgtgctgggtggaggccggcagagcacagggtgagaaatccgagtctctgctgccctctcatggtggctaggggtcctgcaggtggttccccagagctaccagccaggtgcgcttcctcccggcccatgctctggcctcaggctagggtgtgtgtgctgggtggaggatagggatgatggtggggggggatgatatcaaaggagaagcagagaacagttggagggtgacaggaaccaagtttaagggagtgttggcgatacccatgccttaagtttccttgtctttcaggcgtaggttcctttctcctgtactctgtgcatgagggaatcaggggaattcccctggatcccaatgacaagtcagatgccctggtcccagtgtccgggacctcgctggctgtcggcatcgacttccacgctggtgagccatttggtggcagagggagttgggcgtggcgtaggagctttaggggtggtgtggtgtgccctgagggtccagtgagaggctgcctgaattggcctgaggtggggcacttgctacagctgccaccctgactccacctccccttcaagcacctggcccctccggcactctctcacctctgtcttgagccttgtgagattttgacccctcaccttacccctgccttattgggcatccccatgtcacctcctccacctccagaaaatgacaccatctactgggtggacatgggcctgagcacgatcagccgggccaagcgggaccagacgtggcgtgaagacgtggtgaccaatggcattggccgtgtggagggcattgcagtggactggatcgcaggtgagcagtgggcaggtttgtggggcttggggtgtggcagaggactgggggacgaagtgagaggaggagttggcgggagcaggaagaggagctgtaggggtgcctgggagcttggagacaccaggtccacctgtcctcacctaacctccctgagccccaccaactccctccttaggcaacatctactggacagaccagggctttgatgtcatcgaggtcgcccggctcaatggctccttccgctacgtggtgatctcccagggtctagacaagccccgggccatcaccgtccacccggagaaagggtgaggagctggaaagactggccttgtcattctgcccatggcccatgctgatgaggccctgtctcctccagggtctgaggactgacccccacttccacccccaccctacaggtacttgttctggactgagtggggtcagtatccgcgtattgagcggtctcggctagatggcacggagcgtgtggtgctggtcaacgtcagcatcagctggcccaacggcatctcagtggactaccaggttcgcacgccaacttggccttggatccgatggtagacccctgacccaggctcctgttccctgtgatgagcccattctgggaggacttggagcccaggggaagtcacagggtctcccagcccagccctccacccagagtaggactcctgctaccacagagatgatgggcaggggtcgctcagaagtggggagtgggggagtggagagatgcctggaggtcaccttatcagcagggcagtgggcaggagtgtatgcaggaggcaggagtgagttaggggaggctgaactgagggcctcactctggcccaggcactccctgctgccccagacatggggctggcagcgagctcagccctggaggtgaggtgggtgcctctggcctgtaggatgggaagctgtactggtgcgatgcacggacagacaagattgaacggatcgacctggagacaggtgagaaccgcgaggtggttctgtccagcaacaacatggacatgttttcagtgtctgtgtttgaggatttcatctactggagtgacaggtgagggcttctgtcctggcctcctcagctgatctcttccttccctcctgcctccactgatgccctgcttgtgccctgtccttccctcaggactcatgccaacggctctatcaagcgcgggagcaaagacaatgccacagactccgtgcccctgcgaaccggcatcggcgtccagcttaaagacatcaaagtcttcaaccgggaccggcagaaaggtgaggctggggctctgggctggggtggagaggtgagggggactctggcctgggagagtgctccccagggaacccagtgtgagagggctgggagacaagttagacccatggggcaacttccgatggcccgagagacccagggatggggaggaaaggctgaggtgctctgggacagatcttggcattggactctgggccctggagggtcattcaagctgggaataccgaggcagagggcagagctttcgccaaagcctggatgacaaaggcaccagtgagcctttcccaaggcaggccctgccctctgtaccctcccctcccccaggcaccaacgtgtgcgcggtggccaatggcgggtgccagcagctgtgcctgtaccggggccgtgggcagcgggcctgcgcctgtgcccacgggatgctggctgaagacggagcatcgtgccgcgagtatgccggctacctgctctactcagagcgcaccattctcaagagtatccacctgtcggatgagcgcaacctcaatgcgcccgtgcagcccttcgaggaccctgagcacatgaagaacgtcatcgccctggcctttgactaccgggcaggcacctctccgggcacccccaatcgcatcttcttcagcgacatccactttgggaacatccaacagatcaacgacgatggctccaggaggatcaccattgtggaaagtgagcccagaccctaagtcttcccaggaagtgggacatggggcggggagcagcacagactcttagaccccagccaggcactctaccctaggtctgaatcccagcagctacaactcagctgaatccaactgcacccccgcagttacatgactcctgatttggagtcagcgtcagcccccgacttcctcccgccactggtcctagttctgccttcagagctgcacagaacaagcgagaggtctctgtggagcccaacgctcacaaacc

SEQ ID NO: 6079 - DNA, 6000 bp, Homo sapiens
agaagaaagataccatttacatcagtgttttctaatttggaccatggtctcttgtaagaaatacattttatatcactacccaaaacatagtaaataattatgtaaaagcctaaaacaacatgaaacaacttgccttttaatgtcagagtaggatgcactttgatattttctatcctgacctatttaatttttagaagcactgtttgtgacccaccaaactgatttttcaacttaacaatgtgtggtgacttgtatcctgaaaaacacttttaaataagtatatgtttatccatagaccagaatctgtttctaacataaatacctcacataacttaaaactatcatgatgatcttgcaatgttgatgctcttttgtccttagtattactttaaaattacaaaaatctgtagtgattataagtaattctgaaattaaattgaaatcacaaaggtatatataatgttttaaaaatacatctttagctttttagaataatctagattttgattttgaaggaacagttgccattaaaatttttagtagtttttttttaattattgaagaaaagagtatttgtgtttcccttgtgaaattagtctatagcagttacatcttgtcttcagattattgtaatatagtggttttcttttaattatagatgtgaaatgtaatgttattattttattactactttacatttatgtaacataaatgatcaaattgatcaaaacaatacacatatacacatatgtgcgagtatacatatataatttcatcctcataagtctatgatgtataggcaaggtaggttgtagagaataattgaacagatttaggatccagaaatattctatcatataatgttgtttccactgcttctcttgaaataatacttttttagtttgccaagtagtttctcaggcattttgagcttaccaagtattttaaaacctttaacgtaaagaatgttaatggaagctttatgaagttggtgtaactatggtacatctttggctaaaccacatttattttaccaccattcagatgaagtaggaaagatggccttcttatttgaatttctaaataattaaacaccggtgattacatcttgtgggagaaggagtgcagatgactggtttgagttaggattactcaaagagtagaaggaaggataaagtggtaacaggtggctaacagggaagggaaaataaatcctgctattatggtatttagtaatattttgtttttcttatctgccttttctgaactgttgaattaagatcctggacataataatagcttacaatgaaatgttttctatgtatccagcaacaatctgagaactttgttttaagaaaaaaacatttacatgtatatgtactgtgaaatgtttcatgcagtctgaagagtacataaaatgcatttacagttaatataataataaaaccaatacttacgtacccagcataccaggtttagaagaaatcattgctagtactttagaagttcttatatgtatctcctgatccttatctcttcccctttacatgccttctacgtgctccaggtaaccagaatcctcacttttttgtgccttttctttttttctggtaatgttaccatcatgtatgcatatctagacaatttatggttatttctttaaacactgttgagagtgtgtttgaagaaaaacttcagacaaattaaatttaacagagtgtatttgagtgagaacgattcatggattgggcaacactcaaaaccagaagaggtccagagagcaccactctgaaacataagcagtgaatatttatagacagaactcagaaatacagaagtagcatgattggctacagctgggcttctgccttatttgaacatgatctgattagtttgttgcctgtgattgtctgaagctcagctgctgtgattggctgagatcagcctatttgttacaaatattagactcctaagttagatttctgttcatttacataccaaagttagcttgcagttcattattaggaactaaaaatacagagacagcctcaggccattggcctcctgcttatttaacagtagcaagcccaaacctagttgggtaaggaaagggcaacattgctggaagataaactgagcaagagtctctgagccagagtttggttatgatttctttgagagtttaacaactgaagaaagcattcggcaagataattagtgggtcttgggaaacacaagattcattattgcttgtggtttaattactggatacctggcaggaatatgaccaggagaggtatattctgcttttttagttcaccatgttcaaccaggattaggtaaaaagtagaatgcttcattgttttggaagtattctcagctgatccaaacatcagcttgaaggaacagagaagaagttttatcagcatacagtcagacagacaagccagtgtcaacaaagaacttgggcaaagctcacccaagcagtttgcccatgtgtcaaaaaagatggtgcagtggcagggggactttttggtaatgacacctcttttatattggatgtcctgtttctgtaccccatgcattcttgatttatcacattttggtacagttttatcttccagtacagcctttcttaactggagtctcatgacagaagtaagtcctataggaatattttctctgtttctcaaagatatagtgcattgttggaaatattatagatgcatgggagataaatttaattcatcttgaacagtggatgccttagtacattaggcttaattctattgcagaaccccagctgagaagggctactgtagtaaattattttaaatggtacatagaaaataaaattttgagaccttgcatgtctaaagatatctttattttactctaatatgtaattgatagtttggctgggtatggaattctaaattgaaacttgttttctttcatattttgaagattttggttattttttggcctgcttccagtattgttgttgacgtaaatagcctatctgattcatgatccagaggaacttggtgctgtgaattatgtgcaaaagggttatttggtgtaaataaggttgactttcagtttttattactgctgttgtgatttggctttcttggatctgcaagaccatgactacttgttcatctcgagctttgcagtgtcaaatttatgttgttaatatatcctctcctggatatgtacttttgggatatatatagatatttgtttatttttttaaaataccccttttcttgattttacttgagttttaggagggaacgcatttgttcagtatcttcattttgccattttaacctagactcttttaagactttgtgtatcatctgatttaatcctcataacaatcctataatatcagtactactattagcattgtatacgtgagaaaacaaagactcagagaaattaaactgtttaagtatttctaggaaagataaaacagagatttgaatgcagtttaatttcaaatcctgcttaactattatactagcataatgctgtttgtgatgttctttatgcctttaaaggcaagcaccattacatgaattataattatttgttgtctacagttaataataatgtacattttatgatatggagaaaagcaaaaaataataataaccaaaccaacccctaaaacccacaaacttgttgcagttatgggtattagtggtaaacttattctccattaattgattttgaaatgcctttgcccaagaaagaatatgtcacatacaagaaattgagttttgcctggtgcggtggctcacacctacaatcctagcactttgggataccaaggtgggtggatcacctgaggtcaggagtttgagaccagtctgcccaacatggcgaaaccccatctctactaaaaatacaaaaattagccaggcatggtggcaggtgcctgtagttccagctacttgggaggctgaggcaggagaatcacttgaacccgagaggtagaggtggcagcgagctgagattttgccactgcactctagcctgggcgacagtgagactccatctcaaaaaaaacccaaaaaacaaaaaagaaattgagttttgctttttcatgtgttctttctagtaaggacaaagtcttagattatatgagatgttgtgcatgaatagagaaccagcgttgaagtgaatgcataataaggaaggatactgagatcttatggtaagatacctataaaaatgagccactaataaattttaacctagatggttattgtccagctgagtgggtgtattttcagattgaaagaaagaattataaccaaaaaaatcaatctacggcatatatagagagcatctgactagagcttttaaatctgaattaaggtagggtaaggtatatggattttagtataattgggagagaattctttggaattttaaagattaggtataaacagatggtacctgttagatttaatgacgtggagtcaatactggtcacttagttttaaacatagtacatttgtcactgtgataataaagttgcttttaaaaaaaattttttttaagcaggaaagactcattgatagactgaacagtttagatgtaatgaaactgttcaaattaaattttgaacagtttaaatgtaattaagaggaacagtagcagctcatattttcttcaaggaacatgttagagcatacagcattatggtgtcgttttaatctcctctgttgattggtttgcgctaacactgtcttaatgactcatatatccctgctggaggcaaaacttaaatgtttattctctgctttaactgttggaatccatcaacgttgtgcttgaaagagtatctttccttatgaatgtttaatcatggctgaggcaagctgtagattagatataaatctagaagcttcagggaagataaaaagcattatgtttatatccatctttgaagtaagtaaaagctgggaaggaaggagtcggaagaggtgggaagtgtggccggatagtacagaaacataatggatatgataaaaggattgcatttctgagaagagaaaatgactttattgcttcatcttgaattgctaagtattgatcttgttttgttttcctaaagcagcaattcagtgcagggtggtttgataaaaaggtaaaacattagtagaatagcctttcatgtttatcagttcctttttttaaaaaatcagcagcatggtttaatgctttttctgtcaggctttctctatctgtttattgctgatttgacagtctttggtccttctcctttgctgttaaatgtgtgtgttctttgtttgtgctggtgggttttgctacagttggatgtgagagaaaagcctgtctttgccatattggtctaattagcctttgggtgagcatatacattaaatagaccttctgagctatgaaagaagagagctcacaacgtagattttcttcctgtactggggttttgcctgttttatttcctccccggattgatggccgaaagcttgttcggaatgcttcatttggaggatacaatgaactttctccttcattgccaggtttgtgtgtttaatcttgcattcctaatttcttgcagacttttaattaaaataaaccaggcattttaacattttaaagccgctttcatttaaataaaacaattctgtagtgaaagcttaggtttcagtaactgctgctaaacagcttggcttttccatattttctcttagagcctcttcagttaaaacttcagaagtaatgattcagtaaagtaggaatcttgagtgcttacggcataaatttttgctttaattatagaaatattatgaccctttgataaaattaaagcccttctagacttgagataaacacaaaattatataaataaacacattgctctgagggtttaccaaatgaaacccagatattaatattgatatttgttcattttttgcagaatggtaactatattaaagt

SEQ ID NO: 6080 - DNA, 6000 bp, Homo sapiens
ggacctggccgtgtccaccccagccgctctgactctgagcctccctctctggcagctgagttcaagtgccggcccggacagttccagtgctccacaggtatctgcacaaaccctgccttcatctgcgatggcgacaatgactgccaggacaacagtgacgaggccaactgtggtaaggcgctgcccgcccaccctccctccttccccagcatcttccctgccccaggatttggggctttcaagtgcagggaagttgcagcccacggcagcttgctctccaggctggattcctatggctcaagcctgtgtcctccctgctgagggatgggcaccctctccctgcccctgagtcctcccttcgccacgaatcacctcctcctccctccacagacatccacgtctgcttgcccagtcagttcaaatgcaccaacaccaaccgctgtattcccggcatcttccgctgcaatgggcaggacaactgcggagatggggaggatgagagggactgccgtgagtgtcagaggtggtggtgggccggtggtgggagatgacacggaagcagggcaggcagaatctccccacagctttgagaggctctcaaataactttagtagatgggcaacacaaattatattgggtgtaacttgctttgctcataaaaatcatcatgcatgatatagagacatagagatccagaaaacaaaaagcaccaaaactggggataaactgttccttcctccgaagaagttgctggcaggaccaaggccagggcttggaagagagagaagacagtgatggtgaactggagtggcaggtgtaagggagggccctcattctcttgcccaccccacagccgaggtgacctgcgcccccaaccagttccagtgctccattaccaaacggtgcatcccccgggtctgggtctgcgaccgggacaatgactgtgtggatggcagtgatgagcccgccaactgcagtgagttgcctggcctggagcccagcttccctccccagtgtctgctgctcacaccaccccgacgtgtgaccccctcagtggctgctccctcactctccccaccctcccggcacactcctggaaggagtctcatcctcaccccatgcccacccgcttgcagcccagatgacctgtggtgtggacgagttccgctgcaaggattcgggccgctgcatcccagcgcgttggaagtgtgacggagaggatgactgtggggatggctcggatgagcccaaggaagagtgtggtgagccgagaccccactccaggaggaagacagtctacctgggtgggaggcatggcacccctggcaggtggagggctgggggccgcctgcttaccggtctcagcgtggccctgctgctgggcttcctgggcctgctgtggggctggggaaggaggcctggctggagctcacttccccacatccacccgtgccccatgtctcccagtttccctatccctgcccctgcccacgcctcatccacacatacctgtgtggagttttccctgcccaccctatgggatctgttcatctccttcccaaggcagctgcccacacacacacccccaaccatgtctcctgtccccaaacctccttatagaccccacgtctcaaaacaccgcctgggctccccgcggctgacccttcccaagctgggatgcccaccctccctgccaggccagcctgaccatgcctgcttggaccctaatgtctgccccagccctttccctgactgccctgacacttgcctcctccagatgaacgcacctgtgagccataccagttccgctgcaagaacaaccgctgcgtgcccggccgctggcagtgcgactacgacaacgattgcggtgacaactccgatgaagagagctgcagtacgtccccacccacccagccccgcatgagcccctcccaggcctggcccttgtctcgcggccctcctgccacaggccgcgccagagctggtggccacctcccagggtgggggcaggagccgccctcctcacccatcccactccatgtcgtgtatttgagtttgtgccatttcacctcatctcatgtttctctccattttcacactgtcctctcggggttgcagaggtaggtgtctctgatgtgcccgtgctcccaccatacccccacctctgtcccagagccccccatccctgtgctgtgcctctacccatcatccttgattgacctctccccaaaccctggtgcttgtctcagtggtcttgcccccgctcccctccccaaacacagtctgttctgagggcaaggccagggacctgtgtcctctctggtgtctgtcccatggggtaagtgcgagcccgcctgtgcccagctgttccataggagcagccagtgggctctgccaggactggctcggcctctgggtcagtcagctgtggccttcagagacacggggatgggccttgggctcgggactgtggcactactgaggcctggagtccttgtgcccaccctcctgggcctgtctccccctgtccttcccagcccctcggccctgctccgagagtgagttctcctgtgccaacggccgctgcatcgcggggcgctggaaatgcgatggagaccacgactgcgcggacggctcggacgaggtgggcagggagatgagaaggaagcagatggcctcagaggagttcaggcagggcttggggagtgccgagaggtgaccggctgcctgtgcccatgcccacagaaagactgcaccccccgctgtgacatggaccagttccagtgcaagagcggccactgcatccccctgcgctggcgctgtgacgcagacgccgactgcatggacggcagcgacgaggaggcctgcggcactggcggtgcgccccttggcttggtctccctgggtcctccctctgctgcccaccccgccacatggcccagtcattcactcattctttctcttctgtattcattcttcatgcaacaaatatttattaagcatttaccatgtaccaggcactgccataggtgttagggacgtagtagtaaacaagacacagggcccctgaatacacatttttgtgcgggttgtgcccagctcaatgccccctagtctaggggaccagttgagctgaaatccagcaaaccctgagggctgtgcccatctaggccccaccccacaagtccctccgagacagtctgctgccacaagaagaaaagccctgcctattttcccttcctgggggcagtgagacagtgcctgtccctcgctgacctgcctgggctctgcagtacagagggggcaggtgaagcccgggatgagaaaagactgggccttggagcggaaatcccaactgtgcgggcagatgtcttggctctgccttggtaggccaggcacagggatgggaacccggtcttccattcccagcccagtgctgttcccgcgtccccgctgtggaactacacagcccagtgctgttcccacgtccccgctgtggaactacacagcacagtgccctgccacataccagagaaggagtgccctctgaactcctccagacacccctgaaaaatggcctcttctcccctaaataccagagggggcagtttggccccaccaagtagaaatttaagagacctggttccaatttggctgtgccactgcttgcctggtgacccctctgagcctggaacccccacctgtggagacaggggtctgggtgggctcatggctcattctatctcttggctccccctggcaccagtgcggacctgccccctggacgagttccagtgcaacaacaccttgtgcaagccgctggcctggaagtgcgatggcgaggatgactgtggggacaactcagatgagaaccccgaggagtgtggtgagatttggggcggggctcccaggcttcccagtggccagcaaccacccccactcccaagactaattctggctctgtgtccccctggctgctgcagcccggttcgtgtgccctcccaaccggcccttccgttgcaagaatgaccgcgtctgtctgtggatcgggcgccaatgcgatggcacggacaactgtggggatgggactgatgaagaggactgtggtgagcagggggccgacgagaggcctgcaggggacgggtagtgcacagtggggtgagtctggtcctcgtgggagctgcactggggttagggttaaccaggaggactcgcccaggaaggggaggatccattgctaggagcctgggggcttttcgttaggaaagagaagcccctggggaaggctctgggggctgcctgatgccttaggtcttggaggtggggctgggaacccaaatgtttgacctgctccccctgcaagccttgtcacttaggaattgggagccactgttatctatggggttgccgtgggaggaggaggcaggggagaatacccagggcctaaagcctctgccctcctcagagccccccacagcccacaccacccactgcaaagacaagaaggagtttctgtgccggaaccagcgctgcctctcctcctccctgcgctgcaacatgttcgatgactgcggggacggctctgacgaggaggactgcagcatcggtgaggcccggcagcggaccggacgctggtggggagtggggagagccaagccctggcctggggtggctcaagggagggcatccactctctgtcccccacagaccccaagctgaccagctgcgccaccaatgccagcatctgtggggacgaggcacgctgcgtgcgcaccgagaaagcggcctactgtgcctgccgctcgggcttccacaccgtgcccggccagcccggatgccaaggtaggaaagcggggcagagcaggggtggacaccccaactgtggactctcatgaccctccctgtaacccttagacatcaacgagtgcctgcgcttcggcacctgctcccagctctgcaacaacaccaagggcggccacctctgcagctgcgctcggaacttcatgaagacgcacaacacctgcaaggccgaaggtgccggagccaccagagggcagaaaggctgggtggggcagggcgaccaggatatcaaacggggccgacttggaatggaatgtcttcctgcggacatcttgcccagacaagaagccccagactcatagttgcagctgcctgagcacagtgctggcccagcagtgggggcaggtcctggggctggctgactgaaggagtctggggtgtggcagtgctctgaattgcacacacacctcctcacccaccactgccaggacgagagtacactcagacacgcattgcacactcacagtcatgggggcctcacctgcacattccccacatgctttgatgcccaccttgccttccacatgcctgtacacagacattcacacacacccctggcacacacacccccaccatgcactcccatgcacaccctcgtgctccatgccaagcacacacaccccatgtgcctatgcacccccgagcatgtgccaggcagtttgtagcagagagcgtggtgatgccatccagcagccgtgaggaggtggaagtctctgggtctggaggggcagggacagctttctgactgaaaggagcgggtcacagtggatcagctcaggggaggagaggaggaggtccagaggctgaggttggagcctgcaaccctgagcagggagggtaagcagcagcttctggccggagcagatggtcctaccaggagatgggacagtgttcatgtgaaaggagctgagctgggtggggtgcacacctgcatcccacagccccagccctggcctcttgcttctccaggctctgagtaccaggtcctgtacatcgctgatgacaatgagatccgcagcctgttccccggccacccccattcggcttacgagcaggcattccagggtgacgagagtgtccgcattgatgctatggatgtccatgtcaaggctggccgtgtctattggaccaactggcaca

SEQ ID NO: 6081 - DNA, 6000 bp, Homo sapiens
actcctcatgagagggagtgagtgagtgaacaacgtgggaaatggagtgcatgagcactggaactgggtggccatttcagtgtcagcaggatcaaactccactcacttggacctgctgtgttccaccccttgcaggagggagtgtgtaggtgagcaggtgcaggagtcagagcgagtgcttttgggcactggcaggagcgaactccgtgcaggctctgctgcagcatccaagtggggtgcctgtgactcctgaagccccagagggcatattacagtgctctgttagctctgctgtctgtgggtggcttaagtgttaacaacaattcagtgggccctctgcctttttgcatgagatggctgccttctgccaataagggcaaggggccagtgtgacagccttttgtatccacacttgtggctcccaagctcttgtccagtgtccaggaaaaaaatgaggttacatgaacaaattgaaagatggtaaatgtgggggattttattgccatgaaagtggctcttaaccagaaggggagctgaaaaggggatggggcaggtaggtaatctttccctgaagcccagccttctccgaccggattcttctctgaagttacgccatcaggctctttctgaggtcaagctgcttctctccaacgtccagccatagtccccgacgtccagcagcttctcctctcttcgggctgagtctggggtctttataggcataggatggggttgggcaggacaggtccatgggtggtttaggaaaaggcaacattcgagccggaaaacagggatataagttcttgttttggtctgccgtttcacgcttttcgacttgagggtggggcttttgccagggacctgccgttttctgcctagaatttctctgtcccctgtccctgtcaatttcagcagtgttcacagcatctttaccaggagtagattctatcttcagaaaccactttctttgttcatccataagaagtaagtcctcattcattcaagttttgtcttgagattgcagctattcagttacatcttcagactccacttctaattctagttgtcttgctattttcgccacatcagtagcaacttcctgcactgaggtcttgaaatgcacaaagtcatccgtaagggttggaatcaacttcttccaaattcctgcgaatgttggtattttgacctcctcctgtgactcacaagtgtacttagtgacatttagaatggtgaatcttttccattaggttttcaaactttgcccagatccatcagaggaatcactatctctggcagcttatggccttactgaatgtatttcttaaataataagacatggaagttaaaattactccctgattcatggactgcagaatagatgttgcgttagagatgaaaacaacattaatctttttgtacatctccaccagaacttttgggtgaccaagtgcattgtcagtgagtggtaatattttgaaaggaatattgtttcttagcagtagtctcaacagtgagcttaaaattttagtaaaccatgctgtaaacagatgtgctatcatacaggctttgttgttttatttatagtgcacaggcagagtagttacagcataattcttgaaagggccctagaatttttggaatggtaaatgaacattggcttcaacttcaaaccaccagctgcattagcccctaacaagagagtcagtttgtcctttgcagctttgaagtctggcattgacttctcctctctagatatgaaagtccttaatggcatcttctaatagaaggctatttcatctatattgaaaacctgttgtttagtgtagccatgttcatcaatgatcttagctagatcttttggataacttactgcagtttctccaagtagcacttgctacttcaccttgcattttgatgttatagagatggcttctttccttaaacctcatgaaccaacctctgctggcttgaaacttctcttctgcagctttctcacctctctcagcctgtatagaattgaagagagttagggccttgcctatataattagcctgatcttctatccagaccactcaaacttgctgtatatcagcaataaggctgttttgctttcttatttgtgtgttcattggaataggacttttaatttcttccaagaacttttactttgcattcacaacatggctgtttggtgtaagaggccatgcttctggcttttgacatgccttcctcactaagcttaatcatttttagcttttgatttaaagtgaaatatgtgggtcttccttttacttgaacacttagaggcctttgtagtgttattaattggactaatttcaatattattgtgactgatggaatagagaagagccgggagaaagagaaaatgggagaatggcagatgggtggaacagtcaaaacctcctacatttatcagttcagttacttgttttatatggctgcagtttgtggtgccccaaaatgattacaatagtaatatcaaggattattgatcacagattgctgaacagatactttaatgaaaagggttgaaatatttgagagttaccaaactatgacacagagacacaaagtgagcacatgctgttggaaaagtaccgatagacttacttgctgcaaggctgtcaccaaccttcattttgtaaaaaaggcagtatctctttgtgcagtaaagcgaaacacaataaaacaaggcatgcctgtagatatacatattcatggtaaaaatggaaatatacagaagcaaagagtatcttatatatataaaatgttccatcactcacatttcccaccttatgtgttgtgatcctctttccagtttagtatatatagatctacttcattttttaaaattgctgcatgatattctattgtatgtctgtaatataatttaaggaagcttctagccatcaacatttaagttgtttctagtttttttcatcagatttattactgtgttggaattgtttatatatttctgggcatttgtatatctgtgggaaaatttctagtcttgaaattgctggattaaaacatacatatttttaattgtccttcaaaaaattgtcctgatttatattctcataacaaaagtacatgagaatatctgtttccccacattctctcccatgatggattttagcatactttttagtttttaccaatgtaataatgaaaaactaatttatttcattagttgtaagtagatttatgcatcctttcaaattttaggcagtctcatgtttaaccttgctcttactatttttcttcacttggaatatttttttcttctttcatttttctctgaacctttaccattcttcaagcccatgtcaattttttttttaattattgaatttccaaataacctcagactaaaatgatttttcccttctaacaaactcaatgctttatttctacttgtcacagttttataccagtcctaataaatatcattttcttattttaggatttgcagatttacagaatggctgcacattaatggaaagagaagcataaacctatcttctttcattatggagggaggtttggcagatggagaacctgatcgaacttcggtgagtagttcatatatgacataggttctatcatctgtaactgtgaagtgtttgatgtaagctagggttttgtttttaaaatatattaacaacaaacttttaaaaagtatttttaaaataatgctttaactccttgagaattacagatactttaaatgatatgaaaattacagatagctagctaggcatggtggctcacacctgtaatcctagaactttgggaggccgagatgggtggattacctgagctcaggagttcaagaccagcctgggcaacaatggcgaaaccctgtctctattaaaaatacaaaaattagccaggtgtggtggcacatgcctgtagtcccagttacttgggaggctgaggcacgagaattgcttgaacttgggaggtggaggttgcagtaagccaagatagcgcctctgcactccagcctgggcgacaaagtcagactcggtctctaaaaaaaaaaaaaaaaaaaaaaaaatgaaaattgcaaatagcttaaagtttgttggagcacaccagttttctgatatttctgctccatcctcctcctcttattttatctatccttccagccatatagtgaaagacatactgatagaataatttgttttctcccaaaacctctttgtcttaagtgaaatcaagagaatgttaacatttgaggaaattaaatgcctccaaatctcaaatcacatgcagctatgagtaatagtgggaatgaaacagttaaaataagagcaattgccacatatattctttttataaaaatataaagatttaataaacatttctaccctgtgatcataattgaattctgaaattaaacaagtagtgggtagcaggaaaagtataccttacctaatacattaaaacaaaatcactagtaggatggactaaatgatgatttgtcatttttttctcactgtacaaaaagattttactccagaataatttcattttcaattctcttgttgcattttgagtgactccattatatattgatgtatagactcttagaaatatttctgttacctaaagtaaaggtgcccccttcagtaaaatgtagtcagctggtagctttatcattagttaggtggtagattctttaacaaatttacattgttggaataaggtagagcccaacttttatgtcttttatattgctgtggaattgagagtcactattagattgcggtgtttgtaaattttagtttagtgaatgtcctttgttcaggctccagtgtaggaacagtctaatgattgatagcaaaatgcagttttgctgactaatattaacttggtcccagcctttcttgaattcctggttcagtcttgtttggggttcttaaatgatcaaaaaaagttaaactttaaaataaattgttagtagagaagaaaatgggtgtggaaattcttggcttatgaagaaggctgttgtcacattgatttaaatgaaaaacggatggtaagttactttatttttactataatttcagaagaaaagttaatattaagccttgtctgtagaacttaatgtttattttatgataaactttacctttttttatatctaatggacttagattctttcaactcaaatacttttggtcttctagtgatattaaaaatatcagttgctgtttttaagtgtatgctttgttagactgtcctcataacagctattaaaggtagatatttgtttatcctcacttttagaggtagggaaataggctcagagaggttaattatcttctctaagacttcacagcttaagcgatagaactgaaatctgtctgtctctgaatactttactactaagatgttgactacatacctatatttctgaataaagtgtcttaaaatttgttgttacttttcaaagtatgtatccaagtaaatgttattacattttattaccagactcctttggctaaagtaataaagttttagtcatttctggagtgcggtggcgtgatctctgctcaccgcaacctccgcctcctggttcaagcaattctcctacctcagcctcctgagtagctgggattacaggcatgtgccaccatgcttggctaattttttgtatttgtagtagggacagggtttctccatgttggtcaggatggtctcaaactcccaacttcagatgatccacctgcctcagcctcccaaagtgctgggattacaggcatgagctactgcgcccggtcttagtcatttactattccaaattttgttgatattgagaagttaaaagttgtttgaaaagtagtgagaggccgggcacggtgcgtcacacctgtaatcccagcactttgggaggctgaggcgggtggatcacctgaggtcaggagctcgagaccagcctggccagcatgatgaaaccctgtc

SEQ ID NO: 6082 - DNA, 6000 bp, Homo sapiens
attggcccagagcctggaactggaaaagacaaggaaggccagctcggacaggggaagtgctttgagcaaaagcctgaagaaaggcaaattcaaggcagggaggacagagggggacctctgcatgccatagagcataggcaggcctgagcccagccaggaagtgaggtcagggtgcggaggagttaggagcacaagccaggacaggtggcagaaagcacccgggggtgggtgctccccctggagggttcacccgcagtcagcctgctctgttctcccgcaggggcagccctcatcccggctgtttgggcctctagtgagccaccccctcgccttagggatccaggcccacatgttagcaacatttttttcccaattcagcagtgcttggaatgtttttcaaaagctttactaggaaactagtaaacacaacccaaagcagctgtatagatacgtgagtgtcccgaacccagattccccccaccagtcccccaatgtcagtcacctccaacctggctcaaggaccctctgtttcctcctgcctctgtcatctggcacatctgcagctgatgatgaaggtccagtccccccttccatgaccctcggctgcctcacctgtctggggatggcctcagagcctgtccctcatgagtctggagcttccctggagggtccagcaaggctgcctggccctcgtcccagaggacgtgaccccctggctgcccaccaagctcctttcttatgaggccaggggattccatcacgcattcagcgagtggcttttgagggcaaagaaggtgcagaggacccagtggggagcgcgaggggcgtcatgaagagcttcgtggctgtgtgctgaggactggccccacctggaagtcagggaacgtgtccttgaagaggcggcatgttagccagcgtctgaggatggcaggagtggctgggtgggagcatggtcccagtgcccaggagaaagagctgagctggcaggaggggccctccccctggccacaaggagcaggcactttcggggaatcagaaggagccagtgtggaccccagtggagagggcaggggcaagtggagactccaacaacccagcctcctcctgagccctccccgcgtcagcactggagcactgatggccctgtagagctcacagtaggatagttagaaggtccgccatgttcctggacactgagcacctaccccaggaaagcctctctctccctcctgccccattcctgggaagcaggttcacccagaccacagttgtgtcacatggaggagtttgttgacgccaggaggaaaaccacttctcactgcaggtgtgagtagtttcacctgaggtgtaggagttcctggtggggactgacaggccaagtccaatcctgacaagccaggaagatgactggccactgccccaggatacccattttcccttatggaggctagaaggacacgccgcctccctcccaacttacatcccgattccagagccaccgcaaacccctgctctcctccaggatgaggcccttaagatcagagcttctcacgagctcgccgaggctcagggcagccagtgtctccagaggggcagagcagcaccattttcctacgtgagcccagcagaaggcgggatagttcaatggtgctggagacgctgggggtgggcaagaagggtgtgacctggagaggtctgaggagacaagttcacaggccagaggacagatctgtggccagaatggtgaggggcagaggtaggaggaggccagaggcactggggtgggggcgggggcaggtcctgttagggaactggagaacggagctggcttttgtgtggcttggtggtctcagactccactgtgcctaaggatcgcctaggagcaagagaatgtggagtcccctgccccgccctgggcctagctgagtgacaagctctgggaccgaggacccagggctcaccatccaatgccggtggtccaaggaccactctgtcacacccagggtagtgcatgaccagccctgaggccttccacagcccccctccagcctcagcaccaccccacaaggagcacggcataattgggggctggctgttcccattgcctcctttactgagaggaaaccagggctcagaggggcgacaggctcattcaaagttggagccgttacgaggcagaacggtggctccaaccccaaacatgcaaaggcctcaaagtacggagaaggggactcttgagagctgcttgaggataggacccacataccccaggacctgggacacatgccacactcagctccacaagggcttcctgaatgatctggaagacagccagcctccctgcacagaagagagcagttaagaataaactcctgggaaatactcacatagtgtgtgccatctgtccttaagatggagattaacttcttccactctcacatcctgcgaggcaggtggtgctaccatccccacctcatagaggaggaaactgaggcacagggcagttgagtaagttgcctaagggcacctagctggtgggtggtggagccagggctggaaccccagggcctgtctcacttggctgcaccggctctcttctcagcaagtagacggtcactgcccagatactgcaatgtgaatatctcacacttggccctcatcccctcacactcagccacctcgtgtgtgaactgtctgtgcaatagtggggcccttcctgggcattggggcactgctggcctctatggctctggggtggctttgccctggcaggcttccaggttccaggtgcctacgcgtcctggcctgtgccctctgttgtggattctcaggctttgcctcctgatctctggaccctcttcccccagcctcatgttctggaccaactggaatgagcagcatcccagcatcatgcgggcggcgctctcgggagccaatgtcctgacccttatcgagaaggacatccgtacccccaatggcctggccatcgaccaccgtgccgagaagctctacttctctgacgccaccctggacaagatcgagcggtgcgagtatgacggctcccaccgctatgtgagtctgcggggtgggtgagctggcgggcggctgaggggaggccagggccagggtcagccgtcaaccaagaccgtccaggcacagacatggtgggaacagctgggaggaggtgagtgcctccaggccccagcctcggtcaaccccaccctgtccagcttgctcctcatcagctagacgagggagatagcaggatgcctctgcgggccctcattctgtagctgtcagaggccaggccaggctgtggtccggtggagactgggcaagaggcctgagcgatgctgtgacggtgatggtgctgtctccacaggtgatcctaaagtcagagcctgtccaccccttcgggctggccgtgtatggggagcacattttctggactgactgggtgcggcgggcagtgcagcgggccaacaagcacgtgggcagcaacatgaagctgctgcgcgtggacatcccccagcagcccatgggcatcatcgccgtggccaacgacaccaacagctgtgagtggggctgccgccagctgcctcaccctcctgcctgtcgtgcatggacatacaaacacacaccccacacacacatcgcacataccacacgcaccctacacataccacacacacacatcccacacatactacactacacacaccacaccacatacacacaccacacccctcccacacactcaacacatacacaccacaccatacacaccccccacacaccacatacacatacacccccaacacatacacacacatacacaccccacatacacacaccacacatatcacatgcacaccccacatataccacaccacacacataccacacacacaccacacaccacatacacaccacacataccacacacaccccacacataccacatacacacaccaccacacacactacacataccacacacacaccacatacacacaccacatacacacaccacacatgacacatacacaccacacataggacacacatacacatgccacacacctaccacccacaacacacatcacacacacaccacacagcacacacacacaccacacaccacacgtaccacaaacatgccacacacacacacacacatctcacagacatactataaacaccccacaccccacacaccacaccccacacacacttgcctggtcctgctctccctgggcctccattacacagacacacacagctgtacacacctttggaaccgcaaaacccccagtgctcctgtaccccttcccaccaaggcatctacgcacacagatggactctgcacacgcctggcatctcctccacgttgcacacacacattcatgtcacacccgcccctcagggctcatccatgccctcggtgcccctaccctcaccctggtcactctcctcacttggagccacacagacagccgagagcctgggtgcacgtgccctcagtgggcacgagtacatgccccagcgccccccaccacagacctgcagctttcccaggtgtctcccatgcgccctggggctcactactgcacccgtgatctcagggccctcagactcgaatctctcagaaacactcctcaaagcccacggtgccctgcctaaaagcacacacatcctcaacggcacacctgccgaaaaccccatgcacctggccctcccacagcagccatccccatgccctccccactggctgcaagccgctgtgcctgccgtgactgagcagaggcttgggagctccatgaagtcagtgaatgggtgggtgcactctgggtgcatgcacagcagagaacactctccagccctgcgcccaccctgtccctgctcaggtgaactctctccatgccgaatcaacaacggtggctgccaggacctgtgtctgctcactcaccagggccatgtcaactgctcatgccgagggggccgaatcctccaggatgacctcacctgccgaggtgagagaggcgggggggaggggctggcggggaacccaagcacacaccagggatggtgaccatctcccctacatgctccagcccagccccccaaagccttttgccaagaagacgctgatgatgacctcagctccccgggggaggaggcgtgggcactggggcccacagcgctggctcagaaagctccctccacctccctccccagcggtgaattcctcttgccgagcacaagatgagtttgagtgtgccaatggcgagtgcatcaacttcagcctgacctgcgacggcgtcccccactgcaaggacaagtccgatgagaagccatcctactgcagtaaggagccccctgcagcccctgcctcttccaggcccagagcccaggtcctcctcccccaggcccctgcaggatggagcaggatcaggacccagcttcctgaccatgagttttgggagctcatgaagggcagaaccactgttagcctggactgggcctttgggtttgggggtggccagctggacacgtgcatgacgtctcagggaggcagccctttccctgtgcctgtggctgacacgcagcctactcctccatttgcagactcccgccgctgcaagaagactttccggcagtgcagcaatgggcgctgtgtgtccaacatgctgtggtgcaacggggccgacgactgtggggatggctctgacgagatcccttgcaacagtgagtgaggcgcactggcataacccatctgtacctcagttcctgccccacccctccctggccaagctttgtccctgggccccgtggtgtctggttcaaggcactctgtgacaggccagggcaggtgctgtgggccaggagctctgtcctgcgtccttctggcccccacagagaaaactctggcctgacgatacggggcgggcactgttctagagacagcctgtggtgtgggcgagttccgctgccgggacg

SEQ ID NO: 6083 - DNA, 6000 bp, Homo sapiens
ccgcgaggactacattgaatttgccagcctggatggctccaatcgccacgttggtcagtgtgccagtgaggctgtccaggcacagcagactcagtggggatggaggtctgaagcgacaggggatcaagttttgggggcaagagtggacataaaaagcggaggatatggcctgaggacaccactcactggggtgtggggttcagagcaccccgggggcttccccagcctggccaccacccagctcccttgggaaggaagaggagaggcccttcccttgtatacacagttctggaggactggccccaaggagggtgggggtgggaggcctgcgattgagaactgcagtgctccccacttcccgaggggagccatacactggcagggcaggaacttgccatgaggcagtctaggtttgaactccagctctgacacttgttagctgtgagaccatggggggtctgtaccatgaaccatctgtaactggggctgacacccacctctcagggtggtggtagggcttgaggaggtggagtgggccggcaccctgtccgagctccggctgactggcactgtgcctgccccttggccctgcagtgctgagccaggacatcccgcacatctttgcactgaccctgtttgaggactacgtctactggaccgactgggaaacaaagtccattaaccgagcccacaagaccacgggcaccaacaaaacgctcctcatcagcacgctgcaccggcccatggacctgcatgtcttccatgccctgcgccagccagacggtgagcaggcaaggggtgggagcaggcgaacggtgagccaggcaccggggtccctgggagttcctgctcatcccttctctagcattgaccaagccctcctggccagacactgggagactccaggagggtctagacaggggatggtctggctcccgggagcttcagcccggcctggatccagccctggagtctggcagcagcaagtccctgaggccagtcaagtgggggtctgggtgcccagcccccagaaggaaggcaggccggcccctgggagggaagcacagaggaggtggggagctggccttcaggcctggcctgatcctgggaccttagaatcctctcctatctccagcttcagctccctcctaaaagaggcagggttcagacccacccgcctctgtccaggatagagtgagtgaggcagcctttggtaggccagaaaatgtcaccatatttcacgacgttttctctggcagtgcccaatcacccctgcaaggtcaacaatggtggctgcagcaacctgtgcctgctgtcccccgggggagggcacaaatgtgcctgccccaccaacttctacctgggcagcgatgggcgcacctgtgtgtccaactgcacggctagccaggtgaggctgtcccccagaccccatcaccagtgcccgctccccaacccccaaatcctccttggaccccaacacctgctctgtcctaatgtcctcatgcatctggttttcccacactaacacccccacatttcttgcctacctcttgtctccccacagcaatacttttacccccgtcacctcacacagacacctccacaccctaaccttgaccctccttgccatgcttcagtgctgccttccccaccctatcccacgcagccccatacctggcctttccgaactcaccatagcccaacctgccccataacaccctgacccctgcctcaacttctttgaaacatccaagcccctcaaaagaaagacttctgagtcccccagacccccaccaacccctcttgcccccacctgccctccagtttgtatgcaagaacgacaagtgcatccccttctggtggaagtgtgacaccgaggacgactgcggggaccactcagacgagcccccggactgccgtgagtgcctgctgggggtgacaggagggcccccagctgtgtcggaggcctgactcctgaggctttgaatggccactggagaggctggggctgtggtgccctgcaagtggacctggccgtgtccaccccagccgctctgactctgagcctccctctctggcagctgagttcaagtgccggcccggacagttccagtgctccacaggtatctgcacaaaccctgccttcatctgcgatggcgacaatgactgccaggacaacagtgacgaggccaactgtggtaaggcgctgcccgcccaccctccctccttccccagcatcttccctgccccaggatttggggctttcaagtgcagggaagttgcagcccacggcagcttgctctccaggctggattcctatggctcaagcctgtgtcctccctgctgagggatgggcaccctctccctgcccctgagtcctcccttcgccacgaatcacctcctcctccctccacagacatccacgtctgcttgcccagtcagttcaaatgcaccaacaccaaccgctgtattcccggcatcttccgctgcaatgggcaggacaactgcggagatggggaggatgagagggactgccgtgagtgtcagaggtggtggtgggccggtggtgggagatgacacggaagcagggcaggcagaatctccccacagctttgagaggctctcaaataactttagtagatgggcaacacaaattatattgggtgtaacttgctttgctcataaaaatcatcatgcatgatatagagacatagagatccagaaaacaaaaagcaccaaaactggggataaactgttccttcctccgaagaagttgctggcaggaccaaggccagggcttggaagagagagaagacagtgatggtgaactggagtggcaggtgtaagggagggccctcattctcttgcccaccccacagccgaggtgacctgcgcccccaaccagttccagtgctccattaccaaacggtgcatcccccgggtctgggtctgcgaccgggacaatgactgtgtggatggcagtgatgagcccgccaactgcagtgagttgcctggcctggagcccagcttccctccccagtgtctgctgctcacaccaccccgacgtgtgaccccctcagtggctgctccctcactctccccaccctcccggcacactcctggaaggagtctcatcctcaccccatgcccacccgcttgcagcccagatgacctgtggtgtggacgagttccgctgcaaggattcgggccgctgcatcccagcgcgttggaagtgtgacggagaggatgactgtggggatggctcggatgagcccaaggaagagtgtggtgagccgagaccccactccaggaggaagacagtctacctgggtgggaggcatggcacccctggcaggtggagggctgggggccgcctgcttaccggtctcagcgtggccctgctgctgggcttcctgggcctgctgtggggctggggaaggaggcctggctggagctcacttccccacatccacccgtgccccatgtctcccagtttccctatccctgcccctgcccacgcctcatccacacatacctgtgtggagttttccctgcccaccctatgggatctgttcatctccttcccaaggcagctgcccacacacacacccccaaccatgtctcctgtccccaaacctccttatagaccccacgtctcaaaacaccgcctgggctccccgcggctgacccttcccaagctgggatgcccaccctccctgccaggccagcctgaccatgcctgcttggaccctaatgtctgccccagccctttccctgactgccctgacacttgcctcctccagatgaacgcacctgtgagccataccagttccgctgcaagaacaaccgctgcgtgcccggccgctggcagtgcgactacgacaacgattgcggtgacaactccgatgaagagagctgcagtacgtccccacccacccagccccgcatgagcccctcccaggcctggcccttgtctcgcggccctcctgccacaggccgcgccagagctggtggccacctcccagggtgggggcaggagccgccctcctcacccatcccactccatgtcgtgtatttgagtttgtgccatttcacctcatctcatgtttctctccattttcacactgtcctctcggggttgcagaggtaggtgtctctgatgtgcccgtgctcccaccatacccccacctctgtcccagagccccccatccctgtgctgtgcctctacccatcatccttgattgacctctccccaaaccctggtgcttgtctcagtggtcttgcccccgctcccctccccaaacacagtctgttctgagggcaaggccagggacctgtgtcctctctggtgtctgtcccatggggtaagtgcgagcccgcctgtgcccagctgttccataggagcagccagtgggctctgccaggactggctcggcctctgggtcagtcagctgtggccttcagagacacggggatgggccttgggctcgggactgtggcactactgaggcctggagtccttgtgcccaccctcctgggcctgtctccccctgtccttcccagcccctcggccctgctccgagagtgagttctcctgtgccaacggccgctgcatcgcggggcgctggaaatgcgatggagaccacgactgcgcggacggctcggacgaggtgggcagggagatgagaaggaagcagatggcctcagaggagttcaggcagggcttggggagtgccgagaggtgaccggctgcctgtgcccatgcccacagaaagactgcaccccccgctgtgacatggaccagttccagtgcaagagcggccactgcatccccctgcgctggcgctgtgacgcagacgccgactgcatggacggcagcgacgaggaggcctgcggcactggcggtgcgccccttggcttggtctccctgggtcctccctctgctgcccaccccgccacatggcccagtcattcactcattctttctcttctgtattcattcttcatgcaacaaatatttattaagcatttaccatgtaccaggcactgccataggtgttagggacgtagtagtaaacaagacacagggcccctgaatacacatttttgtgcgggttgtgcccagctcaatgccccctagtctaggggaccagttgagctgaaatccagcaaaccctgagggctgtgcccatctaggccccaccccacaagtccctccgagacagtctgctgccacaagaagaaaagccctgcctattttcccttcctgggggcagtgagacagtgcctgtccctcgctgacctgcctgggctctgcagtacagagggggcaggtgaagcccgggatgagaaaagactgggccttggagcggaaatcccaactgtgcgggcagatgtcttggctctgccttggtaggccaggcacagggatgggaacccggtcttccattcccagcccagtgctgttcccgcgtccccgctgtggaactacacagcccagtgctgttcccacgtccccgctgtggaactacacagcacagtgccctgccacataccagagaaggagtgccctctgaactcctccagacacccctgaaaaatggcctcttctcccctaaataccagagggggcagtttggccccaccaagtagaaatttaagagacctggttccaatttggctgtgccactgcttgcctggtgacccctctgagcctggaacccccacctgtggagacaggggtctgggtgggctcatggctcattctatctcttggctccccctggcaccagtgcggacctgccccctggacgagttccagtgcaacaacaccttgtgcaagccgctggcctggaagtgcgatggcgaggatgactgtggggacaactcagatgagaaccccgaggagtgtggtgagatttggggcggggctcccaggcttcccagtggccagcaaccacccccactcccaagactaattctggctctgtgtccccctgg

SEQ ID NO: 6084 - DNA, 6000 bp, Homo sapiens
ctcagagccccccacagcccacaccacccactgcaaagacaagaaggagtttctgtgccggaaccagcgctgcctctcctcctccctgcgctgcaacatgttcgatgactgcggggacggctctgacgaggaggactgcagcatcggtgaggcccggcagcggaccggacgctggtggggagtggggagagccaagccctggcctggggtggctcaagggagggcatccactctctgtcccccacagaccccaagctgaccagctgcgccaccaatgccagcatctgtggggacgaggcacgctgcgtgcgcaccgagaaagcggcctactgtgcctgccgctcgggcttccacaccgtgcccggccagcccggatgccaaggtaggaaagcggggcagagcaggggtggacaccccaactgtggactctcatgaccctccctgtaacccttagacatcaacgagtgcctgcgcttcggcacctgctcccagctctgcaacaacaccaagggcggccacctctgcagctgcgctcggaacttcatgaagacgcacaacacctgcaaggccgaaggtgccggagccaccagagggcagaaaggctgggtggggcagggcgaccaggatatcaaacggggccgacttggaatggaatgtcttcctgcggacatcttgcccagacaagaagccccagactcatagttgcagctgcctgagcacagtgctggcccagcagtgggggcaggtcctggggctggctgactgaaggagtctggggtgtggcagtgctctgaattgcacacacacctcctcacccaccactgccaggacgagagtacactcagacacgcattgcacactcacagtcatgggggcctcacctgcacattccccacatgctttgatgcccaccttgccttccacatgcctgtacacagacattcacacacacccctggcacacacacccccaccatgcactcccatgcacaccctcgtgctccatgccaagcacacacaccccatgtgcctatgcacccccgagcatgtgccaggcagtttgtagcagagagcgtggtgatgccatccagcagccgtgaggaggtggaagtctctgggtctggaggggcagggacagctttctgactgaaaggagcgggtcacagtggatcagctcaggggaggagaggaggaggtccagaggctgaggttggagcctgcaaccctgagcagggagggtaagcagcagcttctggccggagcagatggtcctaccaggagatgggacagtgttcatgtgaaaggagctgagctgggtggggtgcacacctgcatcccacagccccagccctggcctcttgcttctccaggctctgagtaccaggtcctgtacatcgctgatgacaatgagatccgcagcctgttccccggccacccccattcggcttacgagcaggcattccagggtgacgagagtgtccgcattgatgctatggatgtccatgtcaaggctggccgtgtctattggaccaactggcacacgggcaccatctcctaccgcagcctgccacctgctgcgcctcctaccacttccaaccgccaccggcgacagattgaccggggtgtcacccacctcaacgtgagtgcccaacctggcgtggatggagtggaagagctccatagagcaggcggttcagagcaggatttgaaaagggcagtgctggctaggcgcagtggctcacgcctataatcccagcactttgggaggccaaggcgggcagatcacctgagatcaggagtttgagaccagcgtggcaacatggtgaaaccctgtctctactaaaaatacaaaaatttggctgagcgcggtggctcatgcctgtaatcccagcactttgggaggcagaggtgggtggatcacgaggtcaggagatccagaccaacctggctaacacagtgaaaccccgtctctattaaaaaatacaaaaaaattagccgggcatggtggcgggcgcctgtagtcccagctacttgggaagctggggcaggagaatggcatgaacccgggaggcggagcttgcagtgagccgagatcgcgccactgcactccagcctgggcgagagagtgagactcggtctctaaataaataaataaataaataaataaataaataaataaatagagactcggtctctaaataaataaataaataaataaataaaataaaataaaataaaaatacaaagattagccaggcgtggtggcgggcgcctgtaatcccagctactcaggaggctgaagcaggagaatcctttgaacccagaaggtggaagttgcagtgagccgagtgccactcggttgcagtggcaccaaggttgcagaatagcactgcactccagcctggatgatagagcgagactccgtctcaaaaaaaaaaaaaagaaaaagaaaacaaaagggcagtgcgaggggcaaaggttgagagtggggcagggggcagtcttaggattgtgttctgaggcatggccagcgggaagacagagcagtgggaatggtcagcagctggctgtgctgcaggcagcccagggcacagggcatgatgggcaggcagacagccctccggcaccaatcccccatccttgccacttcccactgtgtacgtcttagctacctcatttaacctctttgggtttcactttgtttatcaataaaattaggtgatcatcgccattgcacaggcttcagggagggctcaccagccacgtgtgagagctgcgagtctggcgcataagctccatgccggttgaatctctttaaagccagggtcctggctgtgagcctggggtgacgttccagcaggctggcagagtggtggcggggggataatggcaggaagacaaagcagtggcccctgaacctgtggcttccattcagatttcagggctgaagatgcccagaggcatcgccatcgactgggtggccggaaacgtgtactggaccgactcgggccgagatgtgattgaggtggcgcagatgaagggcgagaaccgcaagacgctcatctcgggcatgattgacgagccccacgccattgtggtggacccactgagggggtgggcaagggccctggggggaggcctctgggctggtggtaggaagcccccgggacagggttgggggctgcacccacatgcgtgcccttccctcccaggccagcctgaggacagagtccttttcagtcccttgggtcttctcggccacccctgcctggccctccccatgctgcctctgcccagggcccccagctgggcctgcttgggcagggatctgacctctgcttggccggctgtcatgcacagccacactctgccctggggaacagctctgccagcgtcggtggctctgaatgagcacactgtggttttagaggaaaagcccctcaacctgctcagaagcagactcccgcctgcttctctgtagaaggacagaatgccctcctcccagtccccagcagtccctgtccccagaccaagaagctggtgtcctgcctgggcctgcctcctctggccctccggcctgcccacactcaccccttctccctccccaggaccatgtactggtcagactggggcaaccaccccaagattgagacggcagcgatggatgggacgcttcgggagacactggtgcaggacaacattcagtggcccacaggtttgtggggcagggtgcaggagggacgggcatggagggggcccggctcgcagagcccagctgctgctgaagtcacacaaaagcaagggatgggatggggcttggactggggcagggcagattggccgtggaggcttttcccgaaagaggtgactgtgagtggcgtatgaacagggtggagctgtcccgggcatggaggcagttctttccaccccgagcctgggttggggaggccaagctctcacagtgctctctctctccccaggcctggccgtggattatcacaatgagcggctgtactgggcagacgccaagctttcagtcatcggcagcatccggctcaatggcacggaccccattgtggctgctgacagcaaacgaggtcagagcccggcataagtcgcagtccccagccctgtccccagccttgccatcctccctactgagccaaaggcctcacttcaatgcctcccatcctttgtcactgacccccagcaatgctgcagcgccttccaggcctctccagctggcctccccctgaaccagccctgcaggcctgagacccaccctgaccctctggcctacttgtccattcattggttgggttgcacggaggcagcataggtacattaggaacgtagcaaattgggggagaaggaatagaagtcagtcatgactgaccccagaagtctgggggtgatgggaccttttgccagtagtggccacaggaggaggaaccggtgtggggagagagaatttggtctggatgtgttgagtttgaggtgtctgggaaccacaggtgccagtgtcgtggacagcatggccagggcctgagtgcccctcaggtcccctctgactccacctcctcccccaggcctaagtcaccccttcagcatcgacgtctttgaggattacatctatggtgtcacctacatcaataatcgtgtcttcaagatccataagtttggccacagccccttggtcaacctgacagggggcctgagccacgcctctgacgtggtcctttaccatcagcacaagcagcccgaaggtgggggcagaggggagcctgggctggggaagggaggcctgtgggcattgagtctccaagctgtggccctgggacctggtggagagggggtcaccctgggctcacagggctcagagaagggtcctgctcagcatcctccccaccccacccatacctgcagtgaccaacccatgtgaccgcaagaaatgcgagtggctctgcctgctgagccccagtgggcctgtctgcacctgtcccaatgggaagcggctggacaacggcacatgcgtgcctgtgccctctccaacgccccccccagatggtatgcttatgccctcccagtcccagccatgcctcaggaccatctccttcctgtggctcctgacttcccctgaccttgttgcctgtccctctcctcctattcccctggctctgccccttgacgggcccttcctgcagctccccggcctggaacctgtaacctgcagtgcttcaacggtggcagctgtttcctcaatgcacggaggcagcccaagtgccgctgccaaccccgctacacgggtgacaagtgtgaactggaccagtgctgggagcactgtcgcaatgggggcacctgtgctgcctccccctctggtatgccccctcatcccgccacgcctgctccttgcccctgggccccagccccgccacccaccaccccacctcaggcaaatgcccagcccctgcctcgcctccagcctcctttccacaacccagcatccagtcactccagtctctgcttctcgcccaggtccccccagcccattcctctgctatagggccaggtggtctcgagggccacagtcgcgctcacacatcctctcccaccaggcatgcccacgtgccggtgccccacgggcttcacgggccccaaatgcacccagcaggtgtgtgcgggctactgtgccaacaacagcacctgcactgtcaaccagggcaaccagccccagtgccgatgcctacccggcttcctgggcgaccgctgccagtaccgtgagtgagccatccctgggccccagggcatgcgggagggtgacgggggaccccagagcatggggtgatgttcaacctgtgcctgggacccacaggggcaagttcaggaaagaaggccttatgcagctgagccaggcccaagctgctggcgcttccccacaaaggtgctggcacacttcccctgaggcagtgcaccccctgcaccaagattatgcaaacagaaa

SEQ ID NO: 6085 - DNA, 6000 bp, Homo sapiens
ggctcaggggcaacaggggagccgtccagagctgcaggctgcagggccatggggcaagggagtaagtgggttaggctgtacccaccacccaaaggggctccttgtttccttaccacaaaggcgccttgtaggctcccagcagccctgttcacaaggccaggggcccaggaggacagaaaacctgagagctgggtagggtggtgacccccattaggtccagggtagtcagtgaccatcctgtttctgagcagcccaagcctgaccctgaggtcccaaggagggccacctaaccctttccctctgcctcccacctgcccccagaccataagggcaccaacccctgcagtgtcaacaacggtgactgctcccagctctgcctgcccacgtcagagacgacccgctcctgcatgtgcacagccggctatagcctccggagtggccagcaggcctgcgagggtcagtgcctggctttcctcccagccttgtcccagctccccaaccctgacccctcctaccctacagccccaccttcctcttcttaccttggggacaagactacattcgtcgtgtaggggacactggactatgaagtggctatgactctccagtgcctccagtaggattttggaaaaatagatgtcagcaggcagatcggggcagctgcatggaagaggcatgctctgagctgggttttctaggacaagtaggatttggatgcattgttcaaaggagagggaactatacacaaggcaaggtgtgtgcaggagccccagccaagagtggtgggcaaagtgtggggaagtcctggagataaggctgtgagctaggcggggctcctgtgttctgagccaggagtgcctggaaagtgatgtttggggaagatcaacctggccgcaatggtggtggggaagaaacagaggcggttaaaccagttaggaggccattaggagtaatcagagtgtgagatgatgggcctgggctgggctcagtaagggttgaagaaaagaaatgaaacccagacgcatttcacaagaacctgctaactgatttatgagcttgctgggggacagcatttcccaaaagtgcattcctaggagcctccctctttgatgtgggtagattttaccaaaagaaactctgagttgaacaaagtttaaaagtgttttgtgctgcagaacttctcagagccttgaatatgtttatgtgtgccaagaatttttcaagcgtttggggttttccaaaactcacttgaccattcatttttttttcactgagtctgagcaaccagggaccatgtggggattcactttgggatgtgctgtatcaaagggataaaggcaagggaggattctgaggtgcatgggtagtggtgcctcaagacatgggaaaactgggccaggcgcagtggctcaagcctgtaatcccagcactttgggaggctgaggccggccgatcacttgaggtcagaagtttgagactagcttggccaacatggcaaaactccgtctctactaaaaccacaaaaattagctgggcgtggtggtgggcacctgtaatcccagctactcagaagacctaggcaggagaatcacttgaaccgggaaggttcaagggttgcagtgggccaatattgtgccactgaactccagcctgggcgacagatcaggactccatctcaattaaaaaaaaaaaaaaaaaagagccaggtgcgtggctcatgcctgtgatcccagcactttgggaggctaaagagggcggattaccttgaggccggggttcaagaccagcctgaccaacacggagaaaccctgtctctactaaaaatacaaaattagccgggcatggtggtgcatgcctgtaatcccagctactcggaaggctgaggcaggagaatcacttgaacctgggacgcggaggttgtggtgagccgagatcgcgtcattgtactgcagcctggggaacaagagtgaaattccgtctcaaaaaaaacaaacaaagaaaaacaaaagaaaagaaaagaaaaagaaatgggataactgggaatgagactggcttcggagtgaccttagggggttgagtttttgatgttggagagagggtgtggcatagaccagacagagggaggacaaagaggaaactaggatcaggctgagcaccaaactggaagtctagattttggagtcacctagtcctgattgtctggtctgaactcccagactttccctaaggaacttgcaggggtgcagggttgggttgtgctgggtggaggccggcagagcacagggtgagaaatccgagtctctgctgccctctcatggtggctaggggtcctgcaggtggttccccagagctaccagccaggtgcgcttcctcccggcccatgctctggcctcaggctagggtgtgtgtgctgggtggaggatagggatgatggtggggggggatgatatcaaaggagaagcagagaacagttggagggtgacaggaaccaagtttaagggagtgttggcgatacccatgccttaagtttccttgtctttcaggcgtaggttcctttctcctgtactctgtgcatgagggaatcaggggaattcccctggatcccaatgacaagtcagatgccctggtcccagtgtccgggacctcgctggctgtcggcatcgacttccacgctggtgagccatttggtggcagagggagttgggcgtggcgtaggagctttaggggtggtgtggtgtgccctgagggtccagtgagaggctgcctgaattggcctgaggtggggcacttgctacagctgccaccctgactccacctccccttcaagcacctggcccctccggcactctctcacctctgtcttgagccttgtgagattttgacccctcaccttacccctgccttattgggcatccccatgtcacctcctccacctccagaaaatgacaccatctactgggtggacatgggcctgagcacgatcagccgggccaagcgggaccagacgtggcgtgaagacgtggtgaccaatggcattggccgtgtggagggcattgcagtggactggatcgcaggtgagcagtgggcaggtttgtggggcttggggtgtggcagaggactgggggacgaagtgagaggaggagttggcgggagcaggaagaggagctgtaggggtgcctgggagcttggagacaccaggtccacctgtcctcacctaacctccctgagccccaccaactccctccttaggcaacatctactggacagaccagggctttgatgtcatcgaggtcgcccggctcaatggctccttccgctacgtggtgatctcccagggtctagacaagccccgggccatcaccgtccacccggagaaagggtgaggagctggaaagactggccttgtcattctgcccatggcccatgctgatgaggccctgtctcctccagggtctgaggactgacccccacttccacccccaccctacaggtacttgttctggactgagtggggtcagtatccgcgtattgagcggtctcggctagatggcacggagcgtgtggtgctggtcaacgtcagcatcagctggcccaacggcatctcagtggactaccaggttcgcacgccaacttggccttggatccgatggtagacccctgacccaggctcctgttccctgtgatgagcccattctgggaggacttggagcccaggggaagtcacagggtctcccagcccagccctccacccagagtaggactcctgctaccacagagatgatgggcaggggtcgctcagaagtggggagtgggggagtggagagatgcctggaggtcaccttatcagcagggcagtgggcaggagtgtatgcaggaggcaggagtgagttaggggaggctgaactgagggcctcactctggcccaggcactccctgctgccccagacatggggctggcagcgagctcagccctggaggtgaggtgggtgcctctggcctgtaggatgggaagctgtactggtgcgatgcacggacagacaagattgaacggatcgacctggagacaggtgagaaccgcgaggtggttctgtccagcaacaacatggacatgttttcagtgtctgtgtttgaggatttcatctactggagtgacaggtgagggcttctgtcctggcctcctcagctgatctcttccttccctcctgcctccactgatgccctgcttgtgccctgtccttccctcaggactcatgccaacggctctatcaagcgcgggagcaaagacaatgccacagactccgtgcccctgcgaaccggcatcggcgtccagcttaaagacatcaaagtcttcaaccgggaccggcagaaaggtgaggctggggctctgggctggggtggagaggtgagggggactctggcctgggagagtgctccccagggaacccagtgtgagagggctgggagacaagttagacccatggggcaacttccgatggcccgagagacccagggatggggaggaaaggctgaggtgctctgggacagatcttggcattggactctgggccctggagggtcattcaagctgggaataccgaggcagagggcagagctttcgccaaagcctggatgacaaaggcaccagtgagcctttcccaaggcaggccctgccctctgtaccctcccctcccccaggcaccaacgtgtgcgcggtggccaatggcgggtgccagcagctgtgcctgtaccggggccgtgggcagcgggcctgcgcctgtgcccacgggatgctggctgaagacggagcatcgtgccgcgagtatgccggctacctgctctactcagagcgcaccattctcaagagtatccacctgtcggatgagcgcaacctcaatgcgcccgtgcagcccttcgaggaccctgagcacatgaagaacgtcatcgccctggcctttgactaccgggcaggcacctctccgggcacccccaatcgcatcttcttcagcgacatccactttgggaacatccaacagatcaacgacgatggctccaggaggatcaccattgtggaaagtgagcccagaccctaagtcttcccaggaagtgggacatggggcggggagcagcacagactcttagaccccagccaggcactctaccctaggtctgaatcccagcagctacaactcagctgaatccaactgcacccccgcagttacatgactcctgatttggagtcagcgtcagcccccgacttcctcccgccactggtcctagttctgccttcagagctgcacagaacaagcgagaggtctctgtggagcccaacgctcacaaacccaggctgcagacatggggctgagctccagtcacttgggctttcaataacttgggtcagtttcctgctcttgccaagcctgagccttctcatctgcgtggatgagtgtctcatctgagacaggattcctcgagctgctgcgcaggaaggcttagctcagtgatgctggggacggagtgtgtgctctggaaagagcagttacagtgtcagggctgtcatcacaggacagcctttcagctctttgaaaactgcatcctgctacattttctcttcttcagcctggttaccaccgggtcccttgactcattcatttgctcatatattcattcagctggtccataaagacctgccaggcaccgaactaggtgctacgtatacagacctgtcctttcagccttttctgggacattttctgctgcacatagtccagcctgcatgtctgtctaaaaatgtagcatccgaagctaaactcggtactccatgctcgtagcttgatcaggagagactggcacatcaatccccagacccctggaagggatgtcccctcacctccggctgtctgcagaccataccacagcatggccctttggcagccaccatcgcttatagccactaacactctagtcttttctcttacactgctgttcggctgtgtctctcac

SEQ ID NO: 6086 - DNA, 6000 bp, Homo sapiens
ctggccttcaggcctggcctgatcctgggaccttagaatcctctcctatctccagcttcagctccctcctaaaagaggcagggttcagacccacccgcctctgtccaggatagagtgagtgaggcagcctttggtaggccagaaaatgtcaccatatttcacgacgttttctctggcagtgcccaatcacccctgcaaggtcaacaatggtggctgcagcaacctgtgcctgctgtcccccgggggagggcacaaatgtgcctgccccaccaacttctacctgggcagcgatgggcgcacctgtgtgtccaactgcacggctagccaggtgaggctgtcccccagaccccatcaccagtgcccgctccccaacccccaaatcctccttggaccccaacacctgctctgtcctaatgtcctcatgcatctggttttcccacactaacacccccacatttcttgcctacctcttgtctccccacagcaatacttttacccccgtcacctcacacagacacctccacaccctaaccttgaccctccttgccatgcttcagtgctgccttccccaccctatcccacgcagccccatacctggcctttccgaactcaccatagcccaacctgccccataacaccctgacccctgcctcaacttctttgaaacatccaagcccctcaaaagaaagacttctgagtcccccagacccccaccaacccctcttgcccccacctgccctccagtttgtatgcaagaacgacaagtgcatccccttctggtggaagtgtgacaccgaggacgactgcggggaccactcagacgagcccccggactgccgtgagtgcctgctgggggtgacaggagggcccccagctgtgtcggaggcctgactcctgaggctttgaatggccactggagaggctggggctgtggtgccctgcaagtggacctggccgtgtccaccccagccgctctgactctgagcctccctctctggcagctgagttcaagtgccggcccggacagttccagtgctccacaggtatctgcacaaaccctgccttcatctgcgatggcgacaatgactgccaggacaacagtgacgaggccaactgtggtaaggcgctgcccgcccaccctccctccttccccagcatcttccctgccccaggatttggggctttcaagtgcagggaagttgcagcccacggcagcttgctctccaggctggattcctatggctcaagcctgtgtcctccctgctgagggatgggcaccctctccctgcccctgagtcctcccttcgccacgaatcacctcctcctccctccacagacatccacgtctgcttgcccagtcagttcaaatgcaccaacaccaaccgctgtattcccggcatcttccgctgcaatgggcaggacaactgcggagatggggaggatgagagggactgccgtgagtgtcagaggtggtggtgggccggtggtgggagatgacacggaagcagggcaggcagaatctccccacagctttgagaggctctcaaataactttagtagatgggcaacacaaattatattgggtgtaacttgctttgctcataaaaatcatcatgcatgatatagagacatagagatccagaaaacaaaaagcaccaaaactggggataaactgttccttcctccgaagaagttgctggcaggaccaaggccagggcttggaagagagagaagacagtgatggtgaactggagtggcaggtgtaagggagggccctcattctcttgcccaccccacagccgaggtgacctgcgcccccaaccagttccagtgctccattaccaaacggtgcatcccccgggtctgggtctgcgaccgggacaatgactgtgtggatggcagtgatgagcccgccaactgcagtgagttgcctggcctggagcccagcttccctccccagtgtctgctgctcacaccaccccgacgtgtgaccccctcagtggctgctccctcactctccccaccctcccggcacactcctggaaggagtctcatcctcaccccatgcccacccgcttgcagcccagatgacctgtggtgtggacgagttccgctgcaaggattcgggccgctgcatcccagcgcgttggaagtgtgacggagaggatgactgtggggatggctcggatgagcccaaggaagagtgtggtgagccgagaccccactccaggaggaagacagtctacctgggtgggaggcatggcacccctggcaggtggagggctgggggccgcctgcttaccggtctcagcgtggccctgctgctgggcttcctgggcctgctgtggggctggggaaggaggcctggctggagctcacttccccacatccacccgtgccccatgtctcccagtttccctatccctgcccctgcccacgcctcatccacacatacctgtgtggagttttccctgcccaccctatgggatctgttcatctccttcccaaggcagctgcccacacacacacccccaaccatgtctcctgtccccaaacctccttatagaccccacgtctcaaaacaccgcctgggctccccgcggctgacccttcccaagctgggatgcccaccctccctgccaggccagcctgaccatgcctgcttggaccctaatgtctgccccagccctttccctgactgccctgacacttgcctcctccagatgaacgcacctgtgagccataccagttccgctgcaagaacaaccgctgcgtgcccggccgctggcagtgcgactacgacaacgattgcggtgacaactccgatgaagagagctgcagtacgtccccacccacccagccccgcatgagcccctcccaggcctggcccttgtctcgcggccctcctgccacaggccgcgccagagctggtggccacctcccagggtgggggcaggagccgccctcctcacccatcccactccatgtcgtgtatttgagtttgtgccatttcacctcatctcatgtttctctccattttcacactgtcctctcggggttgcagaggtaggtgtctctgatgtgcccgtgctcccaccatacccccacctctgtcccagagccccccatccctgtgctgtgcctctacccatcatccttgattgacctctccccaaaccctggtgcttgtctcagtggtcttgcccccgctcccctccccaaacacagtctgttctgagggcaaggccagggacctgtgtcctctctggtgtctgtcccatggggtaagtgcgagcccgcctgtgcccagctgttccataggagcagccagtgggctctgccaggactggctcggcctctgggtcagtcagctgtggccttcagagacacggggatgggccttgggctcgggactgtggcactactgaggcctggagtccttgtgcccaccctcctgggcctgtctccccctgtccttcccagcccctcggccctgctccgagagtgagttctcctgtgccaacggccgctgcatcgcggggcgctggaaatgcgatggagaccacgactgcgcggacggctcggacgaggtgggcagggagatgagaaggaagcagatggcctcagaggagttcaggcagggcttggggagtgccgagaggtgaccggctgcctgtgcccatgcccacagaaagactgcaccccccgctgtgacatggaccagttccagtgcaagagcggccactgcatccccctgcgctggcgctgtgacgcagacgccgactgcatggacggcagcgacgaggaggcctgcggcactggcggtgcgccccttggcttggtctccctgggtcctccctctgctgcccaccccgccacatggcccagtcattcactcattctttctcttctgtattcattcttcatgcaacaaatatttattaagcatttaccatgtaccaggcactgccataggtgttagggacgtagtagtaaacaagacacagggcccctgaatacacatttttgtgcgggttgtgcccagctcaatgccccctagtctaggggaccagttgagctgaaatccagcaaaccctgagggctgtgcccatctaggccccaccccacaagtccctccgagacagtctgctgccacaagaagaaaagccctgcctattttcccttcctgggggcagtgagacagtgcctgtccctcgctgacctgcctgggctctgcagtacagagggggcaggtgaagcccgggatgagaaaagactgggccttggagcggaaatcccaactgtgcgggcagatgtcttggctctgccttggtaggccaggcacagggatgggaacccggtcttccattcccagcccagtgctgttcccgcgtccccgctgtggaactacacagcccagtgctgttcccacgtccccgctgtggaactacacagcacagtgccctgccacataccagagaaggagtgccctctgaactcctccagacacccctgaaaaatggcctcttctcccctaaataccagagggggcagtttggccccaccaagtagaaatttaagagacctggttccaatttggctgtgccactgcttgcctggtgacccctctgagcctggaacccccacctgtggagacaggggtctgggtgggctcatggctcattctatctcttggctccccctggcaccagtgcggacctgccccctggacgagttccagtgcaacaacaccttgtgcaagccgctggcctggaagtgcgatggcgaggatgactgtggggacaactcagatgagaaccccgaggagtgtggtgagatttggggcggggctcccaggcttcccagtggccagcaaccacccccactcccaagactaattctggctctgtgtccccctggctgctgcagcccggttcgtgtgccctcccaaccggcccttccgttgcaagaatgaccgcgtctgtctgtggatcgggcgccaatgcgatggcacggacaactgtggggatgggactgatgaagaggactgtggtgagcagggggccgacgagaggcctgcaggggacgggtagtgcacagtggggtgagtctggtcctcgtgggagctgcactggggttagggttaaccaggaggactcgcccaggaaggggaggatccattgctaggagcctgggggcttttcgttaggaaagagaagcccctggggaaggctctgggggctgcctgatgccttaggtcttggaggtggggctgggaacccaaatgtttgacctgctccccctgcaagccttgtcacttaggaattgggagccactgttatctatggggttgccgtgggaggaggaggcaggggagaatacccagggcctaaagcctctgccctcctcagagccccccacagcccacaccacccactgcaaagacaagaaggagtttctgtgccggaaccagcgctgcctctcctcctccctgcgctgcaacatgttcgatgactgcggggacggctctgacgaggaggactgcagcatcggtgaggcccggcagcggaccggacgctggtggggagtggggagagccaagccctggcctggggtggctcaagggagggcatccactctctgtcccccacagaccccaagctgaccagctgcgccaccaatgccagcatctgtggggacgaggcacgctgcgtgcgcaccgagaaagcggcctactgtgcctgccgctcgggcttccacaccgtgcccggccagcccggatgccaaggtaggaaagcggggcagagcaggggtggacaccccaactgtggactctcatgaccctccctgtaacccttagacatcaacgagtgcctgcgcttcggcacctgctcccagctctgcaacaacaccaagggcggccacctctgcagctgcgctcggaacttcatgaagacgcacaacacctgcaaggccgaaggtgccggagccaccagaggg

SEQ ID NO: 6087 - DNA, 6000 bp, Homo sapiens
gttaccaccgggtcccttgactcattcatttgctcatatattcattcagctggtccataaagacctgccaggcaccgaactaggtgctacgtatacagacctgtcctttcagccttttctgggacattttctgctgcacatagtccagcctgcatgtctgtctaaaaatgtagcatccgaagctaaactcggtactccatgctcgtagcttgatcaggagagactggcacatcaatccccagacccctggaagggatgtcccctcacctccggctgtctgcagaccataccacagcatggccctttggcagccaccatcgcttatagccactaacactctagtcttttctcttacactgctgttcggctgtgtctctcactgtgccttggttctttaacctgagtttaagatgtctgctttataaaataatcaatccagctcagggtctttttaagtagggggctccccagtacagcccaagcaggatttgatttacagaaatctacattgcactcagctcagcagaactgcagctccaggaaagtgcaaacacaccagaaagcccgattgccctcagtgggagagggttgagaggtgaccacaggtcatttgagtgaggacagcagaggttgggggcactgagtcagaccctggtgcccccgagccctctctgctgcacctcttgcactcccataccccacacttcgccttccagccaggagagcacctgccccaggctgtcccccacggctcctgtgcaggctgccctctgggccctcctgacaaatcgctgctcctgtctcttcacagacgtgggctccgtggaaggcctggcctatcaccgtggctgggacactctctattggacaagctacacgacatccaccatcacgcgccacacagtggaccagacccgcccaggggccttcgagcgtgagaccgtcatcactatgtctggagatgaccacccacgggccttcgttttggacgagtgccagaagtgagctgctgcctggggatgggggtagcagggagaggtgggactcggggtggcagaaactccccaggcagatccaagcgggggtgcaggagaggcaggccctcacttgagctccacccttccctgctgtgtgatctggggagaggtgcaaaagcttcctaagcttcaggttcctcttctgtgatacaagctggctaagattccagctgcctgcaccaaagggagcatcaggactgtgggggacgctctgcctttgtgattgattcattcatcagagcaccatgttggaggcacagggtagggcctctagctctgggatccaaagcttcaggcaaagaatgtttgtcgaacccttcgtacagaagcctaaggctgggcctaccaagccacctagctgggttgagaagtcatacttgtgggaagtaatggtaactggcacagggctgtatacgggtgaccacaggtgtcatgaaggcagtagattggcccagagcctggaactggaaaagacaaggaaggccagctcggacaggggaagtgctttgagcaaaagcctgaagaaaggcaaattcaaggcagggaggacagagggggacctctgcatgccatagagcataggcaggcctgagcccagccaggaagtgaggtcagggtgcggaggagttaggagcacaagccaggacaggtggcagaaagcacccgggggtgggtgctccccctggagggttcacccgcagtcagcctgctctgttctcccgcaggggcagccctcatcccggctgtttgggcctctagtgagccaccccctcgccttagggatccaggcccacatgttagcaacatttttttcccaattcagcagtgcttggaatgtttttcaaaagctttactaggaaactagtaaacacaacccaaagcagctgtatagatacgtgagtgtcccgaacccagattccccccaccagtcccccaatgtcagtcacctccaacctggctcaaggaccctctgtttcctcctgcctctgtcatctggcacatctgcagctgatgatgaaggtccagtccccccttccatgaccctcggctgcctcacctgtctggggatggcctcagagcctgtccctcatgagtctggagcttccctggagggtccagcaaggctgcctggccctcgtcccagaggacgtgaccccctggctgcccaccaagctcctttcttatgaggccaggggattccatcacgcattcagcgagtggcttttgagggcaaagaaggtgcagaggacccagtggggagcgcgaggggcgtcatgaagagcttcgtggctgtgtgctgaggactggccccacctggaagtcagggaacgtgtccttgaagaggcggcatgttagccagcgtctgaggatggcaggagtggctgggtgggagcatggtcccagtgcccaggagaaagagctgagctggcaggaggggccctccccctggccacaaggagcaggcactttcggggaatcagaaggagccagtgtggaccccagtggagagggcaggggcaagtggagactccaacaacccagcctcctcctgagccctccccgcgtcagcactggagcactgatggccctgtagagctcacagtaggatagttagaaggtccgccatgttcctggacactgagcacctaccccaggaaagcctctctctccctcctgccccattcctgggaagcaggttcacccagaccacagttgtgtcacatggaggagtttgttgacgccaggaggaaaaccacttctcactgcaggtgtgagtagtttcacctgaggtgtaggagttcctggtggggactgacaggccaagtccaatcctgacaagccaggaagatgactggccactgccccaggatacccattttcccttatggaggctagaaggacacgccgcctccctcccaacttacatcccgattccagagccaccgcaaacccctgctctcctccaggatgaggcccttaagatcagagcttctcacgagctcgccgaggctcagggcagccagtgtctccagaggggcagagcagcaccattttcctacgtgagcccagcagaaggcgggatagttcaatggtgctggagacgctgggggtgggcaagaagggtgtgacctggagaggtctgaggagacaagttcacaggccagaggacagatctgtggccagaatggtgaggggcagaggtaggaggaggccagaggcactggggtgggggcgggggcaggtcctgttagggaactggagaacggagctggcttttgtgtggcttggtggtctcagactccactgtgcctaaggatcgcctaggagcaagagaatgtggagtcccctgccccgccctgggcctagctgagtgacaagctctgggaccgaggacccagggctcaccatccaatgccggtggtccaaggaccactctgtcacacccagggtagtgcatgaccagccctgaggccttccacagcccccctccagcctcagcaccaccccacaaggagcacggcataattgggggctggctgttcccattgcctcctttactgagaggaaaccagggctcagaggggcgacaggctcattcaaagttggagccgttacgaggcagaacggtggctccaaccccaaacatgcaaaggcctcaaagtacggagaaggggactcttgagagctgcttgaggataggacccacataccccaggacctgggacacatgccacactcagctccacaagggcttcctgaatgatctggaagacagccagcctccctgcacagaagagagcagttaagaataaactcctgggaaatactcacatagtgtgtgccatctgtccttaagatggagattaacttcttccactctcacatcctgcgaggcaggtggtgctaccatccccacctcatagaggaggaaactgaggcacagggcagttgagtaagttgcctaagggcacctagctggtgggtggtggagccagggctggaaccccagggcctgtctcacttggctgcaccggctctcttctcagcaagtagacggtcactgcccagatactgcaatgtgaatatctcacacttggccctcatcccctcacactcagccacctcgtgtgtgaactgtctgtgcaatagtggggcccttcctgggcattggggcactgctggcctctatggctctggggtggctttgccctggcaggcttccaggttccaggtgcctacgcgtcctggcctgtgccctctgttgtggattctcaggctttgcctcctgatctctggaccctcttcccccagcctcatgttctggaccaactggaatgagcagcatcccagcatcatgcgggcggcgctctcgggagccaatgtcctgacccttatcgagaaggacatccgtacccccaatggcctggccatcgaccaccgtgccgagaagctctacttctctgacgccaccctggacaagatcgagcggtgcgagtatgacggctcccaccgctatgtgagtctgcggggtgggtgagctggcgggcggctgaggggaggccagggccagggtcagccgtcaaccaagaccgtccaggcacagacatggtgggaacagctgggaggaggtgagtgcctccaggccccagcctcggtcaaccccaccctgtccagcttgctcctcatcagctagacgagggagatagcaggatgcctctgcgggccctcattctgtagctgtcagaggccaggccaggctgtggtccggtggagactgggcaagaggcctgagcgatgctgtgacggtgatggtgctgtctccacaggtgatcctaaagtcagagcctgtccaccccttcgggctggccgtgtatggggagcacattttctggactgactgggtgcggcgggcagtgcagcgggccaacaagcacgtgggcagcaacatgaagctgctgcgcgtggacatcccccagcagcccatgggcatcatcgccgtggccaacgacaccaacagctgtgagtggggctgccgccagctgcctcaccctcctgcctgtcgtgcatggacatacaaacacacaccccacacacacatcgcacataccacacgcaccctacacataccacacacacacatcccacacatactacactacacacaccacaccacatacacacaccacacccctcccacacactcaacacatacacaccacaccatacacaccccccacacaccacatacacatacacccccaacacatacacacacatacacaccccacatacacacaccacacatatcacatgcacaccccacatataccacaccacacacataccacacacacaccacacaccacatacacaccacacataccacacacaccccacacataccacatacacacaccaccacacacactacacataccacacacacaccacatacacacaccacatacacacaccacacatgacacatacacaccacacataggacacacatacacatgccacacacctaccacccacaacacacatcacacacacaccacacagcacacacacacaccacacaccacacgtaccacaaacatgccacacacacacacacacatctcacagacatactataaacaccccacaccccacacaccacaccccacacacacttgcctggtcctgctctccctgggcctccattacacagacacacacagctgtacacacctttggaaccgcaaaacccccagtgctcctgtaccccttcccaccaaggcatctacgcacacagatggactctgcacacgcctggcatctcctccacgttgcacacacacattcatgtcacacccgcccctcagggctcatccatgccctcggtgcccctaccctcaccctggtcactctcctcacttggagccacacagacagccgagagcctgggtgcacgtgc

SEQ ID NO: 6088 - DNA, 6000 bp, Homo sapiens
gttgtactgtatcgcacgacacagctgtatttatctcagtattattcctgtcctcaaatctgcaagcataatggacagcccaggaaaagctggattttaccagagtgttgcaggccccttaacacacgcctgtagactccaggctctgggttttttaatatagagagagtaaggagcaagagactaaaaacacaagaactaccagaaagcccaggggatgggaggacctctgaagaatctgaggaaagctaaagacctcttcctccaaaaatgtatataggcacaaagtaacaaaacttttgcatacattttcaagaaggatcagaggcccctgtcttaaaatttcactttttttttttttttgagacggagtctcgtactgttgcctgggctagagtgcagtggcacaatctcagctcactgcaacctctgcctcccaggttcaagcgattctcttacctcagcctccctagtagctgggattacaggcatctgccccatgcccagctaattttttgtatttttagtagagacggggtttcaccatgttggccaggctggtctcaaactcctgaccttgtgattcgcccgtctcagcctcccaaagtgttgggatttcaggcgtgagccaccgcgcccggctggcaaaatttcactgtttaagaagctataggccaggtgtggtagctcacacctgtaatgccagcactttgggaggctgaggcagcagatcgtttgagcccaggagttcgagcccagcctgggcaacacagcaaaattgcatctctacaaaaaacacaaaaattagccaggtgtgatggcacctctgcactccagcctgtgcaacaaagtgagaccctgcctcagcaaaaaaaaaaaaaaaagaggccaggcgtggtggctcacgcctataatcccagcactttgggaggccaaggcgggtggatcacaaggtcaggagttcgagaccagcctgaccaacatggtgaaaccccgtctctactaaaaatacaaaaattagccagccatggtggcgcacacctgtagtcctagccactcaggaggctgaggcaggaaaaatcgcttgaacccaggaagcagagattgcagtgagctgagatcgcgtcactgcactccagcctggacaacagagcgagactccgtctcaaaaaaaaaaaaagcactaagacaaatacctaatgcatgtggggcttaaaacctagatgatgggttgataggtacagcaaaccaccatgccacatgtatacctatataacaagcctgcacgttctgcacatgtatccgagaacttaaagtaaaataaaatagctataattggtaacaatggttctatgaccacataaatttctgagagattttcttctccataatttcctgattttttcaacaagctgtagccatttttatttttatttaaaaaaatttttttgagaaagggtcttactctgtcacccaagctggaatgcaatggggccatcactactcactgcagcttcgaactcctgcgctcaagcaattctcccacctcagcctccgagtagctgggactacaggtgcatgacaccatacctggctaatttttgtacttttttgtagatgggatttcaccatgttgcccaggctggtcccaaacacccgagctcaagccatccacctgcctcagcctcccataagtgctgggataaccggcatgagccactgtacccagcctgtagtcatttttatagaaaaaataatagaagctgttttcacatcaagagaaaaaaaaaaactggccaggcgcagtggctcatgcctgtaatcccaacactttggaaagccaagacaggaggatcattgaggccagaagttcaagaccagcctgggcaacatatcaagaccccatctctatataaataaaaaataaaaaaattagtagctgagtgtggtgatgcgtgcctgtagtcctggctactcaggaggctgaggcaggaggatcgcttgagcccaggagttcaagactgcaatgagttataatcatatcactgtactccagcctgcgtgacagagcaggaccctgactcaaaacaaaaaacaagatggaacaagaattcttctaaaagccctcctttaggagacacctcttcaacttggaaagcaagctgaagaattttctgacacattttgtactagagaagcaaatgaagtctgtgggagaagttcccgccaagggtgcacaccggcaaagagcacacaaggggtctcccgccaacatggctcgctcaccgcgggcccatcccctgtctcctgtcccacaggctgtgacacttggggaaacccaggctgctgagggaaggcatggggcagacaggccagcgcagcacgacaggtctcaggtggggatgagaagtacacaggctcggaaggtggagcagccaaaactctgatggggtgggcgtgagggctacaccaactacagagatggacggggcagcagcagcctcccaccagggcctccctccgacgggtcctttcatccagcaggtgggcaagtctacttgttcatccacactccaggacttggcaacctctcctcatgaaggatcttctcctttggtgccaaacccattcagcagggtgggacagaggtacagagaaacttcgagaagagctgggtctggagcctgcaagctggagactccagagaccctcgctgtgctttggaagatgcaaatgctttcgaggtcctcagaggaagccactcttctcaggctcaggctgagaaaactgttgaggaaagcatgcagggaggcaaggagagtgtcccccaactacggggtaccttagctgacaaacaccttctctgttgggactacgagacaagcctgccccccactgccctggcttagatgtcgtctccctcagtgcactgagtgggaaaaaaaaatcatcttaaagttaacaatacaacctcaagtcgttgctaaggactccacaagtgccacaatcggcttgaccaatgtgagaaggaggaagaaaaaatttggctacagtgaatacaggtttgtttgtttttgtttttgtttttgtttttttgagacagagtctcactctcgtcgctcaggctggagtgcagtggcacgatctcggctcattgcaaccgcaacctccgcctcctgggttcaagcgattctcctgcctcagcctcctgattagctgggattaaaggcaccggccaccacgccgggctcacttttgtatttttagtagagacagggtttcaccatgttggccaggctggtctcgaactcctgagctcaagtgatccacccgcgttggcctcccaaagtgctgggattacaggtgtgagccaccgcgcacggcctacaggtcctctcttaacagaagtttctctcaggagtggcaggacccgaaaacatgtttttaagcccagagacacaataagtcttgcagtgtcaaagattgtatctacaggccatagggtatgaccaaatttaaaaaacaaacaaaaatcagctaacaggaaccccaatcctgaaacaccaaagctcagtggagacatcaaagcccagctgacacagaatactgacatcctacgaatgaatgaccaaatgccccagaaatggcaaactgtcgcaggattaagtagactccaaactgaaatgaaaatgttcaaagcaggaattgaagtgtgatctatggaacaagactttgagagccattcacacgtagggctactgacttaataaaagttcaagccaaaagcacttgaatcgtccctgggttaatccaatccgaaagagccgtgagattcctaacacctcaaaacgcacacgtgcctgaaaattctccaacaaagctgagaaaataaaaatcaactgcctgttaggtaaaaccacttaatactacgtataatacgatttaagcgcagcctatagagcacttcctcaattgcacctaatgatgaaaaaaaaaaaaagttaccacattttggctgggtcattccacaacacctttatcccaccaggattataaataagcgttttatgcacccaagtccgtccaatgccacatgctaactcaatccatcccattcttaattcctcggacaggtctacctggcctgcgtcctgttccaagtattattttgcagattatacttcgtaaaacctcaacttttttcgccttcttcctaaacacgaaccttcccggagtaaattcacgccgtaaacacacccagggctttgttttacacacagatttctccccctggtcccgagagaggttgcttttccttctgaatccaccgaggccaactcctgccatctggggtcgcggcttcctccgccgccgccgccgctgccgccgtgcggattcgcccgggttccgggtggcccgcgccggcccgcggctcgcaccccttcctgtctccgtctgcccacggcgggcggcgggcgcgcggcgcccagacaaaagctcgggccgtcgggcccacgggccccgggagcgctccagccccgaagccgagggtcctggcacaactttgcgaacgcagaggcaggaggtgccggcgcccgcggggtccgggtgctcccggggcagccggcacgcgcgtgggccgcgggcgagggcgccgggggagggcgcggcgcgccccgcggccgccggcaacttgccccgggccgtggccggcgcccggcaggcccgcccgacggcgaggcccggcggcccacattgtccccgcggtgcccgatggcccccagtgcgctcgctcggccgcacacgccccctgcccgggccggctgcgggcctgccgcgctcctctacgccccgctcgggcccggccccggccgccccgccggcagcggcagcaaaactttctcctcatcgcggcggcggcggcgtcgcggccgccctcggcgcgtcagacaggcggtcgggaggtcgtgcggcgggtccctccctcagccccaccccgggccgccgacctggtccggctccgattcatagtcgtcgtcctcggcgctcacggacatggccatggctcatggtgggcccaggctcgcgcgcgctgacatggctggagcggcgccgccgccgccgcccgcccggagcaggctcggctcgccctggctcgggctcgggctcgggctcgggctcccgctgccgcgaggagggagccgcgccgcgcgcctcgcacgcccgcgctggagggggcggggaggggccggcgggggagggccggggcgccatgcatatgcatgaggcgagccaggaaggggctggccccccgggcgggcgggccaatggcgcggccgcggcgctggggccgcacacaaagggagcccggcctgcggtgacacgggggcgggccgccgagggcggtccctcgcggccggagcgcggggactggggctgcgtgggggcgtgccccgcgccccgcccggcccggcctggcccgcgcgccgcgggatgcacatgggtggctgcacgccgccaccgctgcaacaggaaatgcgcgcccggcctggggtggggtcctttgtgtggtcccgtggggcgtctcgcggaagcccgggggcgcccgggccgtgggggacgactctgcacccgacgccaggagcgggtccccaggtcccttgcagcaggcacacgggctgccgggtttgcactcgctgcaggaccaggacctgaagcgcacgaacccgggaacccccgacccagagcctgcaggaccgctggcctggataagctctgagagcccagtctcccccgacgcgggcggttgggctgggccggcctcctggcgctgcacctccggcactcgggttcgcctttgcagggtcaagtagtgcaggcgggagttccactcgagtcgcctgacgggggctgtcagaacgccctgactctaccctgaggtgggcgccccctcccttggacaggtaccgccttctgagttgacctccgaaaggtggagga

SEQ ID NO: 6089 - DNA, 6000 bp, Homo sapiens
aatgaaccaagctctgggtttggtcaaaacagatcctctatgtggccacaggtgtgaaaagcaggtggagtgctggtgcaaaattggtggataacattagggtctacacttcccctagccagtttaaccactggttcttaaaaaaagtgtgtgtgtgtgggtgtgtatacatatatatgcacatacataagtttataattttactgatatgaaggatatgtagtattcatttacaaataatagtaaaataaacaatattatttattttaaattccatatagccaatatattcttatagaatgcttttgctgatttttgacaaattattgtatctatagccaacctatgatagcaactgatgaatgaatgtagttctgataataatgtcaactgatagttttatatccatcaactttaatgagtaagacaaaagtgaaacaacaaagatatatgttggaacttcactcctttgctaatgatgcaactagcttgttagctgaatggaataacaatttttaaaatattggaatatttttcattttttgtgccatacacaatataatggtgatagaaatgacacacatttaaaacttaatctaatcctgggcaaacagagacactttgtctctaatttttaaaatgagacaggcatggttattaggggaaattcagccagatatcgggcaaaattcacccccaatatttcacgtagtttcctttctattttccctaagcattggctggtttgagaaataaagggacagagtacaaaagagagaaattttaaagctgggcctctgggcaagacatcacatgtcggtaggttccgtgatgccccacaagccgcaaaaccagcgagtttttattagggattttcaaaaggggagggagtgtacgaatagggtgtgggtcacagagatcacgtacttcacaaggtaatagaatatcacaaggcaaatggaggcagggcgagatcacaggaccacaggactggggcgaaattaaaattgctaatgaagttttgggcaccattgtcattgataacatcttatcaggagacagggtttgacagcaaccggtctgatcaaaatttattaggcgggaatttcctcgtcctaataagcctgggagcgctatgggagactgggccttatttcatccctacagtctccaccatagaagacggccacacccaagggggccattttagaggctcacccacaggggcgcattctctttctccgggatgttccttgctgagaaaaagaattcagcgatatttctcccatttgcttttgaaagaagagaaatatggctctgttccgcctggctcaccagtggtcagagtttaaggttctctctcttattccctgaacattgctgttatcctgttcttttttcaaggtgcccagatttcatattgttcaaacacacatgctctacaatttgtgcagttaatgcaatcatcacagggtcctgaggcgacatacatcctccccagtttatgagatgacaggattaagagattaaagtaaagataggcatagaaaatcacaagggtattgactggggaagtgataagtgtccatgaaatcttcacaatttagagattgcagtaaagacaggcaaaagaaattataaaagtattaatttggggaactaataaatgtccatgaaatcttcacaatccacgttcttctgccatggcttcagccagtcccttcgtttggggtccctgacttcccgcaacacatagtggcatgtgtctattatcccagctactcaggaatctgaggcaggaggattccttgagcccaggaggttgaagctgccactgccctccagcctggataacagaatgagatccagtttctaaaataaacaaatgaatacataaaatctacatgattacgatttttcctattacattctgtgtagacaatctacacaactgtacaactgtatagacagtctacaaaaaacaataaatcaagacctcatttgtagcagttgacaatgtaagttatatagatccttcaaaacagctatttcaaactatcaacataccagcactgaatgtgaagtggtaaagagatacactgtagcacactattatagagtatttctaccattcagacataaaagacataatctcaaaagcataggtagtagtaaaatgtagtaaaatcattaagaagtaaaaaagtttgagtatttcttgcctttgtctttaatataatttatttaattgtaagtttatataatttaatttgtaatgatagttgtgtttaacaactggcttccaaaacgcctggaaatttaaaaattgactctgggagacagtacaggctgctgcctctggccccacttgtacttgatcccagatgtaccacttccattgtatgtcggaatgcttttatgtctgttcaaccttatgacttggtgggtctggaagaatccagatcacaattggccattctactgcatggtcatttagagttgcatgagtcccgcactctgtctctactagggcccagtagtgcatcaggaatgttcgtgagtgtatatgatttattactgcaggtggcatggacttgtcccagaaccctatgagtctgcattataattctcctccagggccttgccagacactttacatggtgtcttttcctaccaccgacacttaacatagggttctgtccacacacatgcccccagggggagggcagcttgcgccatagcctggacctactgcacaatcgtttcctgctatgggcctctccaaactggcagccactggggtaccagtatgtgggctggattagtattcctaggtgtagaatatgctgtctccacaaatagtagaggcctaccaggtattgtgctttcttcttggaggtgaaagttgctggatgcaacaatttgtcatttactttgaaagcaatgtcctgctacttgagccctaaatattttactgatttgacaagtcttttcatctttgtaggatttttttcttccactctcaggagggcatgtttcttaccaaggtctccaactttagtggtgagaggagaagtggaagcaaatccttaggggtacacaaactgtcttgcaaagaagaggctattgcatcttcttcaaggttaatgaggttggggactcacccttagtagggagcattgggccacttctgcattctcaggagttccagaggaaactgagaatttactattttcatgggcatcagcctcaatatgcctatttcatatgttgatatcccatttttttcccaaccaaagtgctgaccttggcatggcagaccagcctattttgggaaattaaccttctcttgggctctgtcactcttacggattaaatctcaggactgatcttcagttttctttgctgtctggttgcagaagatgcgaatttcattatatgctaagaggccttctggattttacatttagcttttaattgccaactaattgctccaattttttcattaactttctccaaagcatcaactgggagccacccaattccactgtccctagggttacaatttctcttgcatttcccaaaagcctgaaacattgcacagtgtagtgctttcactttacaaataacattcccttttatcaccagtgaacatttttatagtggaactgataccttgtgccagcattatctgtgctccagctagctccagtgatggtatactttttccagctgggttggtgggtaatacaactccaagagctgatcttaacatatgctttctggggccactcctagcaccaactttttcaggttgggatccttaggaagcagagtctgatggatttttaaggtgctggatgtgtatatgggagtgctcttaggatcaccacctgtggaaagtaagggaaaaaaggattagtcaaagggagcagctgagccatatatggcctcagtggagacaccttggaaagatctgaagctggaatgatgatcagaattgttgctagcaagggcaggagggtcaagcgggcctccgtaacccaacacccatcagtcattggattcatgctaccctggaaagaggaggtgaccttggtggaggtgtcccttttcaggcaagacaattctaaagaggactgatacctgagggtttccttccaatagaactctcaagagctgggaataagtccactggttttgaagaagggtctagaaagctcatcagaggcccaccactaacatgcaacagtggtaatttgcaaggggcccgaaagagttaggagactttcaaatgtagaaacttatttagtgtgcagcactctcagctaattattgatagactatagctagtattttaaaatgagaacctttgaagaagacagggacgtttaggagccaaaaccaaaggccttacccagttctttgcatattgactgagcagaagcagttcaaacacctgcaaagcccagaaatgaataatcagacccaagtgactgccttgcataagaataatttgctcgtcatatcccggattgcccaaagagttgaaataaataaaaatgaaagaagtgttttagaagccagttcagctcctaggcccaaaccaagaattaaacctggggctttttgtaagtgcgggccaataaatgggctgtgaagttaaaccgccggtggctcctctaaacacacccaggcagggcaagcaggatgtccttgtccagggagacctcttctcctggctttggggaaggtgctccctgtccccaagggaggctgggactgcaggacgcagcgcccggcgggtgagagaaagtccgggcagaagatcacgaagctggcgactggaagcgagcgcggggcggggtggagagcctctccccaggtgccgctgctgttgtcccgggtgctgaaaagccgggaacttcccgagaagcagaggcacttttctccctggaaggtgggcgtaggggttccaggcggcgcacctgctaaacccgcttggtcccccgcgaggggtccgccagatgtgcccctccccagccccttttggggtctggggcgtggggatgagcacagccgggcaccacaggcgggaccgcgggttgcccttcccctcctctcctgggtagcctagcgccaggatccccactccacctgcgcgcgaactctcgccatctggtactcaagcgcctgcagtgagagcgctgcggtaaacagaaggcacccgcgtgggttcccagttttttgggggcgtggatgtattgggttttggggagcacgatcggggcattcgcagtggggaggaggaggtgttgatagccggggccgcggcgctgctggcaggcgcgagctgcctgtgctaaggccgttccctgcagggcgagttcgtgggcgaccgtgaacaaccccgacgtgcggcccagcgcctcgctctgctggggcatcttcaccaacgacttctggggccagggcatggccgagaacaccagccacaagtcccaccggccactctgcaccctcaccttcaagtgcactcctgtccaaggctccccgccgcgccttggctgggacgtgtcgcggagttgtgggactggcttttaaaaattttttccgggccctccctccgaggtcccctccattctcagttgcccacgcctctccccagtatggttaacgccccagcctctctgggcttctagggctaggtttgctaagcaacatacagagcgtcctgtatttttgtttgctaagtccaacagttctacctggagcggttcaagagggacaggttggggagtttgaatcgtctgtgctcttcagtggcttttccctgggtgcagagctggaacgcactcccatgttgccctccagacctgtggggccgctgcaaaagaaaatctgcgtgaactcaacggccttggatggagcgggcaggagctgcttccaagttgagaccctttgcagattggtgagcaactttgcaatgaggagcaggat

SEQ ID NO: 6090 - DNA, 6000 bp, Homo sapiens
cactgcattctctgtagactggtcagaaccacttcatattcaagagtctcttatcaggcataaaaggaggagcaatatcagacagttggttgatatcactggtagagtcttttgaaagggctagtttctgtttagcccttaggttagaaagcctaaaccggttagggagggaggggtgagcataaggaggcgtgcctgacctcatcccatcatgaccaagaactcagttttcaaggttactctggggtctgctttgccaggagagggtccattaggtcagttagtgggggcttcgaattttacttttagtttacaagggtatagcctagtactccttggctaaaaacttgcacagcatgttattataatgaatattgtgagcaataataatacaattgtaataactatttgtgtgtatctaaacacatctaaacatagaaaaggtacagtacaaatatggtataaaagattaaaaaggctgggcacggtggctcatgcctataatcccagcactttgggagaccaaggcaggtggatcacctgaggtcgggagttcaagacaagcctgaacaacatggagaaaccgtctctactaaaaatacaaaattagccaggcgtggtggcacaggcctgtaatcccagctacttgggaggctgaggcaggagaatcacttgaacccgggaggtggaggttgcagtgagctgagatcgtgccattgcactccagcctgggcaacaagagcaaaactccatctcaataaaaatttaaaaaaatttaaaaatttaaaaatggtacagccgtataggccatttacctgaatggagcttgcaggactcgcagttgttctgggttagtcagtgagtgtgaagagtgtgagagtgaatgtgaaggcctaggacactgccatacactaccatatgtaattgccctgtgggcttcttcctgcccgctgcacagacaaaatcaattcactgagaccatggcattgcattagagaaagatcttaattgatgcaaggctgaccatgccacatggtacatgaagctattactcaaatcaatctccctgaaaatttggaggctaggatttttcaaagacagtttggtgggcaggggcctacggtataagtgctgctgctttgttggggatgcaatcatagaggtatggcaaatgatcctcatgccctgactccacctctgggtggggtccataggactggctgagtcacgagtccagctggggtttgcagaaatgccaaaatctgaaaagacatcctaaaaggtcaatcttaagttctacaatatgatgttatctagaggcgtaattggggaagttacaaatctggtgacctcctgaacaacggttggtaatcacttaattatgcctacattttagcggaattcagggccctttcataagcctaaccttgcagcctttcattagttttataaaggtggcttagtttgggaaagggctattatccctgctttaagtttaactataaactaaatttctctcaaagtcagtttggtttatgcccaggaatgaccaaagatagcttggaggttaaaagcatgagggaggctgggcacagtggctcacacctgttaatcccagcacttggggaggctgaggcgggcagatcacttgaggtcaggagttcaagaccagcctgaccaacatggctaaaccccatctctactaaaaatacaaaaattagctgggcatggtggtgcatgcctgtaatcccagcttcttgggaggctgaggcacaagaattgcttgaacctgggaggcagaggttgcagtgagctaagaccacgtgcttgcactccagcttgggtgacagagaaagactctcaaaaaaagcaagatgaagtcaactatatcagatttctcttactgtcataattttgtaaaggcagtttaattggactgtataaacactatatgcttaggcttcactgaagttataaatatatatatataattttcttttttttttttcgagacggagtcttgctctgtcacacaggctagagtacaatggcgcgatctcagctcactgcaacctctgcctcctgggtttaggcaattctcctgcctcagccttccaagtagctgggattacaggcacccaccaccatgctcggctaatttttgtatttttagtagagtcagggtttcaccacgttggccaggctggtttcgaactcctgacctcaggtgatccgcccgcctcagcctctcaaaatactgggattacaggggtaagccaccatgcccagctttttttttttttttttctgagacggagttttgttcttgttgcccaggctggagtgcaatggcatggtctcggctcgccgcaacctccatgtcaggcctctgagcccaagccaagccatcgcatcccctgtgacttgcacatatacaaccagatggcctgaagtaactgaagatccacaaaagaagtaaaaatagccttaactgatgacattccaccattgtgatttgttcctgccctaccctaactgatcaatgtactttgtaatctcccccacccttaagaaggtactttgtaatccccccacccttaagaaggttctttgtaattctccccacccttgagaatgtactttgtgagatccacccctgcccacaaaacattgctcttaacttcaccgcctatcccaaaacctataagaactaatgataatccaccaccctttgctgactctcttttcggactcagcccgcctgcacccagggaaataaacagccttgttgctcacacagagcctgtctggtggtctcttcacacggacgcacatgaaactccatctcccgggttcaagtgattctcgtgcctcagcctcccaagtagctgggattacaggagccggccatcacgcctggctaatttttttgtatttttagtagagacagggttccaccatgttggccaggctggtctctaactcatgacctcaggtgatccacccgtctcagcctcccaaattgctgggattacaggcctatatatataatttttgtttttttttgcaagacagagtctcgctctgtctttcaggttggagcgcagtgtcatgatcacgactcactacagcctcaacctcccaggctcaagtgatcctcccaccttagcttcctgagtagctgggactacaggcatgttccaccatgctcatctaaattttattttattttttttgtagagacagggtctatgttgcccaggctggtctccaactcctgggctcaagcaatcttcccacctcaacctccctaagtactaggattacaggcatgaaccactgtgcccggccaatataaggcatgcaaaactatactaattttcctttctggatatatgctgtatgtaaagtattaaaataggcatgggattgataaataccaaagtcagcaaagtggtgacctctgagaaaggaaggagggaaatgccctcaggaagggatataccggcttttcaaatgtataggtgatgtttgtttcttaacctggagaagttatattatcctctacttttccgtgtgaatgaaatattttgttttttaaaatcttgcccaaaatgggagtaggggtagggaatttgacagacctaggtttaaattctgtctgccgcttacttgtaaaggaacttacccagtttcttaatttctccaagcctctgtgtctgtaagaggacatcatcataataaatattctattgcgcagccaaagcaagtgaaataatacggatgaaagtgctttataaagtgcaagtgctacagaagtataagctgtaattttacaagaatgcgccacaaattattgtaactaagagttattgcaagaaactcttagcattcctttgttacatactctcacagaaccttgaccctttccttcagagcacttaccttctcttgcaataacacgttaattgatgctattatttgtgcatcctcccactccgtggctctgggctcctgattctattcccaagcccagcacagtccctggcatatggtaagtgctcgacagatttttttttttttttttttggcgtaatcttaacaggattacctgtaggaagtgagaatgaaaagcagggaggggaaacaggactcttctgttttacatttctatactgttataacttttatcataaacatgtattactcagtgcaaaattatttgaatttttaattaaaataataagtgttaaataggcatatcttaatttcatcgcctctagggggaaggtcatgttttactacaggaaactgcatggaaaagggatccatgaaataaaaggagcagacaatgtctgttcctggggcactgggctttccgctgaacctccgggagtgaaggcgacgagtctaacaacctaagaatttaagaacgggccgggaggcgccgttagggggcgcgcgaaaggcggcgcgggcgttcccgcctccccgttacatgccccagtaaccccagcgccggcgaccgggagtaacctcgcgcgcgggcggcccccccgcgtccagactctcgcctgctcccgcctcagccaatgggaaggcagcgaaccggccggccggacggtcgccccggagggctcctcctgggagcatttcgaacggagttgaactgtcgccgggccacgggctcagacctttccaatggcagctctgggtcccgacgccaagccccgcccagccctgagcctccccgtgtgcattctcggcaggagtcacctttgccttacaaaccttcagacccgccctcttcctaccttgccgcgctaggccccgccctctgcgcaggtcggccaataacggggtgagctggcgccgcggggcgggcctccagccaatgcgcacgccgtgggcgggccccgagccggaattgggggtgaagcgatagcgttttgcccgcattcggggcgcgcggagctggggggtccctgtggggctcccggagttaagatggcgtcctcagcggagggggacgaggggactgtggtggcgctggcgggggttctgcagtcgggtttccaggagctgagccttaacaagttggcgacgtccctgggcgcgtcagaacaggcgctgcggctgatcatctccatcttcctgggtaaggaccctcctgcctccctccgcccctcgcggagtccccggggagtaggggaggaatggggacaggacctccctctcttcccggagccacccgggagggctgtgccgggtgcgggtgtgaatcctgaagcacaccaacagctactgagggaagacagaagtcctgtctcgagtctggggcgctgtgccctctgaacctcttcatctttctcttcaacccctgccatgccctctggcctctcagtcgggcccccgccctcttgtgccaggctctacccttgctcccacgacctgtctttatttgtcgctctgttgagttccactgtctggccatgtgtcctgctctgtcattaataaccaccccgcacacgcgcgcatctcatcggtaggcatagggcccctaactttagccctttcggccttttcagccccatattccatatttcatattctgagcgcctgttttgcttattgccagcttatattatactttcgtctcttttctgtcccagtcctactattttctttttataccatgttgctttttttattttccaagccacctacctgtcatttaccctggaatatcattttaatgctggacttgggaaacaggactaacaacctccttaaaatcgatccatactattccaagcgtttattacacgtgtggttcaaaggatgtggtgtatctgaatttatgccacaacaagctgtattacaactggtttataggcttttttaccgcatcctcactccatggtttaatacatggaggtagcatagtacaatggaaaaaagtatgggttttgaaggcaaacaaatcagatccagccttgt

SEQ ID NO: 6091 - DNA, 6000 bp, Homo sapiens
gctgggcgtggtggtgggcgcctgtaatcccagctacttgggaagctgaggcagaagaatcactagaacctgggaggcggaggttgctgtgagctgagattgcgccattgcactccagccagggcgacagagcgagacttcatctcacacacacacgcacacacacaaagattaactcttcattcaaatgtctttggtataagtctgactttaatttaaaatgtaaatttatacaatggcattttagtgcttcctctgacatttcctataagttgtagaggttgtataaaacactaaaagtagctttttgatttatgtattcaaatgtaaaataacatgtatgttattaaaattacattcagatgaaaatagtgttcttttctattatacacaataatttctaagactatggatattaggtttgcaatgttgcagcagttttcaaagccagagattccactctttgaagaattctggtaaatccttgatattgatgtggttcaggacatgctgccccaaaatatgacacctttgacttagtgaatattttaagccaaaggaattcaagaaatggcaggtgcaggaaggactttctgatcttcctatgaagcaggtcataagaccttcatgtgagaggtgcccctcctatcttccaaggagattgtccttatttccaaagctgcagtgattcccagataaatatgaacaaacaggccttgctaaggttcccccagtttacaactcttagttcatacccatttttatcctatcatatttttctatgtttctttattcttcagcaaacatactttgaaaacaatcaggtttaactacttcttcgggtcttcaattccttatgaagtctcctgtgtcacgaaaaacttatactaaacgaatttgtatgcatttctcttgatctgtcttttgttacagagatccagccaggaaccaacaaaggtaggaagaaaagacagtgttcctctcctgcaatattttgtattgcaatgtacctatgtatacttttatcttgtagtaatatactgacaaagtttattgcctgagtgccagaaaatgcaaggtcacaaataatttttgatactcttaaattttattaccgtgcagatgccacagagagacactttagggatggaaggaaagacagtttacctccagggagatcccctttttcctcctggggctgcagccgggctgccactgttgcttctgctgccaccagtctgggcccaggtctgggcacagccccaggctgtccgacacctgccctgtcaggtgttgggccagcttcttagagcacatgttgcctgctgtaccacaggcccatgggttggggggtaatttaaatttttttgttcttctttctacttttctgtattttcttcaagagcagtaatatttaaacaactagacaacaaaaatttatgttttaatgtaaactatagtatcatttcttttgtaaacgatattatcacctttgtaatattgcatttggccatttatataggttatatttgaataaaggacatcattaggctgaaaaaaagcacagggagcagtgttaaaataaaaagattattcaacaatacttgttaaagcatggtagaatttattcaggaccatcatgatagttatagggaccactgcaatgcggtccttcagtggggaagacagactggactcaacttcaaatacagcaagaaccccctacccttgatatctgatcactctcttgccaaactgacttagtagtgttctttgctaaaactggattttacaaggaagtacaatgatggtgctaggaagtttcagaagactaactaaagtttggtcaagcaaagaattgttgttagcagtaatttgaaattggttttattacaatagcttgcccttgatttatttttagttgtgtcctaatctctttcagaaatatggtccatcttaatttgcatgagtgacttaatctatatgagcctcagagaggtacttctacaataattcatgttttattataaattgcttttgagtggacacaaggcgtttcaggaggtagtattgcgctaattatcaatcctttaaaaataattagaggctaagtaacaagaattaaatctaacttccttttgggcccctttattagtcaagatggatgttttccactttaagagagaagcaaatggcttgatgggctggcatatcaatgtaaacctctctctgacatcagtacttctatacttttcctaccacacagagcagtattgaatcaggaggtgatgaggctgcaaagaaactaattattattattattattattattattattattatttttagagatagagtctcacacggtccccaggctggagtgcagtggcgtgatcttggctcactgcaacctccacctcccaggttcaagccattctcctgccttggcctcccaagtagctgggactacaggcgcgtgccaccacgcctaggttatttttgtatttttagtagagacagggtttcaccatgttgaccaggatggtctcgatctcctgacctgatctgcccacctaggcctcccaaagtgctgggattacaggggtgggccaccatgccaggcccgaaggaactaatttttaaaaatattcactgatcagttgtccttgagaagacttgaagcatttcactattttaagtcaatctcaaatttgtcatctgagcaaaatagaataaagatgccactgaacctagaggaaagattaggtaaccaggaatcctactttcaggtttcctttatctcttctttttatgatctctttggagtctcagtcccaagtcctgcactactctccatggtcatggagcactctgatactgtttccatctaaaaaagaaaacaactccgagaagaagggggtagccagagctcttccttggaaaaggatgacttaaggataatttgaggaaggaaaaaagactttctttctataaaaatctactattagaggccactcttttcttttcttttttgaggcagggtctcactctgtagcccaggccagtcttgaactcctggcctcaagcaacgctcctgccttggcctcccaaagtgctgggattgcgggtgtgagccattgcacctggcctagagtcactcttttgggttaagacgttctctctagaaagcctccgttaattataggtaaggattgatacattgacctattacctcaactatgatttcagcaaagataatttcactatcccaatcagctgttaacttagaaagctagacttttatggtgttaaccacacacacatacagacgcacacacacgagcagctttgggtcttccaatcctatacttagcacattgtagcacaaagaatctccttaatatatttttattaagttaataggtgaataggaaaggctgtagtgtgttatacggggaaatagactcaggtgtgtctagatattaaagtcggtatattaaggttaccaagcgtgaaagattttgatggaagaatgaaaacatccatgtccaggacttccagtttcatttctcagtcactaatttcaagtcaccaaataaacaaagtgaaaatgggtgaaacgtactttgagttacaataagtttatcttaattcattgacttttcaactgctcagatgtcttaaaattttttaaaaagtaagttgttatagtaaagagccacacaaatactcatagcagaggaacaatttctggattatgtcggtgagctttttaagggtttggggaggatgagaataaaagggtgactttttattttcagtttttctatctggatgtgtcaaattcctgataacttctaacactcagcaatggaaatttagaaggtgcctgaaagaacaaatagaattttcagacctggagaaattctagtaatcatcactctgggacatattattaaaattagtattttaaaaaagaaaacaatctttcagaaagacaggaagtttaggagccaaagccagaggccctaatacaaatcgcccccacctccccatccccccatccccaccttcttccccgccctgttcaaacacgcccacagcccaggaaataatgagacccaagtgatccagctagatagaaaaagtagtttgcttggcatctcccaaattatcttgagcaaacaataaaataagaaatgtttcagaagacaattcggctcccaggcccaaaccaaaactcgaacctggtactttttgtaagtgcgggccaagaaaggggctgtaaagttaaagagccggtggcgcctctgaacacacccgggcagggcgagcaggatgtccttgtccagggagaccccttctcctggctttgaggaaggtgctccctatccccgcgggttcctccgccaagcgggacgccgcgccgggcgggtgagagaaagcccgggcaggagagcacagagccggcgactggacgcgagcgcggggcgggtggagagcgtctctccgggcgccgctgctgttgtcccgggtgctgaaaagccgggaacttcccgggaagcagcggcacttttctccctggaaggtgggtgtgggggttccagactgcgcacctgctaaaccctcctgggtcccccgggaggggtccgccagatgtgccccttcccagccccattcgggggagaaggatgggggcgggggcgtgggggtgagcacagccggacaccgcaagtgggaacctggggtgtccttccccgcagctcccgggcagccgcgcgccgcgaaccccggtccacctgcaagcaaggcgggccgggggcagagggcgccgggctgtgcgggggaaccggcccgcgtcccgggattggggggcggtggaagagagagcgagcgggcatgcgcagtggggcggaggaggtggcgatggccgggggaggcggggggactgctgtttatttgcagctgggccaactccgcggcgcaggcggcggcggagcgcggggagctcgcggcgggtccagctgccgcagcaccatgcccgagcccccctccgggcagacgccgcgcgccgccggggccccggtaggggaggatgccagacgcccgggagaggccagggcagcagcggcggcggcggcgcgatggtggtgaccacctctgcccgaggcggcggcggggaccgcacaccctcccggcggcggggctgcgggctagcgccggccggggccgcggcgctgctggccggggcaagctgcctgtgctacggccgctccctgcagggcgagttcgtgcacgacgacgtgtgggcgatcgtgaacaaccccgacgtgcggcccggcgccccgctccgctggggcatcttcaccaacgacttctggggcaagggcatggccgagaacaccagccacaagtcctaccggccgctctgcgtcctcaccttcaagtgagtccctcacctcgcgctagccgccgctgcctcctctaccctccgcccgtccctcggaccgggagaagttgcgggactgacttgggggcatttcatttttgccgccctttccctccacgcctccctcctctccaggatgtgcatggcactttgctccgggatccactgcccggctaatctgggctctcggggcggttcgggaggcgccggctggggagttgggatcgagtttctcaactgtctgccctctcagcgggcttctctctcgaggcagggctgggagcgggctggtgaaaccgcctccgcaccccttcgcctgccggatcgtgaccaagtgggactagcgcggacccagagggttccggaggggtggcggtggtggcgatgcttccaagtagagaatttctcggaggctgttgggcagctttgcagatgagaagtgtatcagccccttaagggtttcgttcagatgagacgaggcgggagccttgagctgacagggctgcgtgggttcaggagagggagcagaaaactctcccgagccccccagc

SEQ ID NO: 6092 - DNA, 6000 bp, Homo sapiens
gggtgctgagcatgtgcatattggatctatttttctgtatgactacacttttaaaatgaggtatgttggctgggagcagtggctcatgcctataatcccagcactttgggaggccgaggcaggtggatcactcaaggtcaggagtttgagaccagcctggccaacatggtgaaaccctgtctctactaaaaatacaaaagttagccaggcctggtggtgtggacctgtaatcccagctactccagaggctaaggcatgagaatcacttgaacctgggaggcagaggttgcagtgagctgagatggagccactgcactccaacctggacgacagagtgagactccacctcaaaaaataaaatgaggtatgtgactacataaaaaaattaataaataatgtatcaggccaggcgtggtggctcatgcctgtaatcccagcgctttgggaggctgagccgggtggatcacctgaggtcaggagttcgagaccagcctggccaacatggcgaaactctgtctctactaaaaatacaaaaaattatccgggcctgatggcagacgcctgtaatcccagctatttgggaggctgaggcagaagaattgcttgaacccgggaggcggaggttgcagtgagccgatatcacgccattgcactccagcctgggtgatagagcaagactcttgtctccaaaaaaaaaaaaaaaaatcaagtatcagcaaaccttctaaggttacattttattcatttttattattatttttttttgagatggagtctcaccctgttgccagactggagtgcagtggtgtgatctctgctcactgaaacctccgcctcccaggtttaagcgattctcctgcctcagcgtcttgagcagctgggataacaggcatgcgccaccatgctcgactaatttttgtatttttattagagttggggtttcaccatgttggccaggatggtctcgatctctcaaccttgtgatctgcccgcctcggcctcccaaagtgctgggattacaggcgtgagccactgtgcctggcctatttttatttttttaatgtttaatttttgtgggttcataggaggtatatatatttatggggtacatgagtttttttgtttttttttttttgagacagagtcttgctctgttgcccaggctggagtgcagtggcacagtctcagctcactgcaagctctgcctcccgggttcatgccattctcctgcctcagcctccccagtagctgggactacaggtgcctgccaccacgcctgcctaattttttgtatttttagtagagacggggtttcaccatgttagccaggatggtcttgatctcctgactttgtgatccgcctgccaaagtgctgggattacaggtgtgagccaccatgcccggcctcatgagatgttttgatataagcatgcaatgcataataaaatcatatcatggagaatggagtatccatccccttaagcatttatcttttgtgttaaaaacaatccaattacactattttagttatttttaaatgtacaattaagttattatttatagtcaccctgttgtgctaccaaatagtaggtcttaaggtcttattctttttttttttttttttgtacccattaatcatccccacctccctccctaaggttacttttttttggttgaggggaaaggatcttgctatatctcccaggctggagtgcagccttcacccccagggctcaagtgatcctcccacctcagcctcctgactagctgggaccacaggtgcatgccacgactcctgtctaactttttttgtattttgtagagacagtgtttcaacatgttgcccaggctggtctcaaactcctaggcttaagtgatctgcccactgtggcctcccaaagtgctgggattataggtgtaaggttacttgtttttttttttttttgagtcagagtctcactctgttgcccaggctggagtgcgttggtgcaatctcggctcactgcaacctccacctccagggtgcaaaaaggttctcctgcctcagactccgaagtagctgggattacaggctcccgccaccacactcagctaatttttgtatttttagtagagacgtggtttcgccatgttggccaggctgatctcgaactcctgacctcaggtgatctgcctgccttggcctcccaaagtgctgagattacaggcgtgagccactgcgccccaccagttacattttaaagagaaaaaaaagatgcttattgaaagaacattactaacaactgtcgaaattgtgaaagtgacagcaaatcagtagagtcagtcagttgagccagatagcctctgagtctgtagttctttttttcttttttttttgtcgcccaggctggagtgcagtggcacaatctcggctcactgcaacctccgcctcccgggttcaagcgattctcctgcctcagcctccccattagctcggattacaggcgcctgccaccacgtccagctaatttttatatttttagtagagacagggtttcactgtgttggccaggctggtcttgaactcctgaccttgtgatccacccgcctcggcctcccaaagtgctgggattacaagtgtgagccaccgcgcctggctgagtctatagttctaaacaatcttcaacacataatagaaaatgtgaaagagacagacccaggtccaagaacgatctgaacttctcctggaattcatgatcaaggtggacagctagaagtatgtcaatgccagcaattgtcctcctttggatttagccctctaggattttaatttccttttctcttggatattctcttatctaaggacaagccaggctcacctttcttttattaagttacatatgcatagctggcatatcactttctttgcctttcttggttggattggcattttcccatgcacatatttacatatatttctcacaatatatttatataaaatgaatttcatcacttttttattgtttgttttcctcctgtatttgtgtttgtttttttcttttgagacggagttttgctgttgttgcccaggctggagtgcaatggtgtgatctcgcctcactgcaacctctgcctcccaggttcaagcaattctcgtgcctcagcctccagagtagcagggattacaggtgtgtgccaccacgcccagcggattttgtatttttagtagagacagggtttcaccttgttggccagactggtctcaaactactgacctcaagtgatccacccgcctcccaaagtgctgggagccacagtgccctgccctctggtttcttttataatgaacactttaggaataaaagcaactactcttgctttgcttgtgactttgttttgttttctccctttatgcctctctcctctgagaccttccctttcggtctgttcccggattaacatgcacaatctgatgatgcctgtctttctacagaaagtatttctgtataaatactggtttacaaacctacagaacgcctaggagtgcgaagtaagcacagaagtctatcactgggagggaaagaataatcacaagggttccaatcctaaacgggaagccaaggtaacaagacctagcgtttattgagcacttactatgtgccaggcaaggttctaatgccttacagtacatatttactaacctatttcgtcccaacagtcactctattcagacaggtattgccccagataagagaaacggaacagaagcagcttgtccaagatcacacagcagagctgattccagtgcctgcgctatatactattacatcctcttagtcactgaattcttctgattaatttgggaacatttcctgccacaaacgagtgagtcaagaggtagctaaagcatggcactgattattcaaattgaggtgctcaccatgcttctagaaccatggatatgagatggctttacaggcatgatcactttcagacccgcattttaggaatgaggaaacagattttcgagatgttaatttgcccaaagtcacccagctagcaagcagaagagctggggctgtttgaatccaaagtccacggcactcctaaccgctgctcaacgctgccccacaagaacgtccagctggcaagacccgggtggggctcgttgctctccccgcttcacctccctgcttcacggccgggggtgtgctggctaagttcgctcatctgccaagcttcaggacacagacctatgtgagcaagcgataaacaaatgcaaataaatgtaactttccacattagctaaaaattcagagaacgtcaagcccagggaaatgggacggatcccagttagcccgcggctccaatctggtccccccccaaccccgagcctcgcggcgagaaaggaagcggctccggatggagagtaaagtgacaatcggagaagggcaggctgcctttcctcccgggggagccaaggggacctgcagagggcggtttctctccgcttttcctgtcccaccccgtcggcctgccccccaccccctccggcctctgcgccaaccccgcgcgccacccgcggcttcctccgctcggggtcctcgttcggcctctgctggcctccgcgactccgcggtgcccgcccccgttgagttcaaaaggacgcgcggagcggcgccggcccttcaccagcagcccgtccgactggaaaggtgagcacgagggaagggcgggggcgccggagagccgggtcgcccacattcgccgcagccacctcggccgtggcaggaaccgaaacccggagcggccgaagctcagcgctccgctggggcagagggtcgcggcggctgggaacgccgctccccgacgcaccggccgcccccagcgcagcgcgctccgcggggtgctggtaacgcggggggctcggggcgggggcggggacgggggcggggccgcggggcgaggaccaacccagcccgtcgcgtccaccccgcgttcgcaggggcgtcgaggatctccggggcgcggggcgcgggctggggcccagtgaggcttggcaggctgtgcgcggaccgcgccctggacggcgaaagcaggcccggagggggcggccagtccggcgtcccagcgtccgaggcgagccagaaggcggcccacggccgtcgcctcccggtcccggcccggctactgcgctgcgcccactccgctctggagcctgggcgcgggtcctgaccttcccggccctctcctgacacctggtggatggcgtcaccagaactcctagctgtggaaccctagggtacctgttaccgcgctttggcgaaactgggttcgctgctgatttgcgaacctttgcctgactttctcaggccttgagagatctaagtaaatttggtggcccattgaaaggacctggagagagcgtatgaaggtaacaccccgtcaaactgcatgcggcctcagacctgctcctgtggagagctgttggtacctggagcctgaggagatattcagggaaaccagaagaggacaagagaaaaaggggaagggacttgggagaacctggcaccagaggctttcctgggacttccaggactcaaagccataggggcccacccgctacattcctgtctttgcccctcttcctacagatctgcctcttctccaagaaactcaaccactagtgacaatgaccagcctcctgactactccttctccaagaggtaggtgaaggcctttcctaatcccagtgagaaagaattgttcaacatccccttccccagaccagtcctggaagcctcagcccaggtgggaagactcccacctctctctgcctgcctcacacaggaagggcctgggaggaagcaggaactagagtgtgccccttagtacggttttaatctgaagtcacatggacatggtgacttcacaaatctttgtaacctcggtttatcaaataattttatgtcggtaatcccaggactttgggagactgagacaggaggatctcttgaggct

SEQ ID NO: 6093 - DNA, 6000 bp, Homo sapiens
gttaaaaagaaaataaagttactgttaaggacacttcctgggagtcataattgacaattccacttacatgccattggacagaacttaatggtatggcctaactgcaaagaaggttgggaaatgtctacttccgggtggccatgtgtccagctaaacatggaaggttttactactaaggatgaaaagatatataggtattagaagacaactaatgatctctatcatgccagatgtataacctggagaggaaagaagaaaggcagattattgaggagtgtgtgagggcactgcattaacttgtaggactttgtaccttcagaattgttctttcccaaacacatctctacttctggccccacgccttgattcctgctaagtccacctgaaaaatctgcccacctcccactccccatgctcaatcctaccatttttcctattaatattcggctcatccttcaaatcccatctcaaatgctatgttaatcatgacgttattcttgactttctccaaagggatagaacttgtccctctagaatttcatgtatagtttttctagggccttagtctcctcttaacaccatgttgtcttaggtcattagtacagctgggtactagagtataaattatccaagaggtaagacagaaccttccccaattattttctaggtagcacagtgtagtagaatgcatctaataaatatctgcaaattacatcgactatttcaagaaaggaaaggtatatgtaaaggaaggggagaaaacaatgtaaagtctttttgcccttttaagggaagcatttgtgcaacaattgaaatttcccgtaaatgcatttcaaaacatatctttgctaatgttgccattcctttttagaggcctaatttggtgtgacttgttttgctgtacaaaccgtggttgcttctcacttcccaggttgtcctaaaagctcttgctaacacaacaaggaaaaataacattacagtggttaaaatagacaaaagccaacagcaataatcatattagctaacatgtaacaaatgcccaatctgtttcaatcacagtgccaagcagttcccatactttatctcatttcatcttttcaacaactgcacgggccacaggtgcctcaattatcctgaggggattgagggattaagtaacttttccaggtgaatagcagggctggaattcttcctgttcatatggctctataaatataggtattatttcttttcataatattttatatagatcatcttttcatctttaagtctcctttggtaactaaaccctgatattacccttcttttattattattattactattatttgtagagacagggattcaccacattgcccaggctgaactcaaactcctgggctcaagcaatctgcttgcctcagcttcccaaagtgctgggattaccggtgtgggccactgtgcccagccttacccttcttttatagatgcagtggaaagcctcattttttgaagcattctcaattccccattggatatcaataatactccaattgcttgtaaattgcaaattttgtacattctatatttggggtgagtggtatctcagaaaacaattcctactgtaatttattttttgatgaatatattaatggaggaatttatttgtggttgtgtgtggatatttttatttaaacacaagtggcataaactctgtgggttcctggtaatcaataatagaagatgatgataatgacgttcttattaaaacaaactatcctttctccatactagataaataagatgatttgactgtgtattatttgactaaatgaattctatgttatctattgtatttgtcaccctagatttggtgacctcaaaaaatgtttgcggctctgtgtggtggctcgtacctgtaatcccagcactttggaaggccaaggcaggtggatcccttgagctcagaagtttgagaccagcttgggcaacatgacaaaaccccatctctaaaaaaatataaaaattagccaggcgtggtggcgggcgcctgtagtcccagctacttggaggctgaggcacgagaatcgcttgagtccaggaggttgaatgtgcagttacccatgatcatgccactgtatccagcctgggcaacaggacatttgccaaaaaaatccgaaaatgcaaatgttgatgacaaattcttacaccctatgaattaggacctatgcatgtgtaaggtattagatttcatagtttgggattttttggttttattttgttttcctttggcttgcaggggccaacacaaggatatccagaaatatagcagttttttgttgttgttgctggagctaaatttcgtcacttttgatagagaattgaaccataccagcatgctaaacccatcaactatccctcacacctctgaaatctttactttcttcttctctacctttttgcctctgagtcgatccttctgcagaaactttcctcttctccagaagccctttcacctgtatatctaaacatgttaaagttttctcttgccttaaaaagcaaacattaaaaaaattctttctcggccgggcgcggtggctcacgcctgtaatcccagcactttgggaggccgaggtgggtggatcacgaggtcaggagatgcagaccatcctggctaacacggtgaaaccccgtctctgctaaaaatacacacacaaaaaattagtcggtcttggtgacgggcgcctgtagtccttggaggctcaggcaggagaacggtgtgaacccgggaggcggagcttgtgtgagccgagattgcgccactgcactccagcctaggcgacagagcgagactccgtctcaaaaaaaaaaaaaaaaaaagctttctcaatgctgcattcctctctagcttcccctttatcttcccttctcacattggccaagcaacttgacagtggtttatgcttcacctccctcttctcttcattgctcaatccactactctctggcttccatcttcaaccaaatcacgacagtcaacaaaatcaccaccttccccattctcaccccactgccaaatctagagaattttcacttcttacttcggtggtcctcgggactgcatctggcattgttggttggctctttctggtttatttcatgggtttctcttcctctagccctttttaaaacaataaattctggtgttctctcagcttccaacctgttttcattacccttctctttacacactcttcttgggttgagcttacccactgtcataatttcatccaccacgttatgtgacgtggtcatgtctacctggcacttccccagagctgtggacttaaatatccaagtgactcatggacatctccacttccactcccataggttctcaaatttcatatgtccaaaattgaatttagcatcttccccttaaatctgtctgatttagtttgaatatatgtccctaccaaatctcatgttgaattataatctccagtgttggaggtagggcctggtgggaggtgtttgggtcacgggggcagagccctcatggcctggtgctgtcctcgccacagtgtcttgtgggatctgattgtttaagtgtgtggcaccggccccgcaatctcttgctcttgctcgggccatgtagaggcctgccccttcttcaccttctgccatgattgtaagcttcctgaggcctacctggaagcatactggagctatgcttcctgtacagcctgcgtaactgtaaaccaattaaaccccttttcttcccagtctcaggtatttatagcaatgcaagtacagcctaacatactgtcctcttcatatagactactacctctggttaatgactagccagccactgaagccgaaagcctgggccaccttcgtctcctctcaatctgtgaatccacttatataagtattccttctattcattccttcctctctatcctaacttactacttacctatgtcaggcccccagcatcttctgattgagccattttaatagtttcctaaatctcctgctaatggttttgataccgcattttataacatgagtctgaccatgctttatcagtcgcctgctgaaaactcttcagtgggtcccccattaatgcacccaggattaaaaggccacctatttaaggtccttcgaaacctagcctcttccaatttttccagttttaattttgaggccccaccctaaaggcaaggcatccttcaatcctccttcacctgccacaaaggccccagagctgagctagatgtcccagctctgtactcccattgcgaccagtgcataacttttatagaaattcattagtttctaagatgggaatgttggctttctccgtttgagagatgcaggttctggggatatacataataaacactgaaactgacaaaacaactgtttaaaccttgaattacttacagctaaaaacaaaaaacaattactgtgcctccccgtcggggaatcgaaccccggtctcccgcgtgacaggcggggatactcaccactatactaacgaggaaccgcacgaaagaaagccttctgataggccttttctacgtttttgctccgccccgccctcgctatatgcaaacaccaatgaacctgattttcttacgtttgccaccacagcttccacgaaagttgaacagagccaaaatggtagtgttcagttttatctccccctccattctcatcatttcccttcggccacccttctaactgcccctactcccctcctcttcttcagctccaggagcacgcttggtccccctcaacatccctaacacacacgctcccaggtagccaagcgcccgcttgccgcgcggcaccatggaacttgtagttccttcacccatcccccaacgctcgtctgactttaagaaacttcctttcccggcgtgcaccgcgaatccctcctcctcttctttacctctctccctcctcctcaggttctctatcgacgagtctggtagctgagcgttgggctgtaggtcgctgtgctgtgtgatcccccagagccatgcccgagatagtggatacctgttcgttggcctctccggcttccgtctgccggaccaagcacctgcacctgcgctgcagcgtcgactttactcgccggacgctgaccgggactgctgctctcacggtccagtctcaggaggacaatctgcgcagcctggtacagtggggcgcctgcccagtgcccgcctctcccgggctccctgcccctcgaccctagtccttgcgggctcccggatctccggctcaccccgccgcggcccctgcctagccccacgtccccgtctgctcttctgtagcctccatccaactcatgttgtgcacttcagcccccagatctctcacagcaccccttctcaaccccgcttacgcctctgcatcccttccctcagcccccacttatacgtatgtctcctccgcccctcgcctggatcctctctccgaggtccctgggcacatccagcgcctcgtccactcctctcaactcacccagcccttaggtgtcatctttgcagtagcccccataattttagttcctggctctaattactccatggcctccccattgcttcggcctgcggcccagaacccccttcttcaggccccagacttttcccagccccctgggcaccttcctcagtcaacaatctcacccaagtctcagatcccatgtcctgtcgatccctgatcccacggttgcctcccgggaacacttatttcaatccacaggtctgcagggcaccacccatccgtctccctcctagttccctggatctccctgctagtcgttctcaagcctcttaggatttccagccccggccgggcaggcctcttctttccgccctactttgaaactaacagtccctgcttgctaactctaggcgcagctctctctcttcagggtcctttctactttttaatcttatcaactttcttctaataatttaagaacggatgggacgttcaaat

SEQ ID NO: 6094 - DNA, 6000 bp, Homo sapiens
ccggctgggccccacaacaggccccccgaactagagaacgtggaacatgagtctcttaggatgaacgaggagccgctggagcggactctcagagcgctacctggtgcaaacctgaaaatgcaagcgtgtgtgatgttcctcaccctgtgtccaagtgttctcattgttcaattcccacgagtgggaacatgcggtgttaatatacatatgtaacaaacctacacattgtgaacatgtaccctagaacttagagtataattaaaaaaaaaaaaaagaaagaaaatgcaagcgtggaggtcagagcggtcattcacacagtcaacaagcatttatggagcacccatggtgttccaggcactgtcctgggtggcgaagttcacaaaacaggcagagctcctggtgcctgaagacctggctcctggacccttgcaatgacaataatcttcaggagctgcctggaaggtgctgcactgccacccacctcagggcctttgcacgcactgatagtgactgggcactcccttgcgtccttgcttttctaaatgcctcctcctcatctttaagagcagccgtaccgtcacctcttcatggaggcccctatgaggctcggggccagaatagcctcccagacaagtgctcttttggcccctgaactaccgcttccaactcttagcccactttgcagttagatattcatttgtttgtttacttgctcattgcaagtttccccgctactctgtaaactctgtgtctctgtttgtccatcactgcctcccagggcctgaccttggcctgtgtgcaattaaggtcaaaagaaatatttgtatacatatgtacaactattatgtgtccataaatttttttttagaaatttaaaaatacattggctgggtgcagtggctcatgcctgtaaatcccagctacctgggaggctgaggtgggaggatcgcctgagcccaggaggtcgaggccacagtgacctgtgattgtgccactgcactgcagcctgggtggcagagtgagacattgtctcaaaaaaaaaaaaagtttaaaatatattgacataaaaaaagaaatatttatagaaggaatgaaatttagagtaccagagaattggagtcttagggctggcaggcttgtgccaagcatctagtctaaccccacatttagccacagcccagggaaaggcagtgatttgctccgttgcccacagtctttgcctgagctggggctgggacttggggctccttttttgcctctgatcagtgactgacattgtcattgttctgtcctcagattgtgggtagggatgctcagtttaaggacagcctgtgtgtgtgtgtgtgtgtgtgtgtgtgtgtgtgtgtgtgtgtgtgtgtgtgtgtgtagcgtgtgatgtgtggtgtgttgacatggtgggaaagcccttcaacaggacagagggaggtaggagccctattttcgggaacgggccccttgggaggggggtggtcccatttcgagatttgctgacacgggggccagtgcagaaaaaaagggctctgacctcccaacatgctaactgattctgggcaggttgctccagcatgaactgcagtttctgtgtccaccaagtgggcttcctgcattcattcatttccccacaagcacataaagggcctgctgtatttgaggcacagtgctgggggagcaaaacccagtgatttgtgggtggatgattccagacccatagggagacagtaatagtaatattcaacttggggtggcaggcagaataatgcccctccccacgaagatgcccacagcctaatccctggaacttggaaatatgttaccttttttttttttttaagatttgaggtcgtgctctgtcacccaggctggagtgcagtgtcatgatcatagctcactgtagccttgaactgctggtctcaagcaatactcccacttcagcctcccaagtagctgggaccatagggatgtgccacacccagctaattaaaaaaaatttttagagacagggtctcactagattgcccaggctggtcttgaactcctagcctcaagtgatcctcccactcagcctcctgagtagctagggttacaggtgtgagccactgcacccagctgagtgtgtcacaccttatttggcaaaagggatttgccgatatggttaattaaggctctcagggagattatcctggatcctcagggtggggccaacgtcaacactaggggccttcaacgtgggaaagggaaccggaagagagatggtggtatgaaaaggaccctgcctgctaccactggccgggagggtggaggaagaagcctaagagccaaggaatgccagcagcttctagaatcttgaaaaggtaaagaaagagattcgcccccaagactccagaatgaacgcaagccctgttgacactttgatttttagcttcacgaggcccgtttgggactcttgaccaaaagaactgcaagagcatgaatgtgagtggcttctggcctctaatctgtggtcatttgttacagcagcaacagggaactatacccttggccttggcctgtgcttttgacattgctgagcacgtgcatgctccctagctcctctgccttcccctgccagcttccgagtagtagggagtctccatctccattttacagaggaggaaacagaggctccatgtggggcaggacatggtggaggcaggatttgaagtgggtctgtctgcctctcgctagatgaatgaatgaatgaatgaatgaatgaatgaatgtaaggggctgctaatccacgggactcctcaggtcagccagatgtcctggttccagggcctgccactaactcacctcagatccctgcttgaaccattagaactcacctgcctcactttccccctctgtgaaatggggctccaacgcctattcaagctactatcattgggggcattgtgaggccacagatcccagaacaaaccctccaaaccctcattgactccctactgcctcctaggtgaccttccaatactttagcccagctcctgccaatgtctccaacacttactacccctccttcagggggatgctctgcccaggagggagaagcaaagaacgaggggaaggggactccgagagcttccctcaggctgggcctctggggccacctgtgcagggagcaggctctatttgggttggttgtgtccctgctcctcgacatcccaaggtccccagactgcagccctcagaatgttgggtaaggtcttcttcccctgctggtgggccctgggggaggtttggctgcccctgaccacccgatgtctggtctaagacaggtcaggtaggcctggaacacccctggccaccttaaagcgggcacagctgctacaacatgtctgtgggtggccacttgcccctgggacatgtgtgtgcatgaatgtgtctgtgcgagtattggtggatggtcccctgttccctcgaagatgcagggtttggggtgatttccagagaagatgggaaagtctctgattttatttcccaagcaaatgactgtcccagttttctgggggtgagcgagggctgctgggaccattgcagggaacaatgataatctaggcttggttcctacccagagagcacgcactcatccttcatgcactcccctgttccaaaccctcactggctccgtactgcctccgaccttccgagactttagcctggctcctgtcaacatctctgacccttactacatgatcctctctttggtccatgctccagcctaatctaattgcggtggcttgtgcgtggtggcattcccagccaccatacctttacccacgctggtccttccatgcggaatgcctttccagggcctgctttgcccgcttctgctcatacacaggcatgccctccaggatggcttcctacctctttcccttgggggattgatctctctgtcttggggttctcggagcccttgacctgacccctttctgtttggcaaaaaagtaatttacctcggtgtccttctccctggtagtctgtgagctccccaaggctgggctgtgcctgattcacctctggaacttgcttagcacagtgcgtggcctgctgcaggtgttcattgagcacttgccgaatgaatgcatgaatgaatgaatgaatgaatgaatgcaaggggctgctaatccacaggactcctcaggtcagccagacgtcccggttccaaggcctgccactgactcacctcaggaccctgcttgaaccattagaactcaccctgcctcactttccccctctgtgaaatggggctccaactcctattcaagctactatcatttgggggcattgtgaggccacagatcccagaacatcagagtcagaggtagcccagaaagcttcccacccatccctacaaatgggaaactgaggtctggagagggaagggcagagttgggctccctgtctcaggctcggacccaccatcaggcctgtctctaaaacgaatcccagctcccacgctgcaccctgagcctggaagcctgagccacacaaggacggggaattttccttcccacttccagaggcctctgaacctccctgagcttgtcccctttggagggtattgggcagcagcgtgggcagaaccccagctcactgtctgggggagcgctgcaggacagccttgtctgtctgtctcagcctgccctggggacccgaggtcagggaggaagtgccgcatctggtcttccccagagcgagagtgtgagcaagggtgggattgcgtgtggcccgagagtagcccctcccctccccctgtccccaccccaaaccctcttaatgaaatcaagctggccctgcggcccagccggggagggaggaaggaggagggacgggaggagggacgggaggagggagggcgggcaggcgccagcccagagcagccccgggcaccagcacggactctctcttccagcccaggtgccccccactctcgctccattcggcgggagcacccagtcctgtacgccaaggaactggtgagtcctggggtcccctcctctgtcctgagagcctggagctatcttggagcttagggactggggactgttggagcactctggggggcctctctaagtgtgtgtgggctttgagtgtgtgtttggtgttgtgtgcatgagtgtggtggaatctgagtcccgtgtgcggtgctggggtgggccagggtgggccggagtgttgtgtgtgtgcggctggggccttggtgtagggggtgtgttgcttccacttttctgcaagtggatgccaggctgttgcttccaggatctgtgtgagggtgatgtggacggtattgtcctgtgtgcagggatcggctgtgtgtcagggggttgtgtatgtatatgtgttgtgtgtccgtgtgtgttctctgtgtattgtgtgcatgggccatgagagtgctgttgggtgtctcagtgctgtgtgagtcggtgtgcctgtgttgtgtgtctttatattgtgtgtccatgctgctctgtgtgtgtgtgtgtgtgtggagggggattgtgcccccaggacccccctccccatccagacctccagggcccaggtccctgtccttggctggccctggggtcgggggcatgtgcagtgctccaaccagaacacccctcccccacaaggccactgattgaagccaggtttccgtgggccgcccctcccccaaaggccaccagtctctgggtgggggtggggcagcccccggtcccctagcttcaagtcttggggcccccaggcctcaggggtgcatctgcactcctccacagactcaggaccatcttagggcatttgccacacttacacacggccagccctgcctgacatgtccccaggcagggagtcctgggcaatcacgtggtacctgctaattggcacccactgtgcaccaggcatggccgcatcttgtcctaacagcagtccagggaggtggctcttatccccatt

SEQ ID NO: 6095 - DNA, 6000 bp, Homo sapiens
ggctgaaggcaaagatacaatgttctggactgggcacagtggttcatgcctgtaatcccagcactctgggaggctgagatgggtggatcacctgaggtcaggagttgaagaccagcctggccaacgtggtgaaaccctatctctactaaaaatacaaaaattagctgggcgttgtggtgggcgcctgtaatcccatctactcgggaggctgaggcaggagaattgcttgaacctgggaggcggaggttgcggtgagccgagatcgcgccactgcactccagcctgggcgaaaagaatgaaactccacctcaaaaaaaaaaaaaaaaaagaaaaaaaaagatacaatgttcttgttagtctttgtcctttacagtgtactgatgtcctcttggtttttaaaaatatttaacactgtttagggacacaaaggagggaggagaagacaccagaacaagtcatctttaaatgccaaaaagcctgagctctgggggcctaaaagcaggaaagacttaaaatacaaataagatcacatccctctggcccaactggccttatttcacttcagcacatgaaacttattcccactcaagagctttttcatttgctctctgctggctggaatgtcctttccccagttcttttcatggttatctctttatcgttcaaggctcagttcaaatgtcccctgctactggggactcctccaatcagaccatctaatatggcttcattttcatcataccctgctatcattaccctgctgtattttcttcagtgcattactcactctctgaaatccttatttgcttgttttccatcctttccactagaatacatttatgagaataaggaccttgtctgacctgttttctgctgtatccctagtgctcaacagtgcctggaatgtggcagatgttctgaaaatatctgatgaatgaacaatactctgacaggctttgtagcagatgctacatgttggggaaggggagaatgtttaaaaagcaaaacacgggatacctactttcaagggcctgcacttgtattatggaataatattaataattatacagtggtctaacattaaaatagaattcagagatctccaccttctactttcaccattcttagtttcaagggtaaggcagaatggttttgaatggcaaacatttgcataaagaattttctcttgttatcttagtctgttattttttattttttttttgaggcagggtctcgctctgttgcccgggctggagtgcagtggtgccatctcagctctctgcagctccgcctcccgtgttcacgccattctcctgcctcagcctcccaagtagctgggactacaggtgcccgccaccacgtccggctaatttttttgtatttttagtagagacagggtttcaccgtgttagccaggatgacctcgatctcctgaacttgtgatccacctgcctcggcctcccgaagtggtctgttatctcttaatgatagctttagaagtctattttcctcatctacttcctaccagcccttggtgtccaatgggctagtgggaatcagctctaccattacctataatcaggcaactcacttctttaaagtatagataagttcattattcattcattcgttcattgagtaaaaagttactaaaggcctgccaggcaccatactaagtgaacacagcagggaacaaaatggcatctcttagctcatgaaactaacattctagtgatggtgaagggaaagaaacaacaacaaaaaagatactggaaatcactgaaaggcaaagcatggaacaaggctgccagacagaacactagtacatttccttttggttcagtcgtgatggaagagaagatttgaaaagagactggagaaaacgtttgttcattcacgcaacaaaatagttattgtgcaccttctatgagacaggtaatctgttatgcagcgcagacgatcaggaacaaaatagacaaggagcttcttcatgagcacataatattccagtgagagagaaagatggcaaaatagatttttaaaaaatcagtgatgagtgctgtatggagaaataaaacagattaatgtgactggcactttagactggggggaagataaatcaaggaagaactctaaggaggaaacacttaacctaagcccgaatgatgagaagtaactaactagcctttcaaagtttgggcagagaatattccagtcacaaggaacaactagtgcaacatatcctaaggcagtaaagagcaaggaatattcaaaagacagtaggagaatggttgggagatgagagggaagccaggagtcaggtcatatagaacttaggctactgtgtggagactcaagagtggaagcagggagaccagagaagaggctattgtaatgttgacctagactagggtggtaatagtagaaaacactgttagctttatggcgcaaagtttccctttgggtcacacttgttctgtgatattatctgattcccatggagcagggtggggtaggggtgtcattttgccagtaaaggcccccaaagcatagggtgctgtagggtgtgtctgagcatgcctgacaaccaatcagccacacctacaccattttttttttttttgagacagagttttgctcttgttgcccaggctggagtgtcatggcatgatgacggcttactgcaacctccacctcccaggttcaagcaattctcctgcctcagcctcccgagtagctgggattacaggcacccgccaccacgcccagctaatttttgtatttttagtagagacagggtttcaccatgttggccaggctggtctccaactcctgacctcaggtgatctacctgcctcagcctcccaaagtgccgggattacaagcatgagccaccgcacccagcccacacttttttttttttttttgagacggagtatttgctctgtcgcccaggctggagtgcagtggcgtgatcttggctcaccgcaacctccgcctcctgggttcaagcaattctcctgtctaagcctcccgaggagctgggactacaggtgtccaccaccacgcccagctaatttttgtatttttagtagggacggggtttcaccttgttggtcaggctggtctcaaactcctgacctcaggtgatctacccgcctcagcctcccaaagtgctgggattacaggcgtgagccactaagcccggcctacacttttaaattcttgaaactttgccttgaatgagctgcaagtgccaaatccacgacagggaacgcttgaaaataggagacttcaaccactggagacaactacttcttggtttcacttccccacaatgagtacaaaacctgaaaatgaaatgactggctctctcgcaacactaagcttgcccatctcctagaggaagttaaaagctgctcgtgggtgaagacaggtgcaagaggaggggactgggactgcggtgttgcattcagccaccatttccaaccgtccatttactcaggccaggatccctaattctgcaaaaatggaaggggggaaaggcggaggtagtggcaaattcttccatgccttgacccaattttactgattttgttgccaaccccaagatgtttcctacaacagctatccccaacctttttggcaccaagaactggtttcatggaagacaacttttccacggggttgggtggtttcgacatgaacctgtttcgcctcagatcatcaggcattagattctgataagaagcacacaacctggatccctcacatgcgtagttcacaataaaggtcgtgctcctatgagaatgtaatgccgcagctgatgtaacaggaggcggagctcaggctgtagtgctagctcgcctgccgctcacctcctgctgtgcggcccggtttctaacaggccaccgacgggcctggtggttggggacccctgctttacagggtggctgaactgaagcttattcttcacgcttgcactattcaagatgtatgatatctgatcattgtttgcacactgcaaagcaggctgcaatccaaccctgggaagaggggcgcggacacgcaggctaacgcgcctgcatttccccccgccaacccctcccagcttccacagccgggagcccggtggcgtcgacctcgcaccgccctccggttctcccacttgggactcgagggttggatctcgccaggcaccgccctctccccacaggtgaagggaaggggcacccagttccctcggctgcatctttgcaagggtggatgcaagtataaatgctgcaaaagcaagggtgcgccggggccctgaagcgtgcatgcccggtggtcataacattctccgctcagagtccactaggcctgtaggacgccgggaagctctgggaccgttgctacagaccacctcccgtcagctcccggaatccagcgtctccccacgggcgcgcgctcttccgggcgccccggcggcacctgcgcgcgacgtcccccgccccggttaccttgtagaaagtgaccgtatccaggggaagggcgcccttggtgtgcaggccgctgccgccatgcggagcggagaggagcaggaagcccaggagaaggggaagcagcggggagagaaatgcggcgcggggcacagcggcagccatatcgccgggttcctgcagagggaggtaggtaagcgatagtggagaacgccccgagtcagcggtcacgtgactgggggggcggactcacgcgcgctcacgtggacaccccaggaggctcccatctgtctagggtgagagggtggggccacgtgaggggcggggcgagggaggggaagctgctgcgcacgcgtactcggcgaagctcgcgtagggcctgggtaaaagggcggggccacgttgcgggcgggaaaatgggctcctgcgcgcgcgcactcgccgagtcttccggcgggtccgcccagttccgttcctgctccgcttgaggagaagcgccaagtgcgcatggggacgctatagcaattcgtttgctgtccttcctctccttcgaagatgacaaggcctaccatcgtttcttcctgcctttgggccgtcaggcagttggttgggacccgctccaaccctcggtcagtctattagtcaagttcagccgttattctcagtcaggctccgtcaccaccctgacccaggcgggcagtggctccgcggcttccctgagctttttggccaggcttggcggtcagtgtggcaagcagggccctcttaggcccgatctgaggtgagcgcctcccctgggagacgccaggctcctgggatccgcccagccaaggcccaccctccaggaaccccagacgcaattctaatcattctgttccgcaggtagtcactcggtccctggcttgtgccagactctggctttgcctgcggggctacggaataagcagaaacaagaccgttgtgtgctgaaggcacgcactttgttgggggaggaggcggcataggaataatgatctaaacagtgcagtgtaattgctgtaaaatattattccggctgggcgcgttgactcacgtctgtaatcccagcactttgggaggccgaggcaggtggattacctgaggtcaggagttcgagaccagcctggccaacatggtgaaaccccgtttctactaaaaatcaggcgagtgtggtggtgcgtgcctgtaatcccagctactcaagaggctgaggcaggagaattgcatgaacccaggaggcggaagttggggtgagccgagatttcgccattgcacttcagcctaggtgacagagcgagactcagtctcaaaaagaaaaaaaaagaccgtattttcttattgtaaagagacagagattcagccatccctgctcaggagcatcagaggaagttgtagacaggaggtgacttttgagctggaccttgaaataagagggggcgtgcatgaggcaaagagaaacagggcatttctaacaatgggaaaattatgcacaggcatgttg

SEQ ID NO: 6096 - DNA, 6000 bp, Homo sapiens
ctctcagaagtagcacgtgggcaggagtctctcctctgatccaggagcattggcaggtttgtgttgggactgctggttaagttggagctgtgtaactacttagtttttggtagccaatcagaacgcagtgccccacatattccagctcggtacatgttgataaacagactcatccaaactttcaaaatggattcgtactaaacatgctcaggttttaaattttggtttgcttttgagcttttcctctttatgtggctcttaataataagtagttagaatgaaccaagccatcccagttattccaagcaggctctcaaatgacctttgagcacccttcacctggctggtccccaggccaggggtccacagccctgctcccttctcagcaaggagggtggcctgtctgacagtgcagttgaacctttgctccctactctgcaacttttgaagacttcaggctaatcaaaattacttataattagaatcaagtgcctttattcttgttttttatttttattttattttatttatttatttttttagatggagttttgcccttgttgcccaggctggagtgcaatggcatgatctcagctcactgcaacctctgcctcccgggttcaagcgattctcctgcctcagcctgctgggtagctgggattacaggcatctgccaccacgcccggctaattttgtgtgtgtgtatatgtctatgtgtgtgtgtgtatgtatatatcttttttttttttttagtagagatggtgtttcaccatattggccaggctggtctcaaactcctgaactcatgtgatccgcctgccttggcccctcaaagtgctgggattacaggcatgagccaccacacccggcctattcttggtattctttattcttggttttctagcctttagaaaaaaaaaatctagtcttggtaaagaaaatgttcattttaatcaagctccagtacagcttgtgtcaagacctagtaagaccacctttaatgtgttcctggatatgacattaaaaactaacttgaaaattgttaggatatttccttgttccctacttttattgtaaaatctactacattcttaagaattaaaaaatgccatttcagaagagatgatagttttatcttgccaaggaattatcttcttagtagcctatattggcttattccaaaaaaggcgttaacctccatcaaaacatcttctgcgcctctctctcagcatatgctttgatatttgaagtgtgtaatagattggagctatcagtcacttatttctaaaaaatgtattcttttttcttcatagctgtgaagagggataccaaggaaagttctttctgctgtctttctcttcggtaatgcttatcttatgaacactcaactgaaaaaacactccacctaaaagcaggaaagatggcaattctaaatagcagctattatccccgggtataaactatttttgttgttggcttggggctttgctgcaggtattaatagtttaaaaagaaaaaaaaaaaaaaaaccctaagcaaatctgccacctctgggaagtgccttttaaaatgcaaatagaaagtgaactctcccctgatgcctggatctgcccccttcctttcccttgctaagcctctgtttgcaggagctactcctgaggtatggaaatggtctttgcaactgaaggacttttccaactgaagcaacagatgtagctaaagtggccgtgctagggttgtgcagagctgggctcaggggacaagaaaggagagacttggagccagagagacctgggtcacatcctggcacaggcctgcctttctcagctataagatgaaataagaaaactcctttcattaagggagattttgtaaagtgcctggtgcttagtaagtgctcaagaaatattatatttcagattcattgagttaagtaggtttttgaggtagcatccttttttttttttttttttttttttgagatggagtctctagttctgttgcccaggctggagtgcagtggtgtgatactggctcactgcaacctgtctcctgggttcaagctattctcctgcctcagcctcccgtgtaggtgggattacaggtgcataccacgcctggttaatttttgtattttcggtagagacggggttctcaccatgttggccatcctggtcttgaacttctgaccccaaatgatctgcctgccttggcctcccatagtgttgggattacaggcgtgagccactgcgcccagccttgaggtagcatactttctgaaataaaaaagtagattatgtccgaagcagttgacctaaaaactgccttggactgacatttgttaggtggtctaagatgttctcttcacgctttgcaaaaaaatgagcttttttggagtttaaattaagcatccctctggtgtgtttggttttttagccaccaaaaatttaacaaatttgataacctgtcacgtgtaagttcagaaagcactttggtcttaattggtgacttgggggttatttggtataaatataggttgtttttctaaaaattattgccagtatcctccaaataattgccccttcaaatgtttcatctaaaggtgacagcttgtgggcagaaccatgcacaggaagtgcctgccagtgggtgttaggagatgtaggtggagtctgtgatagccaaccaaaagctatccccttctcgcccagaaaagccacgtgctttgctggacgctacttgaaatctgaactctgcacctacatatgtagtaaaattagacacttttgtcactttaatttttagattatctcaagttttcactagatttcaatgtgccacttgtgctatgagtctttaagaagctttaaaaaataaatgcacacctgtagccttttaccattcagacaggtagattatatttacctgtcatgagggaccatgtatggttgacagttgcaggtttgattaaatccactatattgcacaaattttgctggaaataatttcctgccctgccaagagctctatggtagtttgataataaactactaccccagtattcttaggaactgtgttactaagtcttttctgcctgatttgtactttatttccatagacccctcagatatgtgaggaatcaagccataaatgtgcatttgctggacattatgtaccatgtcatctctatgactacagatttcaaggataatttttacatctaacaatttcactgtaacagtgaccgataatgtgagaaatgtgctttttacagtgctgctggtgggtagacaagtgcttgctgcagttgtttctgaatctagccagatgctggagtcgtgaagctgtaagctccgcgggagcagggaccatctctctttcttgcactacaggcactcaataaatacttgtggctgtgaactggcgtgtggcctttgtgtgtttatttctgctagctggctgcaggagcgggttgttggtgattttaagtcccaggcatagagaagtccttgagttatgggttaaggggcgtccatccaggagcacagttcccgttgggactctgtgggctccgcagatctttctggatggatcctagggcacctcttggtggagggaaggagctgaagcgttctaggtgatggtggtacgccttggtcctcctctgcgtggtcatggtcaggggcacctggaggcgagtcgggaacgatggccttcctggcccgttcagttgggttctgccgtgaccccaggaggtgagcagctgtcaggggctcggcctccccggcttcatctggagtcatctaggccgccttaattttagcttgtcctctctcctccaggggagcaccgccgtctcctcagccttataaggtgacaagtagggatgggtcacacatcactaagttttaggtgtgctctctttagttccatgacttcagattttgccaaacaagtccaccctggctcaacctaacaaacacctcatgtttttaaggaatgtcaccaggcgctcccccaccgggggctcttcccattggagagccctgtcgtgccagatcatccggattaaactgttcgtgatcctcttccagctactccctgaggtggggaccgggacggctgcgctcccggctctgccgttccctgggccgcggcccgggcgtcctgaggggagagcgcggacccaccgtgtggcgagcaccgcgcccggggctgggcttcggtgagctgcccgctgcgctctgccctccctggtttaccatttcgctcctaagaaacttcattttttaaaatgaggctgttttaagagtcacagtggccgcaagtcggccggttcccgcccccgagtgcgctcggctgctgcggacggtgggcgaggagcccggggcggggatccgcgccgccgcccccgagtccagtcccgggccctgaggacacgggcgagccggggaggagcggggtcgccgcggcaggtctgaggaaccaggcgggctgcccgagtcggagaggtttcttccggcggaggcggcggggccgggccgagactccgcagggacgcgcccccgccgccgccgccgccgctcccccgcgcggcctgaggaggcgccgccgccactgagggaatgcgagcccggcccggcgcgcgcgggcagcagcggccgctggggtgcgcggggcaccgcggcgccgcggcgtagagctgtccagccggccccggccgcccgcccggcgcttccttctcagctcgcggccgcctcagcgagagccgcccgccagcacgtgcgccgccgccgcccgcctgcgacgctcgggagcaatgcccgccggggctctgccgctcgcccggggccagcaggcggcgggggcgcgcggggcgcagccggccgggccggggccgcggggcgggcgctccccgtgaggcggcgtgaggtggcggcggcccagccggggccccgaagaggacagagcccgcggccgcgccgagcggggtgagtgcgtccgggcggccgctccgcaggcccgcggtgagtcccgcagtgccgggcgctggccggggacctggggatctgggcggcggctcccagagaggccccggcccgcccgcccgccgagcctccagcccgccgggggctggaggagggagcggagacccgggcagggaggagggtgtggcgtacgggagccccgctcgggagaccgcccgagcctggcctcagtgagtcgccggccctggatccgtgcccgaaacgctgatttccgaatttccgtcggtcgcgaccgcgtgggggacccccgccagggacaagtgtcatagcggtcggggggcaggcgtgggcagtgccggtgccagggcgaggaaggggctatcgggaggaagcggaggtgagcccccggcccgccttctctgcttcccgcctccagctgaacgtccccaggcccgggccgtggcctctgcttgtcgggggcccagggttggggtgtggcccgtctccatcctcagtgcccccttcgtgtggtaatggggtgccggctctgtcttcttcccaccccgaatcctttcttatccgtggcagggctgatcggggggccttggggagagggaaagttcagtgtcccccgccccagtgtgcactgcctccccgcaagaaatcccaaacggccactccaggtgaacatagtgcgcgcggtgcaaatgtcatttcaaggcaagtcctccaggcttgtcccctttccaccgacttgctcctgcagagacatcctgcactcctctccctcccactgaagtgtgggctgggtgcctctccaaacaccccggcctacctgcctcccccacccagagtcgggattcttcaaaggagacctcactggaacatctgtctttgtccacaaccagctctctccccggcctccacctgggagtgaccagagctgctaggatagaccccccacttctggagggaaggcagtaagtgctccccttcatctgaatctccccta

SEQ ID NO: 6097 - DNA, 6000 bp, Homo sapiens
gggcatcctttgccttctccctggtgcctggtagaggggacagagcacctcatgcgtccaagagatcgaattccagctctccaagggcatcctttgccttttccctagttcctggtacaggggacagagcacctcatgcattcattagctggtggtggttggtggttcctccctcctttggactctcttcatactgtaaaatgggccaaagcttcgctgtagtctcaggagctgatagaggtgtttccttatatcccactcctgcttctgttggcagtgatgagatcaatacaccctgtattgcctggaatggttcattctaacaaacaaagccctgaacctccatgacttaacaccatgtcatcttatttcttgctcacccaaaattccatgcaaaagaagtggcattccacattttcggaaccagactcattccaacttgcaactctgccattgctgaaggcttgggggttctcccttgaatttttgcattcagcttgaaaaggcaggaagagagtttgagggtttcacaggctcccaaactctccccctgaaagggaggcacatcccttcctcccaggttcttttggacataaccatagcgacagttaaccttaggaaggccagggcatgtggtctggctgtgtctccagcaggtagaggaagcaggggtgagggaacatgcttctgtcacaggttccagtgcatgcaaaatccaggcagtctttacaacaaagggtttcctgcagaggcagccttgcagcttctccttgacctcacccctgaccgagaaacactcagggactaatcaggctagaggtacaaatacataatttgtaccaagaagtccagcatgtgacttcaaagaagactattcaaggcctgctgacctttctgtattgatccataaatcagtaacttaaggaaaatgcagcagtatcctattggtctttgcagaagaggctgctctgcgaggttcacctggcagttacctggtgacaccatgggtcacctgggagagcacgaatattccaactttttaacatctgcttgtggagctctgggaagagatgagaaagggagaaggacagagagaggagagtaaaagtaggtctggattttagtatggttaacctggaagaaccaagaagtttgatgatttaacacaataaaaattaatttcttttaccatacttcttaatgtggattgacgggggactttgctctctcatcaacttgctggactgctggctggaaggctcaccttgtagcagctgcaccatctcaaacacagggtccactcttctcccagggcagggcaggtgcagaatgaggagtcacaggtgagcttttcactgccccaccagagaaatgacccccatgacttctgctcacatttagttggtcaactgcaaggggctgagaagagtagtcatccatgcgctgggaaggagagagtgacaggtcttggcaaacacacaccttcctcaagggcacagcatggattccgctgaggtgctccttctggaaggatgatctcctgctggccttaccaggaagggtgtgcaatgttcccagtgtttacagtgccctcaacatcagaaggctttccccactagtgaaagagacagttgattgaaccaggcctttctatttcccagtcatttcatgaattttggaaaactgggaagacagggagtttcaaaaagtctcttctgcatcttcaggagggattgatctggtagctctcacttcatgctaaggtttcccaaacttcatttctcaccatcttccggagtattgtcatagagagaagacggtgcctgcacccgtgtcagtagtgattgctaaatccattactcatttcccatcttcataaacatacataacttgatattttttaaacaaaatgcatcaccaagtaaaaggagagaaaacaaaaataataataatcaaaataaaaacaaatcgatgttagtaacttgagctagatgttgtcattgtgcagaaagagcttccttttttgtttaaaaaacatggacatttgcaattactaaaaggctgttccggagtagctcaggcctgagcctttctcctggatgcagtcagaaggactggaagagaatggcttcagttttacaggaggccccatctttagagggcctgaaagtgtcctctcatccaccagtggcatagcccctgcagtacttgaattccagctcctttctgcctttatcaacgctcaaagttgccatttctcaaaaactgctacagggaatgtttttgttttattgaaaaataacaacaaaaactgcttagtgtaaaagcctcatccacacagcatgaacaattagtgcaatttaattaccgacaaaattaggcttacagcttgatttatggccccgcagatgaaacacatattcttggaggaaagcagatttcttacaagtaacttgagagagacaaggcaggcgattttgatgggaagttgtcctggggcaggggctggagttagggacctatgagccctcagtgtccatctccaagtctaagttttgcttccccacaattagctgtgttaattacccaaagaagattagatgtaccagggagaatggcatactggagagagaaaaagtaagaagccattcttgcatcttattttagccactgattaggtatctgaagttgcatcttcccaaaaaatcttccataccaaagagtggaaaaaacttttgtttcgccaactacgcataatgaagaaaccgtttaacattttaggcagcagctggaacttgacagtcaccttttgtcttcacattacagatagagaaaccttctgcaatggcaaaaagaaaagttatttgatgattgcaattcaggggaaaaactcaatttgatttagagaaacataaaatgattgtttttaataaagaacagggaccacttgtttctagtcaatatgtctgagaaatgtcttacaaatagactcagtgtcacaaatagatgatttacaaatagactcagacccactgtagcgttaaggatggaacctggattatgcattcagtgcgggcatcaattttgacactcagagaccaggtgaaggtgtccaagagacgaaagctcagctctctcatcactcaggtgaaggagaaaggggaccagtggttccagcacgtgttccgcaggccggcagcatcagcatcacctggaactttttaggaacggagatcggaagtcccaccttgacctgccgagatagctctggggtgggcccagcaacccaggtctaacaaattttccagtgactctcctgctggttcaaacttcagaaacagtgaaagagacaatctcttagggtctttgcagcgtcgactcttaggaattttacaggagagcaatacaaagagaaaaggcaacaagtttaagaaacaaacaaaagaaaaaacagaaagacagatatattcagataagtagatacagaataaaagacaagagcacatctcaaaggacatgaacccagaaaaacaatcttcggtagaacagcagtggcttttttgatcttccttgaaactttgaaagctaaaaactcttaaagcattggtatatttctgcaactacaggcatacaggataaaaaagtccattgccccctcagtcagatgataacgacccatttttatctactgaggtgaattcacctcattagattcagggcttgttggtttacaatattccttaaaaattctgaatgcttttcttccctctgagctttgatggggttaatttaaaggctctcgtggagcaaagcagttcttgggctacaaattacaggacggtgcttagggatcttggtgtgggaatgtcttagttggagattccgggcggtgttgagaatcatgtcttttatcttctcaaagcaatgttgtctcctaatggatccatttcctttcccagtgagccctggggagcacacgacatgtttctagggacactaacttgggggatcgctctgggaaggggcttggggccagcatgacctcagtgtggcgtgtcagagacttcctcactgcgatccctgggagatgcgcagggcggggcgagggcccttctccagccatccttgcgctctccctggcgaagagcctcaggtgcccccgggctggaggacctcccctgggcctgaggttttgatgacgacgagaggccggtggccagctggacacctgttgggagagtgggtggctccgtccccggggtgcgcccgcgctgggagccctcgcccgccgccaccgcgcgtccgcgctcgcagggagggtggccgggaggctgggcgtggggcggccagggggaggtgggatttactttgcggattggggctcacagctgtcactccgaaagggtggggctttttaaaagcagacaaatttttaaggcgaaagccccagccggctccgggcaccgtggcgatcgcctccgttccgttccggatgcggtccttgcggagcggagcccccgcgcctgctggcaggaggcagctgcgttgctcggccgcgtccccgagccggcgggccctcctccgcgcacatctggcccgcctcccccgggcgcaggggggagccccgcgtctccggagcctgcagtgcgctcggcgcgcgtagagccccgcgagccccagccgggcccggggccgggcgggccgaggcggcggccggggagcagccgcacccgccaaactttgggtgccggagcgcgcgcgcgcccgagccccgaggcgcagcggccggcctgggatgggggctgcgggccagggagccccgggccgcccagcgagcccggccacccgcccggggggctccgagccgcctctgcccgcgtcccgggctccgcagccccgccaccccggcgccgcctgcgccagcgcccgctagccagcccgggagcagctggagccgccggagccctgcgcctggaggcgcccctccttgggccaccgggggccactcttcgctcgggtaaacaggaaaggaaataccccctgtggattaaaatttaaaaaaaattctgttggggtcgaaggagggaggtggggtttgcctgcgcgcgtgttggactccggagagcaactcaggagcccgcgcggtcgtcgcctcccggcctggccatggactggcgggaagagggagcagggcgcccgggctgctcgggcccctagccgggcgctccctcgccaccggccccgctgcgggcctctaggggactgagacggtctcttgttcgcctggacggcgccggggagcggaggatctgcgctccgggtctccaggatgtgcccgtctgagatggggacgctgtggcaccactggtcgccggtactcatcagcctggccgccctgttttccaaaggtgaggacgccgcggccgccagggcccggggactaacttcgcctggagtgagtgtgtgggagtgtgtggaggatgggggcggccgggagagagggctcgtgtgcaagtgtgtgtgcgcgcttgtgtgcatgtgtgtgtgcgcgcgtgtgaacgtgcgctcgtgcggcagccaagctcctcggacgccccttggccgaaggtgcttgtcctggagcacttgggtgggaggccttaggtgagactactaaggagccgaaaggaaaggaaggctgtttcctgaaagccttttctgtaaagggagagggcgtggggacccttgagaggaaaggtggcctctggagggccgagccggctgtcgggggaggaggggattgagatgaccagggagatttctggaatttgggattgactttccctggtggcactgacctatttggaaataattttggagcactcctgttgtatgggaatactattttgtgtattataggctgccaaaaatatagcctggggggcggctctgaagaagggggatgggtttctccaggtctgccgctgtgaggtttgggcacagggtctggcgctcaccctt

SEQ ID NO: 6098 - DNA, 6000 bp, Homo sapiens
gatgattacacctatactttcccctggctttcaaaatgccatttagagaggataaattggttcataatgaaagctctcaccaatttttgaaatgtacattgagcattgatcttgtctttttcttttttttttttaataaagactgaaatgtattattgaggtactgggacatgtgaggtgaacggaaaaacatcatgtctcatgtggttacttctgattttttttttttttttagaccaagtctcactctgtcacccaggctggagtgcagtggcgcaatcttggctcactgcaacctccacctcccaggttcaagtgattcttctgcctcagcctttcaagtagctgggactataggtgcgcaccaccactcctggctaatttttgtatttttggtagagatggggtttcaccatattggccaggctggtcttgaactcctgaccttgtgatctgcccacctcagctttttcaaagtgctggcattacaggagtgagccaccgtgcccggccttacttctttctgtttttttaactcttggatcagattttacaaaggaatgatatgtaaacaacacacattttaagcctatttgcagggttgacttcagatgtggaggtggagtaggcagatgattgactagtgtgatctgagagttttgaaaaactatttctattgttaccctgacactctgaaactgtggccaattggctaaactcctgcatataaaagaaatggagttgtttgggctaaaatatggaggaaagagtgggagatttatgccctactatcttggtttctttttggaacttctatctgtaccctttgaaaatcattgctggccaacactgaagaagtggttaactctgcgtgagtaagcaatcaccacctggctactgggccaattgattttgacctagaggaaagttttcatagaacggtaatgtttgataggaaggaagaatggcctttactgactacctattacatggcagacactacaggtgttttatagatgttggtcatttaaaacccctaataggtctgtgtggtagtgattgggatggaaggagactgaagaataggaagaacagtagctgaaatcctgagtgagatctctctgtgaacagatttcagtgacctactttgagctcctaagtccacatccggatctaacatctcaccacttcagtggtgaagaaggaagatctggggattcctattgtaatttttcagtagcaatttgtataactttatagcgagtaagcagtggagccagaatttataccaatattcattatatcaggtctcctaaccataaaagccacatctctttcctcttatatggggaggaagtattatgtaagatgagaggttaaaacgtgggctgacaagccacattgcctggtttctgatccttactctaccactatggctacttgtgagatcttgaatgaactactcaatctcagtatgcctgtctcctcaaaggtaaatgtagagagggatactccgtgtttagcagctatctcacaggtctttaatacatgtaatgagcttggtatacaataagccttcaataagttgagcttttgtcactaattgttattgtgatcaaactgagaggctattcctctgtccagttctgaaacagggctgagctggagatcatggctggctaccaaggcaaagggcacaggcttcttggtcagtggttaaaaagggaacattgatgctgaaaacaagccttgcccatttcagtattttgccttgaagtggtcctagagaactacactctctaagccctgaggtttctcaacaataaatagtaagcattggtagagcttattcttaaaattattattatatgaagagagatctaaaggtctaaaggtaggctaacaagttccatgtaagtgatgccagacatttcggttctgatgaactgaagttgattttagtagacactcatgtagttcaattgattatggagtggattgagttctatttcttaaggagacagaagacaagctgctgaatgatttttatcccactatcccctgaaatacaatatatttttcagcctctttctcaatgaaaaggaaagtgcctcctcttttcctttattttcccttattttattttgtctggaggtgacagggggttacaaattacagacctcaactgagtgctgtggctcaccctgaaatcccagcactttgggaggccgaggctgaaggatggtttgaggccaggagttcacaatcaggtgggcaacgtagaccctgtctctacagaattaaaaaaaattagctaggtgtggtggtgtgcacctgtggtcccagctacttgggagggtgagtcagcaggattgcttgagcccaggagtttgaagttgcaatgagctgtgattgcaccactgcacgccagcctgggtgacagagcaagactctgtctctttaaaaaagaaaaaaaaaataggctgggcatggtggctcacacctgtaacctcagcactttgagaggatgaggtgggcagatcacttgagctcaggagtttgagaccagcctggacaatgtggcaaaaccctgtctctacaaaaaatacaaaaattagccaggtgtggtggtgtgtgcctgttgtcccatctactctggaggctgaggtgggaggatcacttgagcccagcaggtcaaggctgcagtaggctataattgtgccactgcactccagcctggggtacagagtgagactctgtctcaaagaaaatagtagtaataaaagaaataaattacagacctcagtattctgtataatttgtgaagctttactatttttcagttttaactgactgaagagtccttgctttaaatggagatacaaggaaaatatagcatatggaacctttgttaaacagttacccacgtgtaacagtttaaaaattctttagagaataatattaattacagttataaaagcacagtggaatataatgactaatatgtggaattaatccactatctatgagccattactataacttactatgttaggtactaaggatacaatcatgagtaagatttaatctctgcccttgaagagttcatagcgtagtgggagaaaaaagaagttgcaaaaaagaacaacaaaagtgtaatagtaaaatgtaccaagtgctagcataggcaacaactctttctggcaaaacttgttaaagcattacaaaagagaaccttactagttaagagttctgtaaaatgatcacaaatgattgactactatatatccagtggtgtggggatgtgggggttctatttcttaagaagacagaagacaagctgctgaatgacatttcggttctgatgaactgaagctcattttagtagacacccatgtagttcaattgattatgcagtggattgagttcactctcatatatatgagaggcatatttatatatatccatatatacgtggtcatttttggaagctagaaaaatgtcaaattagtgggaagtatggcagtgaattcccaattatgcctatgcagataaactaccctatggcacttgggcatggctctctccatcccatcttaaaatccgcggacatctcagttctccctcttgccatccacccattcctgaatcaggctaccagtacaggggagggcctagctctgccttcataagtttgctaatatgggcatatagaaatcctattttccatttgattatatacactagtgataacttccattaccacaaaatattagcatgctggatagcagctgttaacacgttttcagcaaccggtaaactgaggtagcagttgctattaggtgtggaaggaaacagaggccacacatacatgatggaaaggaggttacattcaggaagagaggaattggtcagatgtagtcaaagggtcttcctgccctatgccgcagaggtatcatttaggtatcatagaatgacaggctccggagagcctcagactgcaaaaactttaaaaattgtacatgagtatgtgtgctgatgtacatatgtgtgtatgcatgtgtatacgtgtgcttatgtgtgtatacatatgtatgcatgagtgtatttgtgcatctctatgtgtgtatgaatgtgtgtatgtgtgcatatgtgtgtgtgtgtgtgtgataccaggcaggttggaaagtaagtggaagacttctcatactcctcatgggctctgcctctccccacccccacatccccacaccaccaacagacaaaaacagaaatcatgttttgcgacctgagattgctttcgaaagtttgtagctcttcgaggacattccagtgggaccctcattggttccctgcaggatggtggattttctgtcagccgccccccaacccccaccaggttcctgagtccgtccctcgcctgcagctgccgctctgcagaggcgggccggcccgggcaggctcggcccgtggcgcacgcggcccgcgggctggagtcagcccgtggtgcgggcgagagggcaggggcggggagaagccatgcctccagctgcagaggttgcacacagctggcatgatcgcggtcacctgcgcggcgccggtgcccttgcgctcgcgttgcccggcccgcggccgcggactttgcggcgggagcgcggcgcggtgaagcaccggcgcggagggcgcccggcgtaggcggcggcgggtgtgggccgagccggtatttatagctccgtgacagcagcagcggcagcgacgccgccggcccgtctcgccgcgcttcccagcgaggccgccggcgcgccgagggctgtgctcgaccgcgaatcccgtgtgcagtcgccccgcgccccgcgcgacccttcgggtgagtacgtgggcccgggcgttgggcgagcctccccagccgttcggtccagccgcagcggagccctcccggccctgccgcccgtgtcccggctgccacctcgtcactgcccgcgagtgcggaagcagccgcggaaccccggcccggcccccgaattctccggcgcctctgctcctgccttcctggggatggcagccaaagaggcagggtgaagtgtcaaggagggaggggggacgcgccagccctctggctaagggcagaggagactcccgggcgaaaggctcttggtgggagtcctcaaactcccggctccagtgtgtgtgcagagatacggcgggagagcagaccttgaactttccttgcttcagcgattcctagcctaggaactgagtaaaagccctatttttcttaattaaattaacaggttgcagttcgtaggtgttgttcttgggaaaaaaacaaagacttgggtgtttgggtgtttgctaacttcatcgtgactaaataaaactattttttttcattcctatttttgaaaatgccacaggcccacaagtgtgttctaccctctgtggaacaatgaagtatgtgtatgtgtgtgtgggtgtgcgtgtgtgagagagagagagacacgggagtaaacatcacatgcttatcaggaaccaaaaaggaaaaaaaatgagtaaaagtatgttgaatataagggtatgtattgcccccaattataaatgatgtattgtctgaaatccaaggaaggacttctaggaagctacagggttttgttttggcttcagaaacaaggtcttccaatttattgaatataaaagtagttgaatccctgtaaaccccatttttttttgtaaagtattgacatttgaccatggatatactttcttttatcccccaagtctttatagtttaaaagtaattatggattttgacattttgtctcaggcatttatccctcctattccaccctccatctgatccgtgtgatgagaaactggctcttgtcagttttatctaagtttctttaagctgtcattaaaaaataaacttttcacatgaattctatttaattcattaaatgtgtttttctttggcattgtgtttggaatatgatcatggcaatt

SEQ ID NO: 6099 - DNA, 6000 bp, Homo sapiens
acaggctcataggcagaagggacttgccttgtctcaaatgagactttgtcagaggcatgtgaaccagaacaactccatcttgaataggagctgggtacaatgaggctgaaacctactgggctgaattcccagaccattaaggcattctaagtcacaggatgagataggaggtcggcaaaagatacaagtcatgaagaccttgctgatataacagcctgcaggaaagaagccagctaaatcctaccaaaaccaaaatggccatgagagtgacctctggtcgtcctcactgctacattcccaccagtgccatgacagtttacaaatgccatggcaacgtcaggaagttaccctatatggcctacaaaggggaggcatgaataatccataatccaccccttgttcagcatatcatcaagaaataaccataaaaacaggcaaccagcagccctgtggctgccctgtctatgaagtagccattcttttattcttttactttctttttttttttttttttttttgagacggagtcttgctccgtcacccaggctggagtgcacgggcacgatctcggcttactgcaagctctgcctcccaggttcacgccattcttctgcctcagcctcctgagtagctgggactacaggtacccgccaccatgcccggctaattttttgtatttttagtagagacagggtttcaccatgttagccaggatggtctcgatctcctgacctcatgatccacctgcctcagcctcccaaagtgtactttcttaataaacttgctttcactttgcactgcacactcgccctgaattctttcttgagcgagatccaagaaccctctcttgggatctggatcgggacccctttcctgtaacaactttggacttggacttttgagtaaatgctgggatgagttaagactttgggggattgctgagaagggataattgtattttgcaatgtgagaaagacatgagacttgggagggccggggtggaatgacacagtttggatttgtacccccacccaaatctcatgttgaattggaggaggggcctcatgggaggtgattggatcatgggggctgttctcgtgatagtgagtgagttctcacaagatctgatggtttaaaagtgtgtggcacttttcccttcactctctgctgctctgccatggtaagatgtgtttgctttccatttaccttctgccatgattgtaagtttcctgaggcctcccacccatgcttcctgtacagcctgtggaactgtgattcaattaaacctcttttcttcataattacccagtctcaggtagttctttatagcagtctgagaatggatacaacccttctttacaggggagagagaagatggggaatgtaagcaattcttttgaggggcagtaaatgattagggagaatgaatagacaaggcagacacattaacttgtaaatgattctctttgcaatttgaatgagcaggaaaggcaggcattatcttgtgaaaaattccatccaagcatgattgcattcttcagtcttcttctctgccatagatcatgatatttcagggatgggatacaaactcttggtaagaagttttcttggccaggcacagtggctcatgcctgtaatcctagcacattgggaagctgaggcaggaggactgcttgagcccaggagtttgagactagcctgggcaacagggggagaccccatcgccagtaaaaatttaaaaattagcccggcgtggtggtgcacacctatggtcccaactacttgggaggttgacgtgggaggtatcatccaaaaaagtatcagagataagtctcaattaatttaggagtttattttgacaaggttaaggacattcctgtgacacagcctcaggaggtcctaacgacatgtgcccaaggtagtcaggtacagcttgcttttaaacattttagggaaacatgagacatcaataattatgtgtaagatgtgcattggttgggtccagtaaggcgggacaactcgaagggtgccgaggtgggggtctttcaggtcagaaatagataagagaaaaaaggttgcattcttttgagtcctacatccgccttccattgaatacacaatttagtctggctcagtacacctgcatttttacatacaccgtagggcagaggaggcaatcgaatacacatttgtctcaggtgagcctcagaaagatgactttgagtcatgtctgtcctttgtccacaaggaaattccttgtgggcaaattgtgagggggatatgtaattttgatctttgtagctaccttatttagaaataaaatgggaggcagaattgcctgacatagtctccagcttgacttttcccttgacttcatgatttgggggtcctgaaatttatttttctttcacaacggtagtgaggcatgtctgactcccccttcccatcatggcctgaactagtttttcaggttaactttggaatgcccttggctgagaggaggggtccatgcagatggctgggggtagagaagacttagctttatttttgtttcacagaggactgcttgagccccagaatttgaggcttcagtgagctgtgatggcaccactgtacttgatcctggacgacagagcaaaaccctgtctcaaaaaaaaaaaaaaaaagctttcttggtgagacaaggaaattccagagagagtcttcccctatgcttggggttgagcggaggaacaagacaaggttagaggtaccttgattctgaggcttgttttcttttaattctcaaaagcactccgtatgctcaaacaccatattttggggaatcgttttctgtgacccaacagatgaaaaaaaaaaaaacatttcaagaaggagaagaggtggatcagagatgtgagaggggaagtagagggtccttgttgcctcttactaaagactcagtgggctgattgtggccagtggtcaggcagatggctagacaacagcaggtacattggcattccccacaggagaaagaggaaaatacagaggtggcagaaacctgaggggtcaccagcctcagcctcactctctattgccaagtgggccccttattcatcccatttcagaatatctcctctcccctagcatcatctttaataatttcacctggttaatgtctgtactcaactcctgctgctgcaggctaagctcaacctggcagtatgaacaaagaaacccacccattaaaaagtaccctctaggccgggcacagtggctcacgcctgtaatcccagcactttgagaggccaaggtgggcagatcacctgaggtcaggggtttgaggccagcctggtcaacatggtgagacccggtctccactaaaaatacaaaaattagccaggtgtggaggtgtgcgcctgtaatcccagctacttgtgaggctgaggcaggagaatcgcttgaacccgggaggcggaggttgcagtgagctgagactgtgccactgtactccagcctggtcgacagagcaagactccatctcaaaacaaacgaacaaacaaacaaacgaacgaaaagtgctttctaacctcttacgtacgtgccttttttgtggaggtctggggaagggggggccctactaccgaatgaatctactccttggtgcctcttggcacctaattggcttgcaaagctcagctgtggggtccgttcctgcgagaagccagcaggactccccatggaaggtttcccccaggctgggcccctctgacttgtgagacttccagcagcacttttatctacagtattggaggggtctgatgaagcctctgggttcccctcctggactgaagacaggttctgatataattgccggacgggttctccttgcccgttgcccagagctgattcatcaagacaggggaattgcaatggagattttaattcatgcagagccggctgaatgagataccagagttttatcactcaaataagtctccccgataattcagagactggggttttttaaggataattcggctggtaggtatcaggcagtggggagtgctgattggtcaggttggagatgaaatcataggggggtctaagtgggttcttcttgctgttttctgttcctgggtgggattgcagaactggctgagccagataactggtctaggtactgccagctggtgcctcagaatgcagggtctgaaaaatatccccagcaccgatcttagattttacaatagtgatgttatcccttggagcaatagggaaggtttggaatcttgtgacctctgtctggatgactcctaaaccataatttctaatcttgtggctaatttgttagtcttacaaaggcagtctggtccccaggcaagaagggggtttgttttggggaagggctgttatctttgcttcgaagttcaactataaactaaattcctcccaaagttagtttggcctatacccaggaatgaacaagggcagttcggaggttagaagcaagacggaactgggtaagtcagatctctttcactgtcataattttctcacttacaatttttgcaaaggcagtttatccgaatgctccgcatgtgtgtaccctcagcgactacacagctcctgtactataaagaatatttcagaatggcttcggtagccggcagcaccttcctcctctcgcagcagagaagtgttttgctctggaaacttgactggagcctttcccagcctatctagcgaacagcagagcatcatcccgactccgcggactaccgcggcccaacagcaagggtcgcggctccccggcgctctctgccgccctctaccggaaccgagggagccagacagctgcgatattgggaaggcctccggagccgcgaagagcgcacgcgcgagcgcgcgcccgcgttctcctggcgggcttggtatttggcgcctgcgcgctgagtgcgtgccgctccgccgaccgaagaggctggtaagtcctcaagctggcaggtggtcgggggagcggccggagaggagctgccgggagttcgtgccctgcaggtctgcgacgctggcgttcgctcctgcctgggccactttggtgggctcagagcatcgctttttgccaaggggcgtgacctgagcccgcctcctggggctggggggtggagaggaatgggaatcgttaaggccggttatcaatttggtgcctgtttgttgctcgaggaggggcatagagcttacaaatagtgaagaggaaggggcgaggctggaccaggtgggagcgggggtgccccaagtcccagggcggtgaggatcgaggcaggtgcgtgaaaggcaggccccgttccccctccccacccccgccggctgtgtgtggcgggtaagaggagagtgggtagcactactacaaaatgagggtcccgatagaaatcgtacaggtgttgggaccacactcagggcggcaacttgtcatttttgcgtttttaattttcttatagaaacaagcgatttctgtcgtgattcactggggccgctaacgtgcactccctcttttcatcttaggacatgacaccagtggcatatcacggccatggggtctcagcattccgctgctgctcgcccctcctcctgcaggcgaaagcaagaagatgacagggacggtttgctggctgaacgagagcaggaagaagccattgctcagttcccatatgtggaattcaccgggagagatagcatcacctgtctcacgtgccaggggacaggctacattccaacaggtgatcatggagggatgattccctgatgagaatcccaaggtaccctcggagttctcctgtctgcccagacaacttttcttctaggcagtaataccataatagagacagtgccctggacaggagccagctcaactgacttaatacacttgggcagttctgcaacttctcttcctctccttatttttccaaccctttcttttctttaccgccactcttgttcttttcctgaggtttggaacat

SEQ ID NO: 6100 - DNA, 6000 bp, Homo sapiens
tctattaaaaacacaaaaattagccaggtgtggtggtgggcggctgtgatcccacctactcgggaggctgaggcaggagaatcacttgaacctgggagatgaaggctgcagtgagccgagattgcaccactgcactccagcctgggtgacagagtgagactccgtcacacacacacacaaagaaaaagcatcggtgaagacatgagcaatgggaacatttatatgttgctagttgatgagtatgtatatgtgtatatatatgtgtgtatacgtatatatgggtgtgtgtatatatctgtatatatataataattattatttttagggacagggtctcactctatcacctaggctggagtacagtggcatgatcatggttcactgcagccttgagctcctcctaggctcaagtgatcctcccacctcagtttcccaagcggctgtgattacaggcatgtgtcaccatgcccagctaattttttaaattttttgtagagatgaggtcttgctatgttgcccaggctggtcttgaactcctggcttcatgcaatcctcccacctcagcctcccaaagtgctgggattacaggtgtgagccaccatgcctggcttgaagagaatattggtgaaacattctggaaaacaatttggcattatttggagaagatgatggtattctttatgactcagtaatcctaccactagtatgtagtccagagagactcatctcatatgcatagtagtattagttgtaatagaaaaaacctggaaataatgcaaatatccatcaataatagattccaaagtagataaatacattgtggcatatgcatatgatgtgtgggagagagtaaatgaattgcagttagataaccacagaaatgaatgtaaagaacctaatgctgagtaaaaaaacaaaaactagctgcaaaagaaaatttatcatatgattccatttatataaagctcatgtaatgattaatcttatgtgtcaacctaatggggctaagggatatccagatggctggtaatcacaacttctgggagtatctgtgagggtgtttccgtaagagatgtgcattggaatcaggagaatgagcaaagaagattgttctcgccactgtaggtgggcatcatctaatctgttgatgtccccagcagaacaaaaaggtgaaagaagaacaaattatttctcttgagctgggacatcttctcttgtcctcagacatcaacactcctgggtctcaggccttcagactcagactgaatcacactgccagcttttcctgtttctccagcttgcagatggcagactgtgggatttctcagcctccgtaattatgtgagccaatccctaaaatctctctttctctttttttttcctcactctcctgttggttctgtttctctggagaaccctgagtaataaagttcaaaaacatgcaaaactaaaaaatatattgtttaaagcagtgctgtataatagaactcttcacaacggtggaaatattctacaactatgctgcccagtatggtaacaagtgtcatgtggctactgagcacttaaaatatggctaatgtgactgaggaactgaatttttatttaatttaaatttgaacttaaattgtcacatgtggtgaggggctaccatactgtacggcaaggtttataacgagaataaatgaaataaatacaaaatccagaatattggttacttctgagagaaaaataaagacagaatgagggagagatacacaggggatttcaaaagcaaaaataatcttctttttcttaaatgggtattcttctactgttattctttaaactgagcatatattttataaatatccttttatatgtattaaatattcagtaaaacaaatgtagtgaatggggtggtgtatacatggatgtttgtactgttattaaattctgtgtaatcaaatagttttattttcataattgctagcactgagacatgccccaggtgggaggataaagcctccccaaagcccaggccccaagccctggtactaatgctcttgtcctccataaccatggatcttaagctttcacttggaaaggagaggtaggatgttttgttttgaggctcacttaattttctctaaaaaattttaatggggtcaaggcgcagtgactcatgcctgtaatccccgcattttgggaggctgaggtgggctgatcgcttgactcaggagttcgagaccagcctgggaaacacagtgaaaccctgtctctaccaaaaaatacaaaaaaaaaaaaagttagccaggtaaggtggcacatgcctgtagtcccagctacttgggaggctgaggcaggagaatcacttgagcctgggaggcagacattacagtgagctgagatcatgccactgcactactgcagcctcagtgacagagtgagactcaaaacaaagaaacaaaaaatgtaatgggatgaagttggttaagctaagagagcttctgtggacaaggtctctttttctgagaggagaaataaagtcctgcttctattcttaaaaattaacaaaaaccaacaaaatttttaaaaaacaaagatgggaataaaaggtgaagaagtaggctgggtgcggtggctcacacctgtaatcccaacactttgggaggctgaggtggatggatttcttcaggccaggagtttgaaaccagcctgggcaatgtagaccttgtctctactaaaagaaaaaaagttgaggaagtggaaagtagaaactgtaattgtaaacaacttcttgggtgaaattttgctatagaggaaagtaggggatataaagtcaattgaagatttttctaaggtgggagaaaccagatgtattatctgttgctgcgtaacaaattatcccaaaatgcagtagcttagaacaacaaaaatttatctcgtattttctgtgggtcagaacttttaagtgtagtttggctgggtgtctctgacttaaggtctctcatgaggttgcagttagggtgtcagccagcactgtggtctcatctgaaggtgtgatcggggaagatctgcctctaagcagatcatgcggtgttgcatgattcagcttttcgtggctgttcaactgaggacttcagttcctcaatggctcttgctggcagcctctctacagggccacagggcagcttacaacatggcagcagctttaccttagagcaacaggactgcagagagtgctcaggacagaagtcacaatctttttataacctaatcttgaaagtggtagcccatcacctctactttctatttactagaagtgagtcacgaaatccagccaacactaaaggagagggaactgactaaggctgtgaataccaggagacagggttcattggcgggcattttgtaggctacctaccataccagaggatatttgtctgcagataggagtgatcccaccaaagacaggaaatgacaatgcaggagaggagaaaaggcagaggaaatccaggaagaagacctctgcagttattgatccactgcctttttcattttatttggagagatggggtcttgctttgttgcccaggctggagtactgtggctattcacaggcatgatctcactaccaatcaacacaggaattttgatcaactccatttccagtctgggccagttacccctccttaggcaacctggtggttccccactacccgaaggtcaccatattgatgccaaacttagttgaccagttgacatagcatactacagtccagaactcctgggctcaagcaatcctcctgcctcagcctcctgagtagtaaaactaaaaaatatattgtttaaagcagtgctgtataatagaactacaggcatgtgccaccgtgcccagcccactgcctgtgtcactgctatttgatgacttggctgcatatacttgctttatgagtatgttaaacctctactatctgtcatagcaagacccgtcatccttatcacgttggctatgggtttaaaaaaagaaaaaaaaagtcatcttgccttgtttacaaaggcatacacaatctgaccacatctcacacacacagaaatacacacaccccaactgtgtttttctcctcctaatatcaccttccactaaaatatctggggaataaggactttgtttcttgtcagccctcagagatcagctcatgctgcaatttgtttctccaatatcacctcctccaccccaatttcggcacagctctgagactctgctcccttccccacatgttaccatgtgtaagccccaaactcatatactccttttatctaatgctgccaactgcaccagcctcggaaggatggtatgagcaaggcaactgtccttttattgacctctacgttaactctccaccacctcaccaacttcccacagcccacacggtcttcttattactgaaggtgttgggttaacaaaggcaaagttcagtataggtcaagataggaatgacagaacaatttaaaactgaacattaggtatcactcttaaaaactctgggttatgttaaagaaaaattattcagtgatactcattaaagcacagcaaggcagactttattcaggaccatccagatagggatagggaccatggcaatgggattttgtaatgggtagagggactgggctaaaatccaaacagagcagagccaagggagaatttacagccacggagcaggagagacgtgtcagtggatggaaaattactaagaggtagcatcaggagtaatggcattccggctaaccgacctaacaggattcttgctggacaggccagggtgatcagacatcacctgggggatagtggtggatgaggaagccgatcagaccttgagggtgaggggttctttctaaactgacctacctattcctcggccgcctcccacacctccgggcctcactcgcgcctccccgccaggccgtgcgccccgcgtgcccagggcgggtgggaagtacctgccgccatcttgctcaccagcctccaaaatgcggctggggctcctgagcgtggcgctgttgtttgtggggagctctcacttatactcagaccactactcgccctctggaaggcacaggctcggcccctcgccggaaccggcggctagttcccagcaggctgaggccgtccgcaagaggctccggcggcggagggagggaggggcgcatgcagagggcagtacctgttcgtgcctgtctctggggagcctctcttaccttttccccaccgctatagtctttgaattcgggtttctccttttctgttgtcccaatggcctttaaccaaaattttacatacctaagcagtttctagaccggctgtaataacagtagttgtaatagtgaaatgacacatttgtattgtgaatctgtattttctcctcaaaacattctgggttttatcatccccattttatagattaataagtcaggggataaagagttgaaagggagggctattaggtgaccatttcatactatagttgagaaaaattagcccaacaagtgaaatggtgagcattagaatttgcggctctcgactcaccgttcccaggctctttaactgctatttcacacagggaagaatgtgatacgtggccaaaaatttttatttttatatttttggggaatagagttttaaaattaatgaattgtgttgacttcatgtctatttgtaagtaatcgattatggcatatttgtcttaactctccaagtttctttcaaaatatgggcgtgtctccggtatgttagcttgctttgtgtttttaacataggaatttaaaggattgcattaatatgttcagcttaggaagtaacacatactatagatgctcagtccaaataatatatcatttttatttttagattgtggaacagcaccgcttaaggatgtgttgcaagggtctcggattatagggggcaccgaagcacaagctggcgcatggccgtgggtggtgagcctgcagattaaatat

SEQ ID NO: 6101 - DNA, 6000 bp, Homo sapiens
aaataaataaataaataaataaaaaataaagagaataaagggatatgaagttcctaattccagaacatttcagagctttctgctatgggcaagttagtagtacgcaagtaaaagaatggggccagatgcagtagcttatgctactttgggaggtaggggtgggaggattgcttgagtgcaagagttcaagaccagcctgggcaatatactgagaccccatctctataaaaatattaacaaactagccaagcatggaggtgcgtgcctgtagtgtcagctagttgggaagctgagatgggaggatcacttgagcccaggaggttgaagctgcagtgagctgtgatcatgccattgcaatccagcctgggcaacacagcaagccctggtctcaaaaaaaaagaatgggcaaggtatggatgtggtttatgaacaagcgatttggggaattcaaggtagtccagggtatgtgggtcccatactttcgacgaaacatctctgcaaagatacagccaacactccacatgtccacaggtgttgcatatgtggactgcagaagaacttcgggagctcggtaccagagtgtaacaacctaaagggaataggaagaatggatggggaccccatgggttaccatgaaacacaacttgcttgactgaacacatgaagcacatgacttctcaattgctacgggcaatcactctcctactcccaaccagaacccattttggtaccatctttctactgaccacgggtgtaagtgccatctggtagctgtagattctggccaggccaaagtcagccagcttgactgttccaccacttgtcaccagaatgttctctggcttcagatctcggtgaacgatgcaattggcatgaaggaaatctaggcctcttagaaactggcgcatcagatcctagtttcaaaggggaggtacagatgcactggaaactaggcaccatacctgaaatcccagaaggttctactacaaaggtcccaatccacctctcaatgcctaccaaccccactcaccttgatcgtttcggctggcaagcctggtgggggtgccttgtccagatatgtccttaggtcctggtctacatgctcaaacaccagggttaccttgatctcccggtcagttcgggatgtggcacagacgtccatcagcctgaccagagtaaatgctcacttttcaatcccctttaacccaacatggcctctcattatttcctcagggtccccacttctctacagatcatcacaccccacctataggctgtcttttccctttactccccacgcccaaccctccaccaccttctcaccggacaacattgggatgctcaaaagcctccagtcgcctcagtaaagccacctcacgaactgtgctgatgggaaggcctcctccacctcctcctccattggggactctcacactcttgagggccacaaagtggccactgtggggatcacgggccttgtacactgtcccataggcaccgacaccaatttcagccactggctcatatcgagaggtagccattctcagatcaagggagaccctacaatcacagactcctatcaccaaaagtcgcttacagagttaggatggtatgagcctgcagcaacaaagggactcccaaaaaaaaagcgcaaagaacaccaccagcatcccatcccccgctcccagtcttccttggggccggccccagagataacacaatgactcaataccaacccctccagccacgtgaggccctgcaatagaaaacgctttttcctttgggacaatcgcgccccgcacaaagatcacacatgacacatgccttgcatcgaagatcctacacctcagtccctaaaattatactttcccatgaccacaaaggccccacttcccgcccttgagcgacccttccataaccagctcgcgaaacgaacgcgtggaaagctgtgaggggggcgggcactggttctcattcctgggaagggactgcacttacctcacgccagcccggggtgctgtgggggcggcccgttatcggggccccggagccggttcctacggccccatacacccgagctcggtccggagcagctggacgcagagggcccgaccatagacacaggccgcaagctagagaggccccctcacccccaccctcaccatgtgaccagctgccaaagaggcgcgcggaaactgggagggcggggcgaacgccggacgttctgggcacgtgaccgccacccatgcgctgaggggcggacaggaggtgcttcgactgggaggagggcgaagagtgtaagggggcggaggggcgatggcagccacgtgatctgttgctatcacacgtgaccgcttgacattgctctgaggagcagaggtgtggctacgcggcgggcacgtgactggctgccacaacccccgctgcagggggggagcggtgagggggacaagagagggtggagcccgaggcggtgccatggcaacctaggccacccagagcccaactcccggctgaaggattgtctcactaccggtctgaaggctgaactccagtctcactaccggtctttcagcctgtctgcattggggagggggtgggagttggggtaccagaggtgatgctgtcaccttttcgctccaccatgagaaaacatactctcatttgtgtcattgtttcattcattaattctacaacattttactgagtgcttgcttccagtgtgtatgtgggtttttattttgtttttggtgtctgtcactggccctttaaagtagtggtacgactatctataaagatgtagccaacaatggggtcttctacaatagggagtaaacaatgcccatttgagggcaaaactacgattaaaggatgacggaaggcagattaatacagtaatccaacaggctcagtgacaaggtaatcctctcacttttccaacttccaaacctccctgggagtgttaatgcaaagacctgaggccatctggcagagaagttattgatgagcaggagacaggaatacttgaccttttaagttttttttttttttccagtaggaaggttctatgattatgtgatatttgtatgtgtgcatatatgcttctatgtatatatgtatgtatatgatattatttatcacatcatatataagacggatacaggattgcacatgtgcaagaaagttaccaccacaccccctgcaccctccagaccaccacaatgaatgaaaatgacatgcccccttctgcaaaccttgtgactactcatttggagttattgtgcttccctctttttccctagtgccgctttcttagcacttagcactgtccagaacacacttgttcccaaatggcctctgcccagacacctaggtagacacaagtagatttctcctactttgttttattggctccaaggtctttatctcccagccctttgggggtatgggagtaaaggaggaaagcggttagtgtctcatttgtgagaatttgtctaaaatctaaagccattttattaccctatttgccactccttccactctaacttctgttttccttaaccatctggctgagaatataagagttcaaactagaagatgaatataaaccatgacttagagcaaaatagaatacatattaatacagatgcctcctctttccatcctgatacttgtagccctgggcccctcctggcaagggcagctggaacactagtaagaaaaacctcaaggactgaactgactaaggggctcaagaggtgaatgttttattggctaccttgctaggggtgggtgctttgtaagccttctggaaggctaagataattgtctgtgagtttttcaaactcccttcccacaccagcattccccacttcagcctcaccttccacataagaccttcacagcttactgtctttgcaacagaagacgtcctctctgtctgcttgggtcccagcccctttttctgattcattcattagtccatccaaaacatttgaatacttcatgggaacattactgtctctccatcactttctattgaggaaccttaatttggcagtctgtcccaggctctgtcccctcccttcttctgttaattactctttcactaattaaattttttcccagtatgtttgacccaatgagctcccctggaatcccttttccctcagctttgcaaaggggaggagagggagaatgtaagtgtaagaaagaaaaaaatgtgatgggggtagaacttggcctcagagggaagtctccataaaaggaaaggggtaagtgtgtgtattgttcacttcagtgtagtggaggtgagggcaggagagtaccaggaaagacactcccatccctttagcacgcctacctcccctgctccctccctcacctccttcacacattacaatcacaggcttctgtttctcagacaatccgattccattccttacacacctctctttcccagtccccatcgatcacacttttcagccctttgggtaaagtgtatattgcttgagtcccacccctgcccatgtacctccctcacacctccgacacttgcacagctctttctttgcacattcccattttgcacaagcctcaccctccctggtacacctgcgtcatttaaccactcaccttccatgctcacccgctcatcccccactcccagacacacacctagtcaacttgtgtgcacactccccttccttggccactccccttcctccaccctcctcgggatcccacacttgcccccgcccctgggacacctgctcgtgcggggcagggcggggatgcgcagccgcggccccttctcctctccccctccccgccccgcccctccctccatccttcacccgctccccggcgcccgccccgcccgcccgccactccgggggggtctccgccgccgccgccgccggaaggagccgccatttgccaccgccgagcgcacgggccgagccaagcctgatcccggagccggagggggactgggaccgagagaacggcgatggggggcggccccgccgcaggaggacccgggcgcgtaaccccgggggcccggcccgctccagacccagacccgcggggtgcggcaccctgagcccccctccccgccccctgccctggccatggccgcccaccccgccgcccccgggccgccagcccgctcggccccgcaagcaccggagccccggcggtggcagcagtgaacggctgtcgcaggccccgaagaccccggcccggctcggctctctagcgcgcgcccccttcccggccttgtcctctcccctccccccgccgctagcgagccccccttgcacgctgccccccgcccccggtgtccggacgatgctcaagtctcggctccgcatgtttctgaacgagctgaagctgctggtgctgacaggcggggggcggccccgggccgagccgcaaccccgggggggccggggaggcggctgcggctgggcgcccttcgctggctgctccacccgggacggcgacggcgacgaggaggagtactacgggtcggagccgcgggcccggggcctggccggcgacaaggagccgcgggccggacccctgccgccgcccgcgccgccgctgccgcccccgggcgcgctggacgccctgtcgctcagcagtagcctggacagcggactccgaacccctcagtgccggatctgcttccagggcccggagcaggtcaggcctgggcacctggccgggcgcggagggtggaggcgcgcacctggggtgtcagcggagaccgcgagcaggcgcggcgcctaaggaggctgggcgggccccaggacacggagtgggaatggggtgaggccgaggggctggcaggggactcctggagcgcttgtttgtgtcggagggtcaagggtccccaggaaggggtggggctttctccccggagagcgcaaaatccctctcacccattaacagggactgctgttctctcctatttccctcgccccagggtctccg

SEQ ID NO: 6102 - DNA, 6000 bp, Homo sapiens
agagctctgttctgacctccctaaacaggcagtttcacctgctgggctagtgtttttctgcttcttagtcaatctgttaaaattttagcaggagatacttggataccttttcagaaaacatatggaagattgtaattattttggcccagtacaattttagaattgagagagcaaggaagaggcgcaaatctcctgctcataaataaccaaatctgtgggcactttaaaaagcattctgtgcagcaagagaatttacgtgccacatttcacccttggcacactttccaaatgaattgttcaaagagaagttatattaggacaaatagaaatgacgaccaggaccagatgtggatctttagttaatatttatgcaacacccaaagggaagatagtattgcacaataaactaaaaatgtcttaggcaaataaggaaatctttaccctgaggaactggcactgcaaaggtatgaattatacaacaaaggactgagaatgcagaacaaatgcagggtaggtcggggctactataaaaaggaattcattgaggaagtggtgaggtagcagatgtgtggagcctacttcaggaaaataagggcttagcgcttttttggccagtattgtgtctaaggtagaaaattcaagccagccatcctaatttccttcacctgtggagagcaactgtcgctttaaatagaacatacacatattcagaactgatgctgcaaccttacatcaaataagtacaccttgataaactaaaaacctatgtcctcagattttaaatgatctccaacaataatgatgacatctttaatctgattttcctcctaaagttgttccaggaaggtagaaaattcaggaattggctgcttctcagcccttggagagcaatctaaaagagaccatggcttaatgctctggaaggatattgaaacctacattaaattataatagaaaaatttgttaaaagcaactggatttctcaaacacagctaggttttcagccttctgtttatcagggaaggcaagatgtgccattttacagcccatctcccagtcacctaggcttccaattcagaggtattgggaggtggggaaaggagaaaacgaggagatggaggagtgtataaaatttatttaaaactattggagccatggctgggcgcagtggctcatgcctataatcccagcactttgggaggccaaggcaagtggataacttgaggtcaggagttcaagaccagcgtgggcaacatggtaaaacccccgtctctattaaaaatacaaaaattagtcgggcttgatggcacacacctacaatcccagctactggggatgctgaggcaggagaatcgcttgagcccgggaggcagaggttgtagtgagccaagatcgggccactgcactccagcttgggcgacagagtgagattctgtttcaaaaaaaaaaaaaaattaaaaattaaattaaactattggagccttaaaaatgaacacagctgtggaaaaggcttacaagcttttagcatgtggaacccaaagctctctaatatttttacatatctgagtcctcttaataactgaagagacctgtccatgtgactccccttcacgggtattcctgcagacttgatgtattctgaaaaactgtgaacctgctcccttcctctctccttggttaatacttcacgatctttaacactaacgacaaacaataaatcagcgatgaaaatttttggattttccagctgttacgtagtttctcctaagcacatttattttgttcatttattaacaatctttttaaagtttcttctccgtgtccagatgttataggctctgggttttatgtggaaaagaagactgacaggatccctgacctcatggagcttccactcagtggtgcttccagatactaatacatactatgaagaaactaatacatggtggttggatagagattgatgggggagagcctactttatttctgaggttatgccatttgagctaagacctgaatggtgagaaggagctagagaaggtttgaggagaagaacctcatgcaggaggaagagaaagtggttagttcctgagaaggatgtctgtgttgtacacatatgaacacaacatgaagcgggaggggtagtctgggctaaatgaaggcttggctggccatggtaagaattagttttattagctgtaaaacaggaagttgttggacatttaaaaatacaacaggaagttgtggaacatttaaaaattgggaatgtataggttttcaaaggaaacttctgcctaaagttaaaattggggaagggaggcattgcaggggtagaagtacggggaccacttagagggctactgcatttgtctatgcaggagatgagggcagctgggctgtggactcaagtagtaaagatgtgataggatgtgttttggaggtaactgtccaggtttttgttaacaagtaaaatgaaacgaggaagctagaaagcatagtaataatgatatactagctaatacttctgtagcactttcctggtcccttttagatattttacataggttaactactttaatactcataataacagtactcataagataagtactattattatcactgtttcatagattagaaaacagagtcacaaagaggttgaacgactggccaaagatcgcccaaatagtaatagcagagtatgcactcaaacttaaacatctgatcccacagtatgtgttcttccttcagtgttctaggacaccatatacatattttatatatactatatatatctcagcatgtaagtgcattggagagacacagagcatcaggatggactaactgatatgattttcaaaattttcaagtgagcaaaggttatggaggaaaagggtaaaagatcagtccctacctgtaaagacataattccttttatttttgtttacatatatttgtccagggcacaaaaaatgtgctactgtggatggcataacaggtataatattaataaatattcatcattttatctgtgtgtatccaatacagatttctcagatttccttgtgaaatcagggaaatatgtagctttgttctacagaagcccagaccacggtattttctttccaggccactgctagacacccagggggctcaatttcttgccacagtttcggagagcttgctggttaggtgctgctcttggttggaaccagtcggcccgcatgcaaaacagacctgtcttccacaccttgtggttactatgcagcagggggcgctgcagtagtgtacatcgcggtgcaccggagctactctcctggccagaaagccaacaagccgggaggaggcgtgtcaggcagccctgggtcctctttggtcttgcaactttagtacccagagcttgttctacacagaccattctacaccatatttcaccatgttggatgctttccatccagtcctgcctccgagcggaaaggaaagggcattagcttactgccttactaggtttaagtataatgctgtaccggcttgcactagaggtttctctcctgtgttctcagggtcaacccgacagtccctctgaaaccacgaaggggtccccgggcagttgctgcggggtgtgtgtgtgtctttctttccctttttggggtcctttctttttaaccttactgaaggaggaaacgtttctctccctacacgtctttccactgacattgtggccaaccgtaggctaagagctgaaatctctccttcctaagttgcctccaagctctccaatactacctcctcccccccatttagtctcacacacagtgtgcgtgagagatcgccagtgagtttgtgacaaccgaagctgcagcagtcgccaaacctgttcttcctctcccggtctcagaagtctctccagctgaccggacttacgcctggcagctcttggcacacacagcgctgtggctgagattcagccgtgccaggcgctgccaggcagcagcggggcgaccgaccacctcctcctcgacctcctttctcccagcttcccctcccagggtgcactgtatctactcctttgggctgtcttccagccgtcgcccttgggtcccgggggctttccagagtgaaatcgaaggtgaaagaaacaagaggacgggaggctggtaggaggagcctccaggccggggagggtgggaggagcctccagcccgaggggcagggtaggaggagccttccgggaggatctgggtggagaaaggggctgggccaagccgggatggagggttggtcacgcaggcgcggggggccgcgtcgagaaccccacgcgggagcttctggagtctccagccaccgcttctcacttcactggagaagggagctggggctggggctggggctggggctgggagggagctaataaacattgaatgtgcagcagctgccttggcggccggagtccgcccgagcgacaccggagcagtgcgcccgggaggcggcgaggggaggcggttcgccttgtccctcccacccgcgcctctttctctctcttcctccagctggtcccagagcccggcttggtccggtccctctgcccccatcccgcacccttccacctcctccgagtcccactcctcacctaggacgccccaaactgccatgggttagggtggggatcgcgacccgcgcgaaagaccagccctgcgcttccgccgggggacgcggagcccaaacgccgctcaccgcttgcgggcgccgggcatggggagtgtggtgtgagcccgcacccggggaggacgcaggagctgcggagacgggcgcgaggaggaggagaggagtcgtggattggaaggacccgagggagggagggtggggaagcgagggaaaagtgaagctgggaggagaaggcggcggaaggtggagattgatgcttctgttttttgttgccgctgctgccctcgcgctgggagccgagccggagggaaggcggtggagagatgattgcagagttggtgagcagcgctctggggctcgccttgtatctcaacaccctgagtgcggatttctgctatgatgacaggtaaggggccgagaggagggggcgacgggctgcagggggcacactccgcagtggctctgaagcttccctctttaaggctcaaagtgcgtcttggaggaactggttcagcacctgatggtttaggcgacacgtaaacattaacacctaaatcaaacaccggggacgtgaggcgcgctgggcgggccgagggagtttccgctcctagtttgcagcaggttctctcccttgcttctcggctgttggcagacgcttgagtttcttagcggaaatcccggcaatttgggaaactgtttaatgaacgtattaaattaaagtcttaggtattccttgatgcaacaaagcacattaagtgattttacgtctggttgggaggaagcctctcctcgatccctgatagatcctccctgtcccgtttccttttattgatgggacacttttatttcccgaagttaaaacacacgtttgatagttgccaaaattgtgaaaagggagatcgttctctgctttaactttcccttttaacgtgtatagacttttactttgagccaaaataatgctgctgatggtctctcccgccgccctagcctccttcaccaatccattgggcagcactttataaaagcctcggctttctcatttctgtttgggagttgtacattagatgttagtggttcttttgtactaattggagaagaagacgcccctagagactgaagttgtcttctgcacttaggttagtttgggtggctaatgagacctgaactgtgttgtcaaagaaactgcatcgatttctggaaaatgtcaccgttgtgttggtgtctcttcctatcttttaaacgttattagtgttcagaaagtgatgaaaagcccctatatccattagggaaaattccaatttgtgtccttccggtgtcttaatctgattacaa

SEQ ID NO: 6103 - DNA, 6000 bp, Homo sapiens
agctcaggttttggttatcttaagatttgtagccgattaaatccattttacctcacagtcttgttaattcaggtcatggccaagaacatcaaatcatttggtcatctaatgtgtctcacattcatttcttcaccttatagttctgttattcctctaccttaaccaaattgttcttactctttctctcctccaaaaagcattccattgtgctctctaaaattctcttccaagataaattaatatttcacatcctcagattctttactgaatcctcctttccatctccttggcttagctgcaatttggatcctttagtatactaatgcccttggaactctttcaattggaaggtgctcattctttcagattccaaatacatgagggtcagaagaaggtgttggtgcttctaggtttaccccaccctgcaacttcaggtgatcattcctatcattcctccatcatcctatagaaacttcagctgctttctcacaaaatatcctgctctccatctttacctactcatggtagaaacaagccaccaaccttccagtaactccgcaaaatgcactgggaatttaagcatgtggcccacagatgtctatcaaatgcccactaagcaatctccacataacttttgttctagtctatttttttcttgaattcactatagtctctcactcccacacccacatcagatccttgtccaaccagaacattctttcaattattcccactatgcctgtccttcgacctcacaggacactctaacccctcatcttctccctccatatccctacccttctgcccacccaaccccaatcttgattttatctattcagttaagacttcataatcatcacttcaaccactttcctaccaatatcttcaactgtgctacccttctattctacagcagctacctagctaaacactaacacagaactgatccaactccataattcatttagtatttattgaaagtgcttggcattttcccaggagctggatatacaatcaaaaacaataggtcatccaagttcagagagttaacgagtagaagaatcaggactagaactcaaatctgtctgactccagatccccaactctccagtcctgtctccaatatatttcaaattttacctaatttccttaaaatgtgaccacaccatttcccactctttttaacagaagatgtcatcaccaacccctcaacttccaagcattatgcctacaaacataaaagcctctatacacatccactcttcccacgctcatccactcatcctcctctcctaacacaaaggaaaagggtattcctcctttcaaaggctgatccatttgtatcacattcctaccttctcaggaatctcaatgtattttgttcttcaacaatacattcatattttagccttcagctttgtcaaaaattacttctataacaccctttcgtcactattcctcaaatccccacccaccctccacctcagttactagtaatctttctgtatatttcccaagactataagctccatccagcagttaacttcttattttgttcacaaccatatgctcagtccttagtactatataaggcacataataggcatgtagaacatatacagaataaacaaataaccatgattacaatcatccttataatttttccagccaacaataattttaaaatttgaaaacaattcaaaataaaattaatgacaattacatcctagggaatacaaaaagacatacctccagttcattttccagtttcattactttagtttttaattgattttctatttttttaaaaaaaaagaaaaacgttttaattgattagttaccacaaaacaaacttttaaataaatttcaataacaaaattaattcttttaaaagagtccatcatgattataaggtaacaaaaagtattatatggcagatccataaaataggagtctagaaatatttattattaaatgttatatattaaaaataaactgaatatatatattttatagaatataatttaattttctacagtttaatgaacaaatggaattcattatttaataccataataaactttttccaaggtgcttaccaaattttgcttgttcttctccagctttttctacttcttccaaagccagctccacttcttgagctttcatctaaacattaaaaaaaggttatttcaatatgcctttatactggaatgtaagcactgaaaataaaaattctgttttatttgttatgatccttagtgccagcaatggctggcacatggagacgttcagtaaatatttgctgaataaatagtttttggtttttgtttttgttttttttgcttttgagatagggcctcactttgtcacccaggctggagtgcagtggcacaatctcagctcactgcaacctcctgcctcctgggctcaagcaatcttcccatctcagtctcctgagtagctgggactacaggtgcatgccatcatgcttggcgtgccatcatgcttggtgtgccatcatgctcggcaaattttttcgtacaggcaaggactcactatattatccaggctagtcttgaactcccaggctcaagcaatcctcctgccttggcctcccaaagtgctgggattacagacgtgagccaccatgccaggcaattttcttacttaagactacaatttctagatttttaatagcatgaaacatttttgattctcctttttacctcaagtcctcaagtcttatatccagtaatgcaacatctccctttgtaatgtctttccactactttttttctgttccaattgctattattctaatccataatttcaggtttaaactccgctataatgtgatgtctacaaagctccaatttccttcagtttgtcctacataatatactcagttttgccttcttaaggtgtatttttgtacctatcaattgtgtttcgaaaacctttactgccttctcaattgctgatagcataaaatacacctttaaggccctcaacaacctatctcaaagtacttacccaagatttgttttctctacagtctgctacaaacttgctgcaccttgtttcctcaaatataaagaataaacatatttcctgttctcagtatttatttatggtaaccaacagctctagaattcccttactatcttaccactgcattgccttccacttatctaacactactcctcagtattgatcctttgtgaagtcttctgacatctcttaaatcatttcccctcttaacaaatccctatagcagtcattgtctgcatttgtcatttggacctcaagatatatttccttatgttacttttcaacatactcattctatttcccctacacacccttttagaaactttaagtagaaactagcaatgttttatacactaaaatacttaattcacatttaaatatattgcattttttagtggtgatgtagatattaccaggtattttcacaaagattaccttatataagaacagatttttatagttccactaatagccaaacctatagttaaaacctactacatacaaaccttcattagtgactgagtaattctgaaaaggtgtatcacattttcttgcttttcactttttagctcatttacttccacctaagtaaacagaaaagcaactgttttatattttataaccttcaagcaaaatataagaacacttccagattgtgacaattatagttgtccctgaaaaaaataaattcatattttattaataaattaatcataagttaatgtatatatctattattattgaccaattaagcaccttggataaggaaatcaataaattatctgccagttcttcttgacggggcaggtcatctgggtcaactttcattatttctttccagtttatattaggtggcatcttgaattctttcactgtgctccacctctgtaacaaaacaggtgtatattagcattttcaaggtacacagtattattggttttctagcaccttacattttttgcagattatttcattataactttctgatgttagcaaaacagacaattgggccacaaaatagacaagtgggcaaaatagccttgatcaaaaatagcagtcggcacaaactgtcagagtgtcccggctaaataaaatgtgacggcttccttgctaacactaatctaagttaatacttaagatttctggatcccttcctccacacccctacccacaatgcgcgcgaacaccctaatcctggcaagcgcgagggtctgtggaaggccgacaatcatccctgatttggagaaacagaattggggctgaaaaaaaacgcagaaattaacatttggaatgagtgaagttgtgcggcggaaactggaaccgaagcaaggcagtattagggacccgaggctggaagggcggggtagctatgctgtggcacacgggccctcaggctaaagaacctgagcgtggagtgactcgctaatcctgcttacaaggatccacccacctagaccaagcctggcaaccagcggaggcctctcactaccgcaaccaccaagctggacccggccgcgggccctgacagatccctatcgcggttccacgcggactctgggtccagccaaatggtcccgagcaagccaaagcggcagcggctgctaggcgacaccatccccaactccgccaaggccagaataagatcccggatgccaggagagcctacagttcacgaccgtgggtgatgctttacgtttagattctccgccggagtcccagagctcggtgttcaggatgatgagaaggcgtggaacgaggacttcaaatcccagagtgcagttctgcctgaggcttctgcatgctgggaactgaagtccctgagaagaggaggtaaggcgctcccggcatgcaacgcgtaagactgcgacggtaccggggcggcggggaaggaccgagaggcgggaggagcagcggctcaggcgcctgcaaactggtggcctgaacgaggtagaccatgactgtggtttcagtggcgtcactcgctgggctgctcttcctgaggttttcctaagccatcccctggcggaaccgcccccaggtgaggtcgagctgtcggtcagcatattgggaggaattgaggggagcagtcctgggttagagaagcttctgctattggggccgtagggcctggtcccattctgaaaaagtgggaacaccctgccttctcttcaggcgtttgcaagcggcgtccagggtagtgccttctgtaagaaggaaaaaacaaaaagttttagccttgtttagtatcagaatctgtcttgatagttagagtgagagccgcgcagccgtgatcctcgtttgggggcgagcgaagaattgacaagaggtctcggcatcccgaccccgcccgccttacctgtagcaccattcctttcgcggatcgtggggcttgatggttgtggagctagtataaagtcaaggctctagagaggagaggttagtacttgtccggaccactgccgggggtggagagagaagggatccaaggactcacctgtactattgttgccacttgcttggttacctagggtgcccttccatgaaagcgccttctctggtgtttaccactcttactcgtgcaagttttgctcatcctgctcgtctgctcacaatcatgctggagtatgatacatctctacctaactttcctaagaagctgtagacttaaatctaaatgacatttccaactatctggaccagtgctttgtctttttttttttttaaacgctgctttaaaaaaaaaattactgtacttgacagtaaattttcctttcgaaaataagtaatgagtttctttttaaacccccaatttgggtaaaataagtagctcagtacaaaataaaaagatactgattttgtgagatgaattttaaagacattagttagatttataggaatgacaattttactacttttctgaaagattatatgccaaatactattcat

SEQ ID NO: 6104 - DNA, 6000 bp, Homo sapiens
tcaccgtgaagatggcattgaactgggccttgaaggatgattgatagtggtggggagggattctccagggagagaagcaggaaggctattctaggaaaaaaggattatggcaatagaagaatacactctctgtggggaatagcaacaggtgtaaccagggcatgagataatataggaagtaatggtgggaaattatgctggaaatgtagactgaagtcaggttgcagagggctttgaatgtcaggtgcagaagtgggtgtatttggcctgatcatcccagacctgttacaaggggatggcatgattatatttgttgtattttagaaagaaaattctaatggctaaggtaggtcagattggaaccaaggagagtttagaaaccattataatagtttaaaagaaagaattggttgcagcccctaattctgtgttgagaagaagtttagaggtaacattggtaagacttaagtactgattggatgtggagacactccagttagattttaaatgcacacgctaattttctaacattggtgcacacacacatacttcttattttggcttcaccagactcagcctaattctccctgactatttaagtcagccactgatttatttttctatcttcagaaaaaaaaaaagaaaaaattataggtctgtgatcttatggattctttctgtatgatttgattttgatgatcccataggattcttcaggctaaggaatgctgactgtgcaaacaaatttttgaagacttggatgctctcattatatttatgtgctgcagatacctactatttggaatggttgttgctatttgcaaacccgcctactaagcactttggggaaattattagcagccattgacctctgatagggaaacattagcagttcaacctatcctctctccatttcaggtctcctgctgaatgctgaaggataattaggattttagaatttagtgagggaccatactttaatgtgtatgtcagtcccatacttttctagaatattctttccctctatagtattattctagtaagtaaggactattcctcttggccttaaaatgtaattcaaggctgggtgtggtggttcatgcctgtaatcctagcactttgggaggctgaggcaggcggattgcctgagctcaggagttcgagactagcctgggcaacacggtgaaaccctgtctctactacaatacagaaaattagccgggtgtggtggcatgcagctgtggtcccattgggtatggtggcatgcacctgtggtcccagttacttgggaggctgaggcaggagaattgcttaaacccgggaggcagaggttgcagtgagccgagatcgcaccactgcactccaggctggatggcagagcgagactctgtctccaaaaaacaacaacaacaacaaaaatggtaattatagggtcagagttgagaaacaaaaatcaacaaatacaaatcattttctctttaatttataagcattaggaattcattttttgttgcataaaagatttacatttaatctctgaggtaaaagaagtttcggcttcaacttggacttgtgtcattcccacctcatccaaattcatgtaacatggtgggaagggtcctctattgtctcatacatttagtctaaaagcattcttgggggaccccctcctatgttcaaatcagtgtctccatataaaaggaagctctgaggctgttccagttgttcctacattgtctttgccacttgggtgagcgttttcagcctccctgagccccaggtgccccagtgtacataatacttacactatgggtgctgcaaaggcctggaaagataggtggagccattggagtcaactctggcacatggtggggtttagttattttagacactggctttcagaagttagatggaagagacacagacttttccatatgcagattataacttagttttcaaaaccattaattggcagaaagttatttaaaagtcccaattctcatacctccattaaaatattctgatgtcaaaaatggaattatgtggccgcctaccctctcggtggtctggaaaatagtcatattttcactttttctccttaggctagttacagaacacagaacccacttcccatgaactgtgtctaccctggtgttgaaagactgagcttgaagaatacttgtcttttagcctttagaaagctctgtcaacaagcttctgtgaaacaaagttcctgaaaaagctatcttatttctttttaaataagtggcagatacaggtacataattcagtttatcttgtagtcaggaaaaaggcattaaatcgtgctgttgtagaattttagccacattcttttggccattcaaatggccatcgatccaacaaatactgattgagaacctattatatgttaagtactacaccagttcaacaccagtgaacaagacacaatcgctgatatcatcccaagtttaattgacttgtataaacaatctgtacattacaaaaattaatgttgttgctatctgaaatgggaggcattttctgtcatttttttagtagagaggaataaagagaccgaactttaaaaattaatggcgtttgagttaataactggaatacctatttttattgatcaattgtcatatagatgtgcagttacttaatccactagataatttgtatttctgcagtattttccatttcatgcatcattataatgctgtgtattcaaggtatgaacccgtttcatcaacagtattaatctcaattcatttaggagctttaaataatattcccttattaagtatattcttgatatgctgcccatgcttttacagtgtcagaagccgttaatgcagataaaaacaaacattcagttaaagaaccttctcatatattaattcgatttcagaaattatttgtgcatttatatttcctgaatggcttcggttatgacaaacatctaactaggctaattcagagctttgaggctaaagtccagcctcatggattggtttaatctgaagaacattaaaatagtagaacattttctgtcttggcaagaatcatagtgttgaaatttcaagaagaagatttaaatttgtccatgagactgtaaacttcttgaaggcaaggactcatctctgtagccctgatgcataattgatgttcttcaaatgtttgctgatttgagttgaactgaggagaataacaaaacagcatttgagaatcaaagtctcccaggttttccttatataatttacaaggacttccctggcaaactatcctttcttcttcgtttaaaaaatttcactttattatgttcatctttgatgtggaacattttttatggccttctgctgtgactcattttggtgctgagttatctgcttccttggagctcagcccttccttttaagctgtggtattcaggctccccaaagtcagcttgcctacgggtagagatcacagcaaaatgtgcaaatggtattccaacttctaggtaaaaacagacaactaaaattaaaaactctacatcatgtaagtcacctggaaaaaaaaaacagaaaacaaaacccgagggcatttgtatattcctgttaactcttgactgactaaagggagttatcttttctgcagtgataaaaaggtggcccaagacaatctccccatcttacaaaaagttctgaagttttactgtggagtccaattaaactggcatttaacttcagaaactacatccctatataatgtaatcatcacaaccaaatacaaattaattaatatatatggacaaagtttataagttcaatattagaataggggaaaagggaagtaggaaaagtttagagtcctccacgcatccttcatttatcaccaagagatttgctcctttgctccttctgttagtgtaagtcagaatttctcaattttcagtgtgtttatgaattgttattattgtttatcccaaacacatattttgtcttataggtgatttaagagctctaaaagggacatgttaactatcttcagaagctcacctctaacaatatttctatacctatattatacaagaaaactaatgaagattgacagtcaaattcctggagagacctttgacccttctctgtcttaaatttttcacttctgaaatagaaagccgggtcactggtcatcttatcctgcactttgggcataaagaagcttaggtccaaagcgccattactgtactcatgatgaccccttgaaggcacatcagtagggctgtctggactgtgacatgccatcagacatcatttaggggacttcaagtctggcttcttgcagagatgctgtgggatgcctcaaaaacttcctgcatggctagtgtaactatggggctttagatctttgttaaatacaagcaaacattaacagcagcagtggagaggataagttgccaatcctcccaaatttcttttccaggcagggggttgtcctgccgctctcagaactggctgtcatctgctgctctcttgtcacactgacacggccccctggctgggctgattggtcgctggcaataactgatatggaatactgatgttctctccggcagttccttccactctaaagagactccttttcatccctcttctcgcctttcctagcccagcctagtgcccaccctcccccgaccatgcctcccctgcacctggggagggggaggaccagtcctgggcgtgatgctctgagacggtggtgaaatccaccaggctgctttcactccggctcgctctccggagagtcctgttccagacttctcagggtttttacagcacaaacaactgcatacggcccgaggggaggctgaaaaggacttgtgtgtggtggttttattgcctgtcatcactttgctggcctcctcccgactggagcctggaggttcacagtggatttctttctgccgaagacaccaaggcactgaggaaggatcccttctccttctgttgactctttctatttttatggtaagtgcttacgttgaatgagctgctctgttgctgcagtgaactgaaccgttcgttccccctcttcccagctaagcttagtgaccttccttctgcatttcctctgttttcatggatcttgtctgggatgatccagcttcaaaaatgccaggggtcatttgcctggagtgtttgtctttttatcttttttccataaacgtgagctcttctgctgtgatacgaatataagtgctctgtctttgtccttgaagcagcagccggggaaatgtgttcacgatggtaaactgcagcagcgtgcagggaatctgtggaggatgactgacaaatttgggcaggatgaatcctcagtgtgccaggggcactcactcaggatcagaagggccgggggtgacctgcccacatagcaaactcttccatctttgtggataaagatgagcacacacgtgtgagttatgttgagtctgctgtgggcagctgtgttttctgcacctgcccgtgtgggtctgggatgaccctatatcttgtggggtttacaacttgggcaggaacattctcagcaggaggaatcctgagctggcagacggagtagactgcatgacctcattgcttctttcccttctgagtctcagggtacccagttctgcaaaccatattttacaggctcttcagagagtggtagggcagtgatgacaggaacatttttgagttgacaacatagttttgtcctcctgctaggagataaaatactttgaggttattagaatggttagacttttctaggagaacataagcaggtttctgacgaagactatggatgtggcagattgtttattccagggacattactcttacaatagtgctctaatttttcacctggtctcctgaggtttgctgcaaagagcatcacaacttcaagtctattactggcagcttcttgacgcccaaaggaaaccaagaacattttattagtttcactcctgtgcgttgc

SEQ ID NO: 6105 - DNA, 6000 bp, Homo sapiens
tctcttttattctcaaaaagtgaaagaatgttttctggaggagctgcttaagttggagtttaaccttgcatgactgttttccaggtggagaagggtttgaagagtattccaggcagtaggaactaaattttggaagacagggatgcaagaaacagctagaagcctttagaaactgctagattatgtgagggtgttggcacaggccatatctagaacggactgatgtgctaagggaaggagttcaacttaatgctagagggtttgaacctccttcatacaacaggggaggggagtgacgtgattagatttgtatttttaaaagattattcattctagctgcagagtgtgcagaatataggaaacactaggaaggtagtagttcctgcactcaaagagctaatagtttactttggaaaagagacaaatgatagccagcttttatcaagtgctgactttgccagacactgttctgagtatttcacaaacctatcctatggtaggattttgattcctactttgcagagaaggaaacagacacagaggagtcaaatgacttgcttatagacacccaggcagctagatcaagaacttaattggcagccaggcgccgtggctcacgcctgtaattccagcactttgggaggccgagtcgggtggatcacgaggtcaggagatcaagaccatcctggctaatgcggtgaaaccctgtctctactaaaaaaatacaaaaaattagccgggcgtggtggcaggtacctgtagtcccagctacttgggaggctgaggcaagagaatggcgtgaacccaggaggcggtgcttgcagtgagtcgagatcacgccactgcactccagcctgggagacagagtgagactgtctaaaaaaaaaaacaaaacaaaaaaaacccacaaaacttaattggatgcttcctatatgatacggctcttagatttatagtgtagcatgttaggttctaaggataggtgtcttggtgaccatctgacctgcactagagaatcgggtgaggcttgtattccagaggaagtggctcctagcctgagatcagaggcatagagttgatgtggaggacagtcaggaagaaccctctggggaaagaaagcagattgttaaaaggctctacgctgggaaagaatatggcatattgaggggagctgaaagtcattcagcatggctgggtcatagagaatgaagcgagtagtggggagacggggtggtgaagtgattggggaccagagttaaaaaaactctggtgcattggctcacgcctgtaaatccaaggccttgggaggtcaaagtgggaggactgcttgaggccaggagttcaaggccagcctgggcaacatagcaagaccttgggtctaaaaaaatttttttaaacttttttttgggccgggcatggtggctcacgcctgtaatcccagcactttgggaggctgaggtgggtggatcacttgaggtcaggagttggagaccagcctggccaacatggcgaaaccctgtctctactaaagatacaaaaaaaattagctgggcatggttgtgcgtgcctgtaatcccagctacttgggaggctcaggcaggagaattgcttgaatctgggaggtggagtttgcagtgagccgggattgcgccactgcactccagcctgggtaacagaatgagactccaactcaaacaaaacaaaaaacttttttttttttgtagggacaggggtcttactctgttgcccaggctgttcttgaactctttgggctcaagaaatcctcccacctaggagtcccaaaacactgggattacagaggtgagccaccacatccagggggataaaccttttttttttttttttggacttcattctaaaatcaaggagaagccattggtgaattcaatgtagggagtgactagttttgcagttttttttttttttttttttgagatggagtctcgctccgacgcccaggtgggagtgcagtggcgcaatcttggctcactgcaagcaccacttcctgggttcaagcaattctcttgcctcagcctcctgagtagctgggactacaggtgcctgccactgcacccagctaaattttgtattttttttttttttttttttttttgagacagagtctcgctctgttgcccaggctggagtgcagtggtgtgatcttggctcactgcaagctccacctcctgggttcacgccattctcctgcctcagcctcccgagcagctgggactacaggtgcccaccaccacgcccagctaatcttttgtatttttagtagagatggggtttcactgtgttagccaggatggtctcgatctcctgacctcgtgatccgcccgcctcagcctcccaaagtgctgggattacaggcgtgagccaccgcgcccagccctaaattttgtatttttagtagagattgtgtttgaccatgttggccaggctggtctcaaactcctgacctcaggtgatccacccaccttggcctcccaaagtgctgggattacaggtgtaagccaccgcacttggccacagttaattgtatttttagtagagacgagggttcaccatgttggccagactggcctcaaactcctgacctcaggtgatccacctgccttggcctcccaaagtgctgggattacaggcatgagctaccgcgccccgagtgacccgcctagttttgtagtttagattactctggctactatgtggagattggattaggaagtttaggcctgcaggcctgagatcagttaaaatgtagcttgtcatctagctggccaggatttagggagagggacaactgcttgttaaatggctcttatgtgaattaaattggcatatattaaaggtgatctttgtaaggagcacatgatgctgaagcagttagcacacagtatgagactcacttgtatatgaatgaaatgggcaagcattaaaaaaatgaggattttggagctatacagatatgggttaaacttatggctctgccattcactagatctgtagcctttatttatttatttttgagaaagagtctcaccctgtcacccaggctggagcgcagtggtgcagtctgggctcactgcaacctctgcctgtccggttcaagcaattctcccacctcagcctccggagtagctgggactacaggtgtgcgccaccaagcccgactaatctttgtatttttagttgagacggggtctcaccatgttggccaggctggtcttgaactcctgacctcaagtgatctgctctccttggcctcccaaagtgctgggattacaggcgtgagccaccacgctcagctagatctgtagccttcaatgagtcatatgcgcatcaatcaagtaaaagctctactcttctcaatctggtctgagctaccattattcccagaccagaatactatagtattccgtattttgactggcttctctgtttctggccttgctctcttgctcgagcttcacagagtgtccaaagtaatacttccgtaccacccggcccggcttttttttttttttttttttttttttttaagagacatggtcgcaccatgttgcccaggctggtcttgaactcctaggctcaagcaatcctcctgcctcagcctcccaaagttctgggatgaaggcgtgagccaccatacctggcctgagtgcagtggcgcgatctcggctttcagcagcctcgaccttccaggctcaagcaatcctctcacctcagcctcccgagtagctgggactacaggcgcgcgccaccacgcccggctaatttttgtattttttgtagagatgggatttcactattttgcccgggctggttcccaactcctggactcaagcgattcgcccgcctcagcctcccaaagggaagtgctgggatttcaggcgtgtgccaccgctcccaccccaaagtagtatttattgtaattattattattattttgagacggagtctcgctctattgccaggctggagtgcagtggcgcgatctcggctcaatgcaacctctgcctcccgggttcaagcgattctcctgcttcagactcccaagcagctgggactacaggcgccccccaccacgccaggctaattcttgaatttttagtggagacggggtttcaccatgttggccaggatggtctcgatctcttgacctcgtgatccgcccacctcggcctcccaaagtgctgggattacaggcgtgagccaccgcgcccagcctattattatttttttaggcagtgtcttgccctgtcgctcagggtgtagtgcagtggcgtgatcacgactcactgcagccccgacttctcgggcttaagttatcttcccgccgcagcctccacgcccggttagttttttgcattttttgtagagatgaggtcttgcttttttgcccaggctggcctcgaactccttggcttaagcgaacctcttgccgcagcctcccaaagtgttgggattacgggcgtgaaccaccgcgcccagcctactatctttatcttacagaaagaaaagaatggaggaaaccgaggctcggagacagtaggtaatttccccaaggttccacagctaatgagtggagcggcgatttgtggaacgaaatgaatgaaatcgatgtggcagcgggcccggacgggtcggtggcgtagacgcggagcgcgcagctcacacctggcggccgcggtttccaggaggaagcaaggatgctttggacactgtgcgtggcgcctccgcggagcccccgcgctgccattcccggccgtcgctcggtcctccgctgacgggaagcaggaagtggcggcgggcgtcgcgagcggtgacatcacgggggcgacggcggcgaagggcgggggcggaggaggagcgagccgggccggggggcagctgcacagtctccgggatccccaggcctggaggggggtctgtgcgcggccggctggctctgccccgcgtccggtcccgagcgggcctccctcgggccagcccgatgtgaccgagcccagcggagcctgagcaaggagcgggtccgtcgcggagccggagggcgggaggaacatgacatcgcggaggtgaggagccccgaggggcccggcgcgggcctcggcccggccaccgccgcgttcggttagccccgtccggaagggggcgccccggccgggcttcgggctcccgccccgggtcggggttgggggccggttccctcctcgtcccctcgccctccaggggccgggggccggccccaccgcgcccccacccctcgggtccccattcatttcctgcctccccgagttccggctgcggcagccccggggatgcccgtcaggcccggggcaggtagagccgccgagggaaccacgggtgccagcggccaggctcagcgccgcattcctgacccattgcctcatgagaattgcctcatggtgattccgaaataaccctgctcacttggggaggctccttgggacacgagaggggagttgcgcggggccgggcccccagtggtctagtcgttctggctcactgtgccactttcgtgcatttggggacttcacgcaggacccctgacccttttatatgcctctttgtgtcttcttttcctcctacccctcacgtgccagaaatggaaaaactgactgtatctgcagccactagaagtatttccttcctctgcgatcttcgctttgggagatggaaaggaagggagccgcatctcgttatttaatccttcactgcaaccttaacagtcaggtcactttactggtacccgttttatggatgaggaaaccgaggcccagaagcaacatgctagtaaatgacaagatttgaaacttaggaggattagtgagttaatgagatcctttgaaaggtcagggtaatactactactaatagctaacatttgcttagttctgaccacagccctatcagatggctactattatccccattgtaaagatgagtaaaccga

SEQ ID NO: 6106 - DNA, 6000 bp, Homo sapiens
tggttaattttttgtattttcagtagagacagggtttcaccgtgttagccaggatgatctcaatctcctgacctcatgatctgcccacctcggccctcccaaagtgctgggaattacaggcgtgagccactgcgcccggcctcatcttactttttaacaaagaagtttaaaaagtaataaaacaaaatagaaaaacaggaaaaaaagcatatagaataaggatataaataagaaaaatatttttgtacagctttacaatgtgtttgtgttttcagctaagtgttaaacacagccaaaaagttaaaaaaattagtttataaagtaaaaacattacagtaagccaatgttaatttattattaaagaaaaatcttcaaatcaatgtagtgtggccctgtgtggacagctgacagtagtacacagtaatgtgctaggccttcacgagttcactcaccactcactcagtgactcatccgcaacaacttccagtcctgcaagctccactcacggtaagtgttctttatgggcgtaccatttttactcttatattttttgaaacacagtctcactctgttgcccaggctggagtgcagtggcgtgatctcggctcactgcaacctccacctcccaggttcaagcgactctcctgcctcagcctcctgcatagctgggattacaggcgtgtgccaccacacctggctaatttttatatttttagtagagatggggttttgccatgttggccaggctggtctcgaactcctgacgtcaagtgatctgcctgcctcagactcccaaactgctaggattacaggcgtgagccatcgcacccagcccattttatatcttttatacagtatttttactgtaccttttctatgtttagatctatttagatccacaaataccttccatcgtgttgcaatcacctacagtattcagtacagtcacatgctgtacaggcttagagcctaggaggaataggctatgccacatagcccaggggtgtagcaaaatcacctaaagatgcatttttcagaatcttgagcgacgcatgactataatcttaaaatgaagatgatgtatcagggtagtgaaaaggtggttgtagggaaggtgacagagtggacagcacctgagccaagaggtgaaaggttagcagaagtatgccagactgaaaagaaacattcatcccagttaaaaagactcacttgtttgttcaatcaatatttggattcccatgaagtggctggcagtatcctaggggctggagagtctatgaacaagacagacaaggtctctgttctcaagaatattatagtctagaagagagagtgaggcaagacagataagcaagtaaatgaacaagaaatgttcagtttgtgatgcctaccacaaagaaaataaagcaggtttatgagcaaggaattgaagtaatttacaccgtgtcaccaggtatggtctgaagcagtaacagtctgacctgaaatgacaaaaaagattcaaccatgcagagatcctggaagacaatccagagttttatctgagaattttacctggggaaatgccatgatgatcccatctttttaaagattatcacccctactgcggggaagagaagaagacaagaatggaagcagagacttgcagctgggctactgcagtggtccagacgagagatgccagtggcttggcctagagtgacagcagtgacactctgaagaaatgagcagattcaggatacactctggaggcagagccaatattgtggatatagggagtgagaggagaaaaaaagaatgaagtggctttaatacctggtgaacagtaatgccactgagcgagactgggaagactcggggaggaacaagtgctggcagagaatcaagagttctgttggtccaaacacgaacacattcaacgtcaactagaaagtaggagggtggttgccgggggctggggaaagggagaaatggagagttattgttaaatgaatattaagtttcagtttctacaagcgttatggggatggatggtggtgatggtcgcacagcgttaaggatgtatttaataccactgaactgcacactttaaaaatggttaagatggggccgggcgtggtggctgacacctgtaatcccagcactttgggaggccgaggcaggtggatcacttgaggtcaggagttcgagaccagcctggccaacatggcgaaaccctgtctctattaaaaatacaaaaattagtcgggtgtggtggtgcatgcctgtaatcccagctactcaggaggctaaggcagggagaactgcttgaacccgagaggtagaggttgcagtgagctgagatcatgccactacactccagcctgggtaacagagtgagactccatgttaaaaaaggttaagatgggaaattctggccaggcgtggtggctcacacctgtaatcccagcactttgggaggctgaggtgggtggatcacctgaggtcgggagttcaagaccagccatgaccaacatggagaaaccccgtttctactaaaaatacaaaattagctgggcatggtggcgcatgcctgtaatcccagctactcaagaaggctgaggcaggagaatcatttgaacccgggaggtggaggctgtggtgagttgaggtcgtcccactgcactccagcctgggcaagagcaaaactcagtctttaaaaaaaaaaaaaaaaaaaaaaaaaaaagatgggaaattttatgtcgtattttaccacaataaaaaaaaattgaaaaaaaaaaaagatatcaactaggcaattggatataagaatttggggatttctggacagatctaggctgttgttatcaactactggcatcaacagcatacctccagagatcacctgagtatttaaacaatggcccagagattacctgagtcagatagagaggaaggcagaggacggagtcctggcgcaccccaccactcaggggtcacaagacagagaagggacaacacgcgactgtgaggaggtgtctgaggtggcagaaaacacaagtcacagaagtctggtagtcacatgattgcccagacatcccggccaataaaagggacttacaacactcagcctctctgtttgcctaaggtggcaggtcacgtacaattccctattcttcccttttcacagctcccctgccaatccactaaatgtagagtgaccacatagttttatcaatgttctattcacttatatattttatttacacacttgagctttgagagtaaaaaggagagctttttataaccatgtcaggacaacagcataacccattatcctgggtgcaccctggggtgtaaccaccctttctacacaactaagcactcaacctggacttctagacaaacttattaatgctttgggtaagatttccccacccgtgctccttgctgtttctcccagaaattctcacatggaagaaaaatgaaagggtgcagtgtgttggaggggtggaattctaccaatcaagttatgcacaaaaagcataaaaggaactgtgggtccttttgagtcacccaggaggacacagagcccccaaattaaacgaagggcacccatgcgagggctggccgaccctcgccacctatgtcttggtttcccccactgtaatactgggaaccccacttctcccaggcctgctgcgaagatgaagccagcaaatgcacgccctctcttagctctggaccgggcaggtgaaaagcagggaggtgttcataaaagcagtccccaccgctgaagggtcctcaactcggggttctagtcccagctctgccctggcctagcaaccccttcccgctgcagggaccaaggcggtgggcaggtccctcacccgtgctgagaccgggacaggaatgcgcacctctccccaccctcggacgccccggcggcgccgctgcagaagtcgggaggtcggacaaacgcgaggagtaaggaaaaagaggaggaagggaaggaaggaggaagaacgaagtgaggaaagaggatgtcagggaagaaagggagtaaaggaagaaggaagggagagggggacagaaaggaggaggacggaaggaggaagggaaggaagaaagacggaagggaagggagaggaaaaaggggaggaaagaagaaagggaagggggaggaaggaaagggggaggaaggaaggaggaggaaggtgaggaaggtaaggaaggaagggaggcagggagaggggaaggaaggaggaagataaggaaggaggggaggtaggaagaagggaaggaaggaggaaggaagggaaggggagaaagaaaggaagggaaggggtaggaagacagggaggaaggaaaaaaggaggaaggtaacgaaggaaggaaggagaaagtaaagtaagggggaggaaggaaggaagaagggaaggggaggaggggaagggcggccactgacctgcttgaaggtgctgctgaggaagtagacgagcgacagcccgaagaccagggcgagcacccacctcttccgcagaagccggcgccacaccatggccgccaggttcaccatcccggcgcggacgtggggcgcggcggccggggcgcggaacgcggcaggcccgggtcccgggcggcatggcccctacgcgcccggcagccccatccctccaggcaggcgccggccccgccgcccgcagcccagtctgctcccggcagccttgggcgcagccccacgtgaccccgccctacgccccgcctccgctccgcagcgacaagggctagtcgcgcaagatcttctcaccattggtccctaaggaacggcggcctcctattggttaagtgccgggaaagggggcggacaatcgcgtgagtgctgcgggcgtagctgtgcccgggtcctagcgccggacccggcgacgccaagaaaccacccaataggaggccggaagcatcggaagtcacatgctgcccaggctgcgcgggtgattggcttggctggacctgaatgatgcggctgtgattgctgaattgtctgggcaggtaaaaagagaacgcgatttttttttcttttctcccatcatggtctgtgtagtctcctgcccttgcagtcccagagcgttttgcgctgtgtgttggttgcagggatgaaaagcgctcgcgacgttgttcccgaagtgcacctgccggcttccagtccaagtgatgcaggcgatgctcctctgagtgcatttcggtgcagtcctgtaacgggccccaggggcgcaacttgaaccatcgcaagcatcgaaaagtctcggtgcggtccttcaaagggacatagtgggatgtacagagcagaggattaaaaagcgtttcattcattcagatgcatcccgcgtgcaaaaatttattccagaattatgtacggcctgcttccgacaaagaatccgaagcctcttccaatacaagcatccgaaagtagagtttcgagcattcgatttaggagttaaatgtgtggatgagaactttggaatatgaattttattttcccccaaggatttgcaatgtgggataatggagggaggggcgagaggaggattaagttgagattgcaaattcttgaaaaatatttatataatgaccttttcttgatatatgaagatgctgctgctgaccggtttgttacctaatttttcaaaagagaaaggaggcttcactggcgggtcatttttaatcagtggccctagtgacaccattgctgccccctcaagaagcctggtcaggattaggaagtcattcaacagccaataatcgtgccctaaactgaagtcagacaccatctgactgatatagacaccctatatccacaatattggctctgcctccagagacaagaagatattcacggaggctaaaccttttcatgggaagtagatggcccttattaccttgctagggtgaaaggtgggacagggagcaagggatctagaaaaggggaactgggagacccatagatgttttattcattgagta

SEQ ID NO: 6107 - DNA, 6000 bp, Homo sapiens
tctcatctcatcgcaaactccacctcccgggttcaggcggttctcctgccttagcctcccaagtagctgggattacaggcatgcgccaccacaccagctaatttttgtatttttagtagagacgaggtttctccatgttggtcaggctggtcttgaactcctgtcctctcaggtgatccgcccacctcagcctcccaaagtgctgggattacaggtgtgagccaccgtgcctagtcttatttatttatttatttggagacagagtctcgctctgtcgcccaggctggagtgcagtggcaccatcttggcttactgcaagctccgcctcccgggttcacgccattctcctgcctcagcctcccaagtagctgggactacaggcgcccgccaccacacccagctaatttttttgtatttttagtagagacggggtttcaccgtgttagccaggatggtctcaatctcctgacctcgcgatccgccggtttcagcctcccaaagtgctgggattataggtgtgagccaccgcgcctggcctttttttttttttttttttttaagtagagatgtgctactgcactccagcctgggtgactattgagaccctgtctcaataaataaataaataaataaataaataaataaataaataaataaggccaggcgcagtggctcacatctgtaatcccagcactctgggaggctgaggcaggcagatcatctgagttcaggagttcgagactagcctggacaacatggtgaaaccctgtctctactaaaaatataaaaaattagctgggtgtgctggtgggcacctgtaatcctagttactcaggaggctgaggcagaagaatcgcttgaacctaggaattggaggttgcagtgagctgagattgagccactacgctctagcctgggggacagagcgagactccatcttaaaaataataaaaataaaaataaaataaaatgtttaaatacgttgggcacaatggtttacacctgtaatcccagcactttgggaggctgagatgggtggatcacttgaggtcaggagttcgagaccagcctggccaacatggtgaaaccctgactctactaaaaatacaaaaaattagctgggtgtggtgatggacacctgtaatcccagttatttaggaggctgagccagaataatcggttgaacccaggaggcggaggttgcagtgagccgagatcgagccactgcactgcagcctggggaacagagagagactctgtcctaaaataataataaaataaaataaaatgtttgaataggctggacacagtggctcatgcttgtaattccagaactttgggaggcccagatgggaggatcccttgagcccaggagtttgagaccagcatgctcaacatggggagacgctgtcactattattttttattggagacggagtctccctctgtcgcccaggcttgagtgcagcagcctgatctcagctcactgcaacctctgcctcctgcgttcaagcaattatcctacctcagcttccccagttgctaggattataggcgtgccccatcatacctggctaattttttttgtatttttagtagagatgggggtttcaccatgttagccaggctggtctcgaactcctgaccttaggtgatccacccgcttgggccttccaaagtgttgggataacaggtgtgagccaccgcgcctggccacacttttttttttttttaatgcttaaacagatgaacaggtcaactaaataagctagatgatttcagatgctgtagtgatcacagctataaagggaagaaatcaggatgaggtgacagattgtgacaccggggctacttcaatagagggaaggtctctcaggaggtgctatttgagctgagacacaaatgttgagtgaaaggggtaagaagtacaaaggcgggccatggcgcggtgcgtcacgcctgtaatcccagcactttgggaggctgaggcgggtggatcaccaggtcaagagatcgagaccatcctggtccatatggtgaaaccccgtctctactaaaaataccaaaaatagctgggcgtggtggcgcgcgcctgtagtcccagctactcggcaggctgaagcaggagaattgcttgaacccgggaggcggaggttgcagtgagccgagatcgctccactgcactccagcctggtgacagagtgagactccgtctcaaaaaaaaaaaaaaaaaagtacaaaggccaccagggaaacaaagccagtagggtgagatttcaaattccaaattccccaatttttttttttttttttgagagggactctcgctctgtcgctcaggctggagtgcagtggctcgatctcggctcactgcaagctccgcctcccaagttcaaacgattctcctgcctcagcctccctggtaactgggactagggagtcacctgactaatttttttagtagagacagggtttcaccatgttggctaggctggtctggaactactgaccttgtgatctgcctgcctcggcctcccaaagtgttgggattataggcgtgagtcaccgcgcccggcccccatctttattttaaaaaagccaagaaaaggacaaaaaaccaaacaccgcatgttctcactcataggtgggaattgaacaatgagaacacatggacacaggaaggggaacatcacactccggggactgttgtggggtggggaaaggggggagggatagcattaggagatatacctaatgctaaatgacgagttaatgggtgcagcacaccaacatggcacatgtatacatatgtaactaacctgcacattgtgcacatgtaccctaaaacttaaagtataataataataaaattaaattttaaaaaaaaagccaagaaagggctctgcgggaaccagagacttcttgggggcagaggttttcatcccacaacggttgggtgggggcgcgccctctagtggtgacaagagttacgtttcaccccgccaaccggcaatgtcacatgctcgtcactcattcctgtctctcccatagttattcattcaacaaaaaattactgaggaccgattgtatgccgaggaatattctagatgctgagggtagagctgtgaagctgatagtaaaggtccctgccccggagtttacctcctaggagacattccctagcacagtcctgcatacacccccacctcacctctgctccccaaaattggccttccaacgctccaacagccaaatatccctgcttaaaggtcttggcatgagcagttccctcgccgtcctggaaagctagatcctgtctgtttgcatggcgggctctggtctcagcttaaatgtgacctaagtcagaaaggtgtgatctcacttatttcctgcccctctccacactccactaaaatataatattcgggccgggcatggaggctcatgcctgtaatcgcagcactttgtgaggccgaggcgggcggatctcctgacgtcaggagttccaggctagcctggccaacatggcaaaaccccgtctctactaaaaatacaaaaattagccaggtgtggtggcgggcgcctgtaatcccagctacgcagcaggctgaggcaggagaatcgcttgaaccgggaggtggaggttgcagtgagccaagatcgcgccattgcactcctccagcctgggcgacaagagcaaaaccctgtctcaaaaaaaaaaaaaaaaaaaaaatatatatatatatatatatatatatatatatacacacacacacacatatatatacatatatatgtgtatatatgtgtgtgtgtatatatatatataaaatattcaatgaaggttatcattttcctggaatccctcagcgtagcacgtaatagttgctcagaagacacttgctgaataggtttgaagattcactggtttaaaaaatatcaggtggccgggcacggtggctcacgcttgtaatcccagcactctgggaggccgaggcgggcggatcacaaggtcaggagtttgagaccagcctggccaatatggtgaaaccccatctctactaaaaatacaaaaattagcagggcatggtggcgggagcctgtaatcctagctactcgggaggctgaggcaggagaattgcttgaacccagtaataaaaaaataataaatcaggaaccggtcacctcaatacgtatcagatgctggtgaacacaggtggacaaagtggttaacagacaggttttgtccatctcgttcaccaccctacccagcctcagcacctagaccagtgttggcacccagtgggcgccaaataaacactgcttgaactccagacgtcagccgctctttttcctacagaccttgagccaccttgttccaaaggggatatgggcctcaggaggcgcccagaggtgacctcaggcggcccgacccaggagtccaagctccaggagcagggccacgggagcagctgcggagaggggcggcgccaggagccggagcgggcagccgggcgcttccaggaaaagtggcgggcggcggcgcgccagggaccgtgggcggtgccgtcggagcgggcgggtcacgtgacgcccacaacaacgcccacttcttggtgggcggggcacaggtgggcggggagcatgcaaaacagcccagggcggcggccaatcgcggcgcgcgccgggggtccaggccccggggatccgaggcgccgcccgcgcgcagtctctggtcactgccgcccgggggcttttgccagcggcgccgcgggcctgcgtgctggggcagcgggcacttcttcgacctcgtcctcctcgtcctgtgcggccggccgggtgaggccgggcccgcgtagggggcagtcggcggctgcctccggcggaggtgcctcgcggcgcccgggccggcccgcgcctcggcggcgtgctccatgcatccggagcccgccccgcccccgagccgcagcagtcccgagcttcccccaagcggcggcagcaccaccagcggcagccgccggagccgccgccgcagcggggacggggagcccccgggggccccgccaccgccaccgccgccgtccgccgtcacctacccggactggatcggccagagttactccgaggtgatgagcctcaacgagcactccatgcaggcgctgtcctggcgcaagctctacttgagccgcgccaagcttaaagcctccagccggacctcggctctgctctccggcttcgccatggtgagctccggccgccctgccctgccccctctactgtcccggctgctcccgcccgcagccccgacggggctctctgggcgggccgggcgggccagagtgaggggaagagctgggagaaaccgtggtgagcgctgcgcggggggcagaggtgctggacgtgagcactggtgggcgccgagtactccgatctggggtggtgacaagccatatcagagtccgggctcggggtgcttgggtgcctccacatggccatgcctgccccagcaagagtggtagatgcatcccgaagttagctctgtaagaagcccgccccatgtgcgttcaggagcgaaaggagggactcagaagctctaacccagctgggggcgtcaggaggtggggacaaggagaaagaccttgcgctgtcttgtgccccggcacccgaggccggaagttgttagccgtgttcttttatcagctcctagaggggatttcctgacaccccttttccaccgcattttccgagagcctcagcctgggggtttgacaaccagtccccctcagttttttctccagaaacttgccactgagtcactgcgtgtgagggaggagggagggacatgttcccgttgaatgggctctttattttttatttgttccaagacggagtctcgctctgtcgcccaggctggagtgcagtggtgcaatctcggctcactgaaatttccacctcctgagttcaagcgattctcatgcctcagcctcccgagtagctggg

SEQ ID NO: 6108 - DNA, 6000 bp, Homo sapiens
ccaccacacctggccaattttgtatttttagtagagacggggtttctccatgttgatcaagctggtctcaaactcccgacctcaggtgatccacccccctcggcctcccaaagtgctgggattacaggcgtgagccaccatgcctggccttcactgcctcttacatgatatttctgttaaattgttcacttctgttggtatcataccaaggtgttaggctccactactttccagcttatccctctattgtttctaataatgccccggggcataagttgttccacagtctgatacattaaattcaggcctctttgaggggtagtgtttgaggcgtctctgaggtttgtccagaccccaggagagctctttatctgattctttctgggaaactgactttgagtttatatattaatagttgctcacctgcagctgccagtccctttttaattgcttactacaaaaaaaaaaaaaactccattatttttgagaatacccttaggtttgaacttcctcacaagagtgtggtccataaagactgagttcctttagggagagcttgggagctctttgttcttatgacctgctcctcttccttcttaaaaatctgagacaccaggtgcagtggtccatttttctctgggtgacatctttattttaaaagcagggtgctgggtggggacactagcctctagtattctcagcctgcctctcccaaattggaacttatggcctatgagtgagctgacgtgagggttattcggccatagtagtctcaacttgccatgcatggagtggggcatctgacctgcaagtagggctgggtggaggaagggagcctgtgtctctcttagtcacactgacctggtatttagactctgccacatggagctagagtggagatgaggaatgttggtagcctgcctccccttgggaaataacacagctacacctggcgtatgggggtggtaagagccccatctttgaccacatctgtctgaaatagagattctgttattcttagctgagtagtgtggaagaaggaagtgggttctggctcatgtgccacttgctcttctttctgagatttcagagattttcttaaatcgatgcctccttatttgatgtctgcccttaggatggtttccatttaaatggttaaaccagtatcctttaaatgtttttttttaaagaatacaaattttctccaattatgattgttttggtggagagtgggtccacagagctccttagagagccaagtcatctccaaagtcagcacttcagaatattatgttaataatgttataggtgatatgtaaatatacaaatcttaaaggtagtatgcaattgactccagtttggtaaccactgaagaaacatacttgaagtaccctaaactgtcaagtttatcaatattagttattatttttaaatttatggtaatttctgagattactgaaatctataaggaagtaaggcagttggaagtgcagtgctgggcagcaagcattctgctcctggctgaccttgaaaatttggtagtggtagaggcagtgggaagtgagtttttgattgagttatctctgcaaaggtatcaaatggctatgtttatgttgccccaatgattttcttctggctgtttttgaaacagctaaatgtgtacttgctggataaagggagcagcacttggattggtactcggaatctctgtacacaaaaatccaggcaaagagtcagcacctggcttcccaagaagctctgctcatctgtgttctgtaggctattctgggccttgaaagtgccctggaccacctgcctgctgtggcatttatttatatttatttatttatttatttatttatttatttatttatttatttatttattgagacagagtctcactctgtcacccaggctggcatgcactgacacgatctcggctcactgcaacttctgcctcccgggttcaagcaattcttttgcctcagtctcccaagtaacagggattacaggtgtgtgccaccacacccggctaatttttatactttcagtagagacaggatttcaccatgttagcccggctggtcttgaactcctgaccttaggtgatccacccaccttagcctcccaaagtgctgggattacaggcgtgagccaccatgcccggccctgctgtggcatttaactgggcatgtggtctctgtggcaggcaggatttatagtctattctgaagagcctgaccacaggctgctggacagggggatccatatccttaaaaatacacaattattagaatattgtaagcattgcgtcttcctgcaagacaagagagagtcaggtgactcatcccattttgtgaaaggaaagggaggcttctgtggccataaatctgtgttgaaacaagcaccctctgtatgaggagttgccaacagtgatttagggaagacaatggagcatcagactcttcaactgagttataatatccatcttgagtgagtaggaggtgctgtcattctgggacttctgtttagtcatcagtaagatgggcatcttaatggcatcttcaaatgagatttataaatcatagttgcgatgtgtcagcagagcctttcaattgtgcctactgtgtgctttcaggaaatacatctcttacttcagcatttcttcaaacacggcacatgtgccactggggatgtatcaaatgaggcttggtggcacatagacatacctttcaagatttttaatatctatacatttattttaatgtactttagacaataatgtcattatcacaaagaattacagatatattcttgcttgggacaaagctgagtaggcagagctgaattggcctttcccaaactgtgtgaatttgaaggacagtggccagtcatgcctatgaaagttataaatcttcagcaagtgagcctccttccacaagttaatggaaggatggagagatcagatgttatagatcacccacaaaatatgcatattatcacttcaaaccagcttaatgtgctgtctttctccaatgataaaacaaactagtttaagatctgaagacatgacaaaagctgtaagagtcccacactataatagtctgttctcacactgctaataaagacacacctgagactgggtaatttataaaggaaagagttttaattgacacacagttcagcatgcctgggaaggcctcaggaaacttacaataatggtggaaggggaagcaaacaaatccttcttcacatggtggcaggaaggagaagtaacaagcaaaaagggaaaaaagccctttataaaaccatcagatcttgtgagaactcacttactatcacaagaatagcagcatgagagtaactgccccaatgattccattgcctcccactgagtccctccaatgacatgtggggattatgggaactacaattcaagttgagatttggttggggacacagccaaaccatatcacacagacaactgaactttgggagacttggcccaagatatgccattgattcaaacctcataagaagttaaatcaccattaataaataaattccattaatccataaatacattttgagtctgttgtggtgccaggtgtgccagagacacatagataattaagacctgatttatgaccttgaatgggtcacgtttataaatcctcctgtaaacatgggtaaaatgtaaaagtaaaatgggggcacatgagtgttactattggagagacggggaagactttatggagaaggtgatgtttgagccgtgtcttgaggggtgcacaggaggcagacaagaatgatgagggcatttcagacagagaagaacataagagcaagaattataaaagcaaggtgaatgtaaggaatgatgatctctttgagtagagggaagggggagtttgagtgttaggtgcatgttggtgggagtatgggagcggggcttgaggttagaaagacagatggagatttgaagaccatcaaaactctgctaaggtatgtggaccaaatttatggatctcagtggcagatataagacatgcatgtggtaagacactgctccctagcatgtggtcatagtagacatcattaatcaatcccagcactccttcatgctggagcccagattccttctcaagcagaactcccttgagtaacaactatgacttgatttgcattggccagcaagatgaacctatttcttacctctggtagagtctgtggggaaccagcaaaagtttttaataaggaatggagagcatgatgttaatgaggacaagatatggacctcgaagggtgacatactttcctacctttcctctggcatcatgctatacatatcaggatgacgtgatcataaaatgacaggccttgagacaaatatttcccaaagacacgctctatttgtctagaaaagtactttaaaactatatataacttagatgccaatattgtatcactaagaatctagatttcccatttctcttgaagaatcaggatctctctgaacatagtccttgcattcccacatggcagcagtgggctcagctgaggtccctttcagcagggcttggggtgtcctccctgcagtcccatgtcctgtcattcacagcagacccaccttcctcatttaggtcacctccctgttctcaacagggatttagttgttgagttaactcccaccagacctccttaaagttccatcccaggccaattgtgctgaaaaatatggcttaattacatgtttaaactgaattctattacagatatgttagatgagattacctgcattagataagttacactggaatagtatgttagatgtgattatcttaatttattgctaatgtaaatcaaaggttcccacaaagcagagtcttttaaagtaagaatcacaataagtcaccatgggagccaggtctgaggccacacagaagtagaactttcatagccaggtttccaaccaacctttcctgtgctggaaaggactcacagtcaagaaaggtgtagatcctgcagactgcgtggaggccatgctttcacatcaagccttcctcggtgacttgctcagcctgactgtgttcttatttgctgggtctctctctggaaatctccactttgagtgtgagtttaggtgtccagccttctctgggtagcactgaacagatctgaagctctgccatgtcttttcagcttgggcctttccagaaaccttttttctgctctcattctggagcaagtggtggggaggacatcatttgtatttacttttcccttttctcaaagtctcagagacaaaaatgctcagctaacaatttttataccttgagttcacaattcagagcattcatttgataaacatttcttttctaaaataaatttttatagtttcaaaacaagtttagaaaacacaagccctgcagttctctctttctcccctgagaatatgcttattctgccaaaatgtttatcttttctttgactaatttatgtacagaccctgaacacctaagcttgtggcttgagcacctgtgccaatggcacctaattaacagcgcttttctccagtaggttcggggagtgcagtcagaactggggctgggcagcatgatatgctgggatttcaccagatcatcaacgcccaatcccttctcaggcaccatttgatgaattgtaagcctagatattttcctaggcttacaaatgttggtggtgctttttaaatctccctatgccatgaaataaatgccaaaatgaaaacatcctacagataaacatatgctaaactttgtaatcaaatcataatcttgggcctgcattgcttgtatagtcttgataaggggcaacattttggtaacacttgactataaaggtagaatcaaaccttgttccatgtggtttggacagggctttttctccttgggtaagaatattttgttgtcttcatatgggagtcctaccaagcagattccagagattgtctgtgctcta

SEQ ID NO: 6109 - DNA, 6000 bp, Homo sapiens
catgcctatgaggtaggacattctaggcagggggcctagaggtgatcttccaattgctgaggcaaaggttggacctttatttcactaaggttctttactgcataaatataatgagcacacctcccattacttatcactcaaattcaaaattataatacaaataatgaccaagcatatttcatttgataatgtgctggagtgaactcacactgattcacaaaaattaattcttacattcttaggaattttgcaagccagttgttaaacacaattttatacaaaattaaattatataaaccatttctacaaattagatttgaatgagtataataaatgctcaaaactcatcatgttttaattatttcaccgttaatatactcttggtcttatttatacctgctgtatctgtttggtaaaaatgctgtagaataacgttctactatatatctctttccatctctgtgttcagtgaggtcacattggttgcatgaaatcaaacatggtgaaaatattttcaccatggaaatcagcaaatgctatgaatcgggatttaaaataaaatattctttgaattggagaaacatctctctgctcattcaactgtgactagagcagttagagtattttataggctatgacaacattggaataaatgtctgatactttattttgaaatataaagtacatctagagctcttgattcaaatggaatgattttcttaaaatatttaacccttcgggccgggtgcagtggctcacgctggtaatcacagcactttgggaggccgaggcgggtggatcacctgaggtcaggagttcaagaccaacatggtgaaaccccgtctctactaaaatcaaaaattagctgggcgtggtggtgggcgcctgtaatcccagctacttgggaagctgaggcagaagaatcactagaacctgggaggcggaggttgctgtgagctgagattgcgccattgcactccagccagggcgacagagcgagacttcatctcacacacacacgcacacacacaaagattaactcttcattcaaatgtctttggtataagtctgactttaatttaaaatgtaaatttatacaatggcattttagtgcttcctctgacatttcctataagttgtagaggttgtataaaacactaaaagtagctttttgatttatgtattcaaatgtaaaataacatgtatgttattaaaattacattcagatgaaaatagtgttcttttctattatacacaataatttctaagactatggatattaggtttgcaatgttgcagcagttttcaaagccagagattccactctttgaagaattctggtaaatccttgatattgatgtggttcaggacatgctgccccaaaatatgacacctttgacttagtgaatattttaagccaaaggaattcaagaaatggcaggtgcaggaaggactttctgatcttcctatgaagcaggtcataagaccttcatgtgagaggtgcccctcctatcttccaaggagattgtccttatttccaaagctgcagtgattcccagataaatatgaacaaacaggccttgctaaggttcccccagtttacaactcttagttcatacccatttttatcctatcatatttttctatgtttctttattcttcagcaaacatactttgaaaacaatcaggtttaactacttcttcgggtcttcaattccttatgaagtctcctgtgtcacgaaaaacttatactaaacgaatttgtatgcatttctcttgatctgtcttttgttacagagatccagccaggaaccaacaaaggtaggaagaaaagacagtgttcctctcctgcaatattttgtattgcaatgtacctatgtatacttttatcttgtagtaatatactgacaaagtttattgcctgagtgccagaaaatgcaaggtcacaaataatttttgatactcttaaattttattaccgtgcagatgccacagagagacactttagggatggaaggaaagacagtttacctccagggagatcccctttttcctcctggggctgcagccgggctgccactgttgcttctgctgccaccagtctgggcccaggtctgggcacagccccaggctgtccgacacctgccctgtcaggtgttgggccagcttcttagagcacatgttgcctgctgtaccacaggcccatgggttggggggtaatttaaatttttttgttcttctttctacttttctgtattttcttcaagagcagtaatatttaaacaactagacaacaaaaatttatgttttaatgtaaactatagtatcatttcttttgtaaacgatattatcacctttgtaatattgcatttggccatttatataggttatatttgaataaaggacatcattaggctgaaaaaaagcacagggagcagtgttaaaataaaaagattattcaacaatacttgttaaagcatggtagaatttattcaggaccatcatgatagttatagggaccactgcaatgcggtccttcagtggggaagacagactggactcaacttcaaatacagcaagaaccccctacccttgatatctgatcactctcttgccaaactgacttagtagtgttctttgctaaaactggattttacaaggaagtacaatgatggtgctaggaagtttcagaagactaactaaagtttggtcaagcaaagaattgttgttagcagtaatttgaaattggttttattacaatagcttgcccttgatttatttttagttgtgtcctaatctctttcagaaatatggtccatcttaatttgcatgagtgacttaatctatatgagcctcagagaggtacttctacaataattcatgttttattataaattgcttttgagtggacacaaggcgtttcaggaggtagtattgcgctaattatcaatcctttaaaaataattagaggctaagtaacaagaattaaatctaacttccttttgggcccctttattagtcaagatggatgttttccactttaagagagaagcaaatggcttgatgggctggcatatcaatgtaaacctctctctgacatcagtacttctatacttttcctaccacacagagcagtattgaatcaggaggtgatgaggctgcaaagaaactaattattattattattattattattattattattatttttagagatagagtctcacacggtccccaggctggagtgcagtggcgtgatcttggctcactgcaacctccacctcccaggttcaagccattctcctgccttggcctcccaagtagctgggactacaggcgcgtgccaccacgcctaggttatttttgtatttttagtagagacagggtttcaccatgttgaccaggatggtctcgatctcctgacctgatctgcccacctaggcctcccaaagtgctgggattacaggggtgggccaccatgccaggcccgaaggaactaatttttaaaaatattcactgatcagttgtccttgagaagacttgaagcatttcactattttaagtcaatctcaaatttgtcatctgagcaaaatagaataaagatgccactgaacctagaggaaagattaggtaaccaggaatcctactttcaggtttcctttatctcttctttttatgatctctttggagtctcagtcccaagtcctgcactactctccatggtcatggagcactctgatactgtttccatctaaaaaagaaaacaactccgagaagaagggggtagccagagctcttccttggaaaaggatgacttaaggataatttgaggaaggaaaaaagactttctttctataaaaatctactattagaggccactcttttcttttcttttttgaggcagggtctcactctgtagcccaggccagtcttgaactcctggcctcaagcaacgctcctgccttggcctcccaaagtgctgggattgcgggtgtgagccattgcacctggcctagagtcactcttttgggttaagacgttctctctagaaagcctccgttaattataggtaaggattgatacattgacctattacctcaactatgatttcagcaaagataatttcactatcccaatcagctgttaacttagaaagctagacttttatggtgttaaccacacacacatacagacgcacacacacgagcagctttgggtcttccaatcctatacttagcacattgtagcacaaagaatctccttaatatatttttattaagttaataggtgaataggaaaggctgtagtgtgttatacggggaaatagactcaggtgtgtctagatattaaagtcggtatattaaggttaccaagcgtgaaagattttgatggaagaatgaaaacatccatgtccaggacttccagtttcatttctcagtcactaatttcaagtcaccaaataaacaaagtgaaaatgggtgaaacgtactttgagttacaataagtttatcttaattcattgacttttcaactgctcagatgtcttaaaattttttaaaaagtaagttgttatagtaaagagccacacaaatactcatagcagaggaacaatttctggattatgtcggtgagctttttaagggtttggggaggatgagaataaaagggtgactttttattttcagtttttctatctggatgtgtcaaattcctgataacttctaacactcagcaatggaaatttagaaggtgcctgaaagaacaaatagaattttcagacctggagaaattctagtaatcatcactctgggacatattattaaaattagtattttaaaaaagaaaacaatctttcagaaagacaggaagtttaggagccaaagccagaggccctaatacaaatcgcccccacctccccatccccccatccccaccttcttccccgccctgttcaaacacgcccacagcccaggaaataatgagacccaagtgatccagctagatagaaaaagtagtttgcttggcatctcccaaattatcttgagcaaacaataaaataagaaatgtttcagaagacaattcggctcccaggcccaaaccaaaactcgaacctggtactttttgtaagtgcgggccaagaaaggggctgtaaagttaaagagccggtggcgcctctgaacacacccgggcagggcgagcaggatgtccttgtccagggagaccccttctcctggctttgaggaaggtgctccctatccccgcgggttcctccgccaagcgggacgccgcgccgggcgggtgagagaaagcccgggcaggagagcacagagccggcgactggacgcgagcgcggggcgggtggagagcgtctctccgggcgccgctgctgttgtcccgggtgctgaaaagccgggaacttcccgggaagcagcggcacttttctccctggaaggtgggtgtgggggttccagactgcgcacctgctaaaccctcctgggtcccccgggaggggtccgccagatgtgccccttcccagccccattcgggggagaaggatgggggcgggggcgtgggggtgagcacagccggacaccgcaagtgggaacctggggtgtccttccccgcagctcccgggcagccgcgcgccgcgaaccccggtccacctgcaagcaaggcgggccgggggcagagggcgccgggctgtgcgggggaaccggcccgcgtcccgggattggggggcggtggaagagagagcgagcgggcatgcgcagtggggcggaggaggtggcgatggccgggggaggcggggggactgctgtttatttgcagctgggccaactccgcggcgcaggcggcggcggagcgcggggagctcgcggcgggtccagctgccgcagcaccatgcccgagcccccctccgggcagacgccgcgcgccgccggggccccggtaggggaggatgccagacgcccgggagaggccagggcagcagcggcggcg

SEQ ID NO: 6110 - DNA, 6000 bp, Homo sapiens
tcagggtggccatgcaggagctgaggctggggtgggggttgctggcagttgtgttcatccgtgaggagggccaatgggctcgcccttgatagctccaggcctggcactgtcccagtgtcctgcctggcccctggtagacgtggcagtgcggtcatccccgcgtggctgagccatccattgctcttgcttctcagaggcccccgatgcgctcagccatacccccagcgtcaggcgtctgtccctgctcgccctgcccgcccccagccccaccacccctggcccccaccctccagccaggaaggcaagccctggcctggagagggcccctggcctccctgagctggacattggagaaggtaccaccccacacactttcccctcactgggggtcactctgctgctgagcacccctcactgccaggctctgcccacctagacccccgcttcggcctaacagggagctgggggctgggctgggaggacttggccatctagggaggaggtgggagctggtggcattgtctggtggggtgggggaccagggaccccacggagctggagtgaggccagatgaggaccaaggaagctccggggaaagctgtgggcagaacctagggaagcctggacctgtaaaccaggccctgctgctgggcctctcctgcggacagcccagggggcactttacaagcttgtcttgttcaggaaggttgtcctcgcccagcccctagtggcagagccagatgcacccaggaccatccatctggaggcccaggcttccccgcccacactgctgtgtctcagggctcgtagggtggcccaggtgcgagaagggcagcacccttgccctggggatcaggaattgtaaccccatctctgtgccgcctttcccagccttgaggcctgggggaagataggagaacaggaatggcccagagagggcagagatggggttgccacggggcagagggtcaccagagtcaggaagggaccacagacagctggtaccatcccacagatggcgactggtcctcccacgcaaccgcaggagcccctcagcagggctggcactcaccactgtcctgggtctgcgtgcttttgcctgcgctccctcccgcttgcctcactcacccagcctgggagaagactcacttttggctatagctggtggggggactgtgctgggctgagcaggccagaggggccgggtgacccttcggggtccctgtctggggctatacagccccagcccagtcacggcccctcctggcagtcgctgcaaagtggtggggccagaagcggatcgactacgccctgtactgccctgacgccctcacggccttccccacggtggctctgcctcacctcttccacgccagctactgggagtcaacagacgtggtctcctttctgctgagacaggtacccggggcctgggacctcccaggagggccctgagtgacaacacccatgacagggccacatttcacagacgaggggacagtggggactcctctccaaccccatcagatcacagagcaagcaagatgagggcacctttatgctcgggtgtattcaggcttttcaggacattgggatggagggaacatatctgcacattcgtcaggtgaacgaacaggggtctgagggctactgggcagacagtagtgagttgaagaacaccccctacaacccacaggctcctcttgctcccgggtactgggcctcctcctcccagggcaggaagcccccgggtggcatctgccccacagcctgcactgtcccctcttcccaggtcatgaggcatgacaactccagcatcttggagctggatggcaaggaagtgtcggtgttcaccccctcaaagccaagggagaagtggcagcgcaagcggacccacgtgaagctgcgggtgagggtcccccgggcgcccaggcccccacgatgtcaccctgtcaccagcctccgtgtccagatgaggaaactgagttgcagggaagcctgcagtcttatgtaccttcccaggccatgaggttggagctgtcagcccacttcacagacagggaaggcagcaaggcttcctagtttctccaaagccacgtcatcgtgtctgatccagactcagacatgggctgcgcagctcacagctcaagcctgcccctcaggcccacagagcttgagcagaacacagggacccggggtgccctccgaccccctgacctgggcttgccactccctccacagaacgtgacggccaaccaccggatcaatgatgcccttgccaatgaggacggcccccaggttctgacgggcaggttcatgtatgggcccctggacatggtcaccctgactggggagaaggtaaggacacggcgggtaggggtaacatggagggactttggggagctccctgctgccctctggccggggtgcagggggtggagaggccagacacagccagcccgtgaccagcctgctgggcccaggtggatgtgcacatcatgacccagccgccctcaggcgagtggctctacctggatacgctggtgaccaacaacagtgggcgtgtctcctacaccatccctgagtcgcaccgcctgggcgtgggtgtctaccctatcaagatggtggtcaggtatatgcctgcactgggagggcgggataggcagggcgaggctctgggtggttctgatgagcacccccaccacctgccaggggagaccacacgtttgccgacagctacatcaccgtgctgcccaagggcacagagttcgtggtcttcagcatcgacggttcctttgccgctagcgtgtccatcatgggcagcgaccccaaggtgcgggccggggccgtggacgtggtgcggtgagtggcccagaggggcacaaaggggctgtagcaaggtgggtgggctcaggggctcccaccagccaggtggaggaggacagcggagcctctgtgggggacgcctggctcgggcactgggccttaaggacctcagttcagagcccagcacccccaattattagccgtgtcaccttgggcaagcgatgtcacttctcaatgtcggctttcaattcccgcatctggaaggtgaggctggtaagccagggacacagcagcaggggcatctgccgcccagtgcgggcacccaagggcctgctgcagcacgtcattgtcaaccattgtcgtcgttactgtctgagctcaatcagagatgtgctttccaatggcccaagtgggccctggctgggcaggagacagggaggcccaggagggaggaaggggtgaccatgagacgacacctcacccccaggcactggcaggacctgggctacctcatcatctacgtgacgggccggcccgacatgcagaagcagcgggtggtggcgtggctggcccagcacaacttcccccatggcgtggtgtccttctgtgacggcctggtgcatgacccgctgcggcacaaggccaacttcctgaagctgctcatctccgaggtggggcccgggaggatggggcagggcaggggtgggggcagagggaccatggtgcctgtgcccatgccagtctccccacagctgcacctgcgcgtgcacgcggcctatggctccaccaaggacgtggcggtgtacagcgccattagcctgtcccccatgcagatctacatcgtgggccggcccaccaagaagctgcagcagcagtgccaggtgagtgggcgcattgtgggggcgggtgcaggcgggcagctcggggagccccagcctgtgacagccgtcctcactgaccccgcagttcatcacggatggctacgcggcccacctggcgcagctgaagtacagccaccgggcgcggcccgctcgcaacacggccacccgcatggcgctgcgcaagggcagcttcggcctgcccggccagggcgactttctgcgctcccggaaccacctgcttcgcaccatctcggcccagcccagcgggcccagccaccggcacgagcggacacagagccaggcggatggcgagcagcggggccagcgcagcatgagtgtggcggccggctgctggggccgcgccatgactggccgcctggagccgggggcagccgcgggccccaagtagggcaccgtgagtgcagcgcggggtctccatggtgctaggccagggtggccagccccgccaggaggcctggcctgggcacacgcactgacgtgggcctgggagattgtcccagggccttgtggaggacacgggccgcaccacacagtgctccctgccctgcctcacgtcctcgggcctgacgggtccggcttgtcatggaagctggcagggaccaccagccccaggatggcagagggaccagaacctcccactcagactggcccgggaggttctcccagacattttgccctgtgtggatctccaagtgtcctggtgccaggtgtgggcccaggcgcagcctgccacctccccatccactggccaccctcactcccaggtcccctcccatttggtagcagctccaacaggggtccagcctgcatcttgttaactcgagtttctcaactgttcaacctcactggttttgcactgatttttgagagcggagacccattaccacctcctatggctacagccccgttgacatgcatgaaactcagtacctgctgacccaggacctacaaccacactgaaggctccagtgcggcagagcctcgtgcaagcaggagagaaaggctgtatcttaatttctgcaccccggaccctgcccacctgtctgcctgccccgcctggagcccaggccagtgttgtttccagcctcaggccacgggctggacgggcctggccgcctcttccgctccctgccatcagtcaaggccgcccgcccacgtttctacgcctttctacttctcaatctgatttctatgaggtttttttaaacgagcaatccttggctgcttccttttcttaactctttcagtactgagagcagcccctccacactgaaaacacccagcactgtgacggagtccagcctggttctgggtcccgtgggccctgctcctgcccacttagcgaggcatgggctccttgcctcacctggccccggcaatcccactgaatttctactctggggtgggtggggcacacacttcggtttttttaatgccaattccgttttcatgccgaatctaagaagccacaacttgctttgtcagcttcagggcaggcagccatgacttcatttctcgcctgaacaaggaccatgctgtcctgcacgctgggtctgaccgtctgccctctctccccagcaccaagcgtgaccttggctgtggcgctcaacggccagctccggcggcccctctgctgctcctcggctttcccggaagtgggagagcctgcctggcctcggcctttgtccagcgaccaggctctgtccccgagaagctacggccgacctgggtctggtgttgggacgcatggaccgggctggggaggtgcacagagtgatgttaactttttcccgtgtgtagatatgtacagccaaagggtcgtgtaaatgttctgcaaaagtgggtctatacagagtgaaagctatttattttgtgcagagaaaaaagtctggagggatggaaccttcagggtttattcatatttaagatgtagctttttgttgtttcaggcattatgtataaagcaacgattattttatggaccaagttttcatgtaactgttgcagtgaaagtgcaatatctgacccccctgctcccagcaggaagttgcttggcccgacaatcacagcccctgtcaggggccctgtggccagtgcctcctcctctcttggccccaccttatcctgtcttgcctgctgcctgggagaccagccatccagagaagcacctggaagagtctcgggccctcctgcaataaaggccgggaggccctgtgggcagtgggctcagcctctccccaggggggcagctcccccacggctcctcactccc

SEQ ID NO: 6111 - DNA, 6000 bp, Homo sapiens
aagtagggggacagtttcattcttctgcatatgactatccagttatctcagcaccatttattacatatggagttctttccttattgcttatttttgttgactttgtcaaaggtcagatggctgtaggtgtgcagcttgtttctgggttcacttttcagatctattattctgtctgtctgtttttgtaccaatatcatgctgttttgattactgtagccatgtagtgtagtttgaagtcaggtagtgtgatgcctctggctttgttctttttgcttagcattgctttggctattcaggctctcttttggttcaatatgagttttagaataattttttataattctgtgaaaaaagacattgatagtttgaaggaatagtgttgaatctgcagattactttgagcagtatggacgttttaatgacattaattctttcagtctatgagcatggaatgtttttccatttgtgtcatctctgatttttttcagcagtgttttgtagttctccttgtagagatattttatatccttagttggttgtattcctaggtacttttttgtgtgggtgggtattgtaagtgagattatgtccttgatttggctctcagcttgaacctctttggtgtatagaaatggtactgatttttatatgctgattttgtgtcctgaaactttactaaagttgtttatctggtctaggagcctttggcagaggctttagggttttctaggcatagaatcatattgtctgcaaaactgagatagtttgacttgctcttttcctattgatgcgttttattctttctcttgcctgattgctctggctaggacttccaacactatgttgaatagggttggtaacaggatccttgtcttgttccagttctcatggggaatacttccagcttttgcccagtcagaatgatgttgactgtagattttttatagatgactcttatttttttgatgtatgttccttcaagggcttatttgttgaggttttataatgaagggaggttggattttatcaaaagccttttatacttctattaagatgatcatacagttttggtttttaattctggttttgtggtgaatcacatttatttagttttgtgtgttgaaccaactggcatctcaggaataaagcctacttgattgtggtgacttaactttttgatatgctgctggatttcatttggcagttttttttctttttttgaggatttttgtgtctatgtttatcagggatattggcctgtagtttcttcttctttttttttttttttttaagacaaagtctcactctgtcgccaaggttggagtgcagtggcgcaatttcagctcactgcaacctccgcctcctgggttcaagggattctcctgcctcagcctcctgagtagctgggactacaggctagttttctttttacattgtgcctttatcagtttatggtatcagggtgatactagcttcatagtatgagttaggcaggagcccatcctcctccattttttgaaatagtttcaatagaattagtacgagctcttctctgtacatgtagtaaaattcagctgtgaatccatctgatccagagcttttttgtatgtaggtttttttgactaattcaattttgtaactgggtattggtatgttcaatgtttcaatttcttcctgattcactgttggggcttgtgtgtttccaggaatttatccatttcttctagagtttctagtttgtgtgcatagaggtgttcataatattctctgagaatcttttgtgtttctgtggaattggttgtaatatcacctttgttgtttcaaattgcacttttttggatcttctcttttatttgttaatctagctagcagtctatctgtcttgtttcgtctttcagagagccaacttttgggttcattgatgctttgtatggattttggggtctgaatttcattcaattctgctcttattttaataatttcttttcttctgctagctttggagttagtttattcttagttttctagttcctctagatgtgataccaaactgtaaatttgagatcttcctaacttcttgaagtagatgtttagagctataaattttcctgtcaacactgtttttgcttcatccaagagattttgctatgttgtgttgactgttcgtttctttcaaagaattttttactttctgccttaaattcattgtttacccaaaaattgttcagagaaaagtagtttaatttccaagtaattgtgtggttttcagataccttcttggttttgattttatttgtattccactgtggtcagagcatatggtgggtatgatttctattttttctaatctgttgagacttgctttatggctgagcactattgtgtggtgggctaaggcttttcatagatataggagtatttgtattattaatgtgggtgctccgatgttgggtgcacatatacttaggattattaaatcttcttgttgaattgaacctttcatcattatataatgtccttctttttcctattttattattgctggcttaaagtctgttttatctgatataaaaatagcaatgatataaaaatagcaacccctgttcttttttgttttccattttcatgatagatctttctttctccagttctttactttgagcctgtaagtgtcatttcctgtgagaggggtctctggaagacaggagacagactttttaatccagtttaccactctctgtgtcttcttagtgaagcatttagactattttcactcaaggttaatattgtcatgtgtggttttaatcctatggtgaaattattaactggttgctttgtagttcctgttatataattgctctatagggtctgtgaactatagacttacatgtatttttgtggtagcaggtattgttattttgtttccatttttaaaattcccttaaggacctcttttaagcctggtctaatggagatacattctcttagcgtttttttattgttgggggtgtctggaaaacattgtatttttactttgcttataaagcttagtttgatgggatatggaattcttggttgaaatttctttcccttaaggatgctgaaaataggcccccaatctcttctggcttgtaatatttcagctgagacatatgcttttaaattgatgggattccatttgtgcatggtctgaactttttctctagctgcctttaagattttttctttagcattgtccttgggcagtttaatgactatatgccttgatgatgttctttttgtatggtatctcacaggtgttctctggatttcttgttcctgggtgtctacctctttaaaaatactagggacactctttgtactattgcttcaaatatgttttccagattgtttactttttctcctcctctctcaggaatgccagtaatttataaatttgtttgctttacataatcccatatttttcagactttgttcattaaaattttttttctttattttagtctgacttgattaattcaaaagactagtcttctagctctgtaattctttttctgtttggtgtagtatattgataaaaccttcaattgtattttgaaattctttaattgaatttttcaatcctggaagctctgactgattttctttaaagatgtttatctccttcttcatttcctggatttcttcagaaatttctttttctttttctttttttttttttttttggctttcatccttgtcttgaatcttgttgagcctccttgcaatccaagctttgcattcttaatccgtcatttctgagtgtctgttttagtcagggaccattgctggagatctagtgtgatcctttggtggagtcacaatattcagatttttcatggtatgagaaaagttgcactggttctttctcatctggagacactggcacttctaatttttgtaattattaatattttcatgtgaataggattttcccctttctttccctattatatatatatatatgtttttttttttaatttttctttgtttttctccctagtgggtgtaactgtaaagaatgttggctagggtcttttggctttgcttcatttttttgtttttgtttttgtttttgagacaaagtttcacacttgttgcccaggctggagtgcaaatggcgcaatctcagcttactgaaacctctgcctccagggttcaagcaatcctcctgcctcagcctcccaagtaggtgggattacaggtgcctgccactacacctgactaattttttgtatttttagtagagacaggatttcaccatgttggccaggctagtctcgaactcctgacctcaggtgatccaccagcctggccttggctttgcttctatagccctatgcacttctgtcagctggttttatgttggactgtgtggttctacctacaggccagtagatggcacttatgggtaaaagtcagctctggccaacgtgaacgggtatatatttcaaccttgtttactgggaggtctctgatgctgcaggcaatgggctgaactgtttagtgcacagtggtcttagctccctactcaccaccacatgagggaaccaagagagtagggcctggactgggcaggctcacctacagccactcaatggcaggtactagcaccagcacctaatgcgtggccacctagcgcccagaggtatgtctaggcatggagcttggtaacctgcttggccctaagttctctgcatggggaggggtgacggcccgaactcctaatccagtagagtggatgcacctggagatcttcctgggcatgtagcatagggggccgtactgcaccacagtctctccacagaaagtgtggggcaactcaggccactgacccaggcaagggggtacttcagatgcctggagatatgcctaagcatggagtggagagggtcctgttacatcacaatctatgcacaggaggggtgggagactcaggctgctggtccatgataggaagtgctctgattgtctggagatctgcctgcatgcgtggaacagaagaggccctgctacactctaatctatgtacgttaaggtgagatggctcaggctactagtccaggagagtaggtgctctgaatacctggagttctgcctggatgtgtagcagagagggccctgctacaccctaatctatccacaggaaaggtagggtggctaaggttgctgatccaggcaacagggtgctccatctgcatggagatttgcctgggcatgaagtggagagaatcctgctacaagccaatttatgcacaggaaaggtggggtggctcaggctggtaatccagaagagcaggtgttctcaatggccagaaatctgccagggtatggagcagagaggaccccactgcatcccagtctatgcacaggaagggtggggcagctcagcctactgatccaggagagtgggtgctctgactgcctaggcatggagcagagaggtctctgctgcaccacaatctaggcacagagagggtgggatgactcaggatgcaaattcatgtaagtgggtgctccaaatgcctggaaatctgcctaggcatggagcagagagtgtcccctgcaccatgatctcaggtgagcaggatggagctcccagcaaggtcacacacaggccatttccaggtggccaagctaggcctggctacaagtctcattgctcaagagaaactgtcgctgtagcagcttccctctcaccctagaactacacacggggagcacaattccagcacctacaactggggcactgtccacacgcaccattcaattctggctatggaggcctctactcagcaccagagcaagctctgcaatctctgatccaagactataatgcctgcatggccatgctgctgggttgtcaaagaattactgactttgtatgcacctggattaaaaatggcatcctgctctccatcctgagtctgggaaaatgcctgcaggaattcctggtatctt

SEQ ID NO: 6112 - DNA, 6000 bp, Homo sapiens
tcggcttactgcaagctctgcctcccaggttcacgccattcttctgcctcagcctcctgagtagctgggactacaggtacccgccaccatgcccggctaattttttgtatttttagtagagacagggtttcaccatgttagccaggatggtctcgatctcctgacctcatgatccacctgcctcagcctcccaaagtgtactttcttaataaacttgctttcactttgcactgcacactcgccctgaattctttcttgagcgagatccaagaaccctctcttgggatctggatcgggacccctttcctgtaacaactttggacttggacttttgagtaaatgctgggatgagttaagactttgggggattgctgagaagggataattgtattttgcaatgtgagaaagacatgagacttgggagggccggggtggaatgacacagtttggatttgtacccccacccaaatctcatgttgaattggaggaggggcctcatgggaggtgattggatcatgggggctgttctcgtgatagtgagtgagttctcacaagatctgatggtttaaaagtgtgtggcacttttcccttcactctctgctgctctgccatggtaagatgtgtttgctttccatttaccttctgccatgattgtaagtttcctgaggcctcccacccatgcttcctgtacagcctgtggaactgtgattcaattaaacctcttttcttcataattacccagtctcaggtagttctttatagcagtctgagaatggatacaacccttctttacaggggagagagaagatggggaatgtaagcaattcttttgaggggcagtaaatgattagggagaatgaatagacaaggcagacacattaacttgtaaatgattctctttgcaatttgaatgagcaggaaaggcaggcattatcttgtgaaaaattccatccaagcatgattgcattcttcagtcttcttctctgccatagatcatgatatttcagggatgggatacaaactcttggtaagaagttttcttggccaggcacagtggctcatgcctgtaatcctagcacattgggaagctgaggcaggaggactgcttgagcccaggagtttgagactagcctgggcaacagggggagaccccatcgccagtaaaaatttaaaaattagcccggcgtggtggtgcacacctatggtcccaactacttgggaggttgacgtgggaggtatcatccaaaaaagtatcagagataagtctcaattaatttaggagtttattttgacaaggttaaggacattcctgtgacacagcctcaggaggtcctaacgacatgtgcccaaggtagtcaggtacagcttgcttttaaacattttagggaaacatgagacatcaataattatgtgtaagatgtgcattggttgggtccagtaaggcgggacaactcgaagggtgccgaggtgggggtctttcaggtcagaaatagataagagaaaaaaggttgcattcttttgagtcctacatccgccttccattgaatacacaatttagtctggctcagtacacctgcatttttacatacaccgtagggcagaggaggcaatcgaatacacatttgtctcaggtgagcctcagaaagatgactttgagtcatgtctgtcctttgtccacaaggaaattccttgtgggcaaattgtgagggggatatgtaattttgatctttgtagctaccttatttagaaataaaatgggaggcagaattgcctgacatagtctccagcttgacttttcccttgacttcatgatttgggggtcctgaaatttatttttctttcacaacggtagtgaggcatgtctgactcccccttcccatcatggcctgaactagtttttcaggttaactttggaatgcccttggctgagaggaggggtccatgcagatggctgggggtagagaagacttagctttatttttgtttcacagaggactgcttgagccccagaatttgaggcttcagtgagctgtgatggcaccactgtacttgatcctggacgacagagcaaaaccctgtctcaaaaaaaaaaaaaaaaagctttcttggtgagacaaggaaattccagagagagtcttcccctatgcttggggttgagcggaggaacaagacaaggttagaggtaccttgattctgaggcttgttttcttttaattctcaaaagcactccgtatgctcaaacaccatattttggggaatcgttttctgtgacccaacagatgaaaaaaaaaaaaacatttcaagaaggagaagaggtggatcagagatgtgagaggggaagtagagggtccttgttgcctcttactaaagactcagtgggctgattgtggccagtggtcaggcagatggctagacaacagcaggtacattggcattccccacaggagaaagaggaaaatacagaggtggcagaaacctgaggggtcaccagcctcagcctcactctctattgccaagtgggccccttattcatcccatttcagaatatctcctctcccctagcatcatctttaataatttcacctggttaatgtctgtactcaactcctgctgctgcaggctaagctcaacctggcagtatgaacaaagaaacccacccattaaaaagtaccctctaggccgggcacagtggctcacgcctgtaatcccagcactttgagaggccaaggtgggcagatcacctgaggtcaggggtttgaggccagcctggtcaacatggtgagacccggtctccactaaaaatacaaaaattagccaggtgtggaggtgtgcgcctgtaatcccagctacttgtgaggctgaggcaggagaatcgcttgaacccgggaggcggaggttgcagtgagctgagactgtgccactgtactccagcctggtcgacagagcaagactccatctcaaaacaaacgaacaaacaaacaaacgaacgaaaagtgctttctaacctcttacgtacgtgccttttttgtggaggtctggggaagggggggccctactaccgaatgaatctactccttggtgcctcttggcacctaattggcttgcaaagctcagctgtggggtccgttcctgcgagaagccagcaggactccccatggaaggtttcccccaggctgggcccctctgacttgtgagacttccagcagcacttttatctacagtattggaggggtctgatgaagcctctgggttcccctcctggactgaagacaggttctgatataattgccggacgggttctccttgcccgttgcccagagctgattcatcaagacaggggaattgcaatggagattttaattcatgcagagccggctgaatgagataccagagttttatcactcaaataagtctccccgataattcagagactggggttttttaaggataattcggctggtaggtatcaggcagtggggagtgctgattggtcaggttggagatgaaatcataggggggtctaagtgggttcttcttgctgttttctgttcctgggtgggattgcagaactggctgagccagataactggtctaggtactgccagctggtgcctcagaatgcagggtctgaaaaatatccccagcaccgatcttagattttacaatagtgatgttatcccttggagcaatagggaaggtttggaatcttgtgacctctgtctggatgactcctaaaccataatttctaatcttgtggctaatttgttagtcttacaaaggcagtctggtccccaggcaagaagggggtttgttttggggaagggctgttatctttgcttcgaagttcaactataaactaaattcctcccaaagttagtttggcctatacccaggaatgaacaagggcagttcggaggttagaagcaagacggaactgggtaagtcagatctctttcactgtcataattttctcacttacaatttttgcaaaggcagtttatccgaatgctccgcatgtgtgtaccctcagcgactacacagctcctgtactataaagaatatttcagaatggcttcggtagccggcagcaccttcctcctctcgcagcagagaagtgttttgctctggaaacttgactggagcctttcccagcctatctagcgaacagcagagcatcatcccgactccgcggactaccgcggcccaacagcaagggtcgcggctccccggcgctctctgccgccctctaccggaaccgagggagccagacagctgcgatattgggaaggcctccggagccgcgaagagcgcacgcgcgagcgcgcgcccgcgttctcctggcgggcttggtatttggcgcctgcgcgctgagtgcgtgccgctccgccgaccgaagaggctggtaagtcctcaagctggcaggtggtcgggggagcggccggagaggagctgccgggagttcgtgccctgcaggtctgcgacgctggcgttcgctcctgcctgggccactttggtgggctcagagcatcgctttttgccaaggggcgtgacctgagcccgcctcctggggctggggggtggagaggaatgggaatcgttaaggccggttatcaatttggtgcctgtttgttgctcgaggaggggcatagagcttacaaatagtgaagaggaaggggcgaggctggaccaggtgggagcgggggtgccccaagtcccagggcggtgaggatcgaggcaggtgcgtgaaaggcaggccccgttccccctccccacccccgccggctgtgtgtggcgggtaagaggagagtgggtagcactactacaaaatgagggtcccgatagaaatcgtacaggtgttgggaccacactcagggcggcaacttgtcatttttgcgtttttaattttcttatagaaacaagcgatttctgtcgtgattcactggggccgctaacgtgcactccctcttttcatcttaggacatgacaccagtggcatatcacggccatggggtctcagcattccgctgctgctcgcccctcctcctgcaggcgaaagcaagaagatgacagggacggtttgctggctgaacgagagcaggaagaagccattgctcagttcccatatgtggaattcaccgggagagatagcatcacctgtctcacgtgccaggggacaggctacattccaacaggtgatcatggagggatgattccctgatgagaatcccaaggtaccctcggagttctcctgtctgcccagacaacttttcttctaggcagtaataccataatagagacagtgccctggacaggagccagctcaactgacttaatacacttgggcagttctgcaacttctcttcctctccttatttttccaaccctttcttttctttaccgccactcttgttcttttcctgaggtttggaacattcagttcgctctgtgttgtgggatttgttgacaggcacatttctttatcgctgtcacaaggattgggacagctttgcgggggaaccatcttggaagctgcttttcaaggaaatgggtagctaatccttaacagcctaaggtcagaaaaatatatcaggtcaagagagagagacaaatacttagccttggtacaggatcatctattactattaacaaattggccctcagaaagtctttaacagtttagctggagagtcacagaaatttagagctggttaggaccttcaaaatcatttactccaaagcttccatatgaaaggcaaggaaaccatggccttgagagattcgacgactctgccaagcccatgcagtaaagccagaacaggatcccaggtttttcaacttccacatcactaccctggcagcactgatagatgttttataatttgtggcactctcttgtttcttgttcattagacccaacatgtgaatttcactagtattttttaaaatgtctcattccagaagaatatttgttgtggcaggctcaagtgagacgtgaaggaa

SEQ ID NO: 6113 - DNA, 6000 bp, Homo sapiens
atatgccttttaaatgtgattgcaaaaataaaagtgagtgattaagccttccacctacgaaaacattttactttctggtgaaattgttaatgtgttagttaaatatagttttcccccaggatagggctagaatctctagtcatttatgttttgttttccatattagttttaacttatcatacacatagagatcaagataagtatctttatatatcttcttactcccttaattcagtatgaaattgcttcagacctttgaaaagtgaaggacatttctataatttgggatataacaatcaatgtttggcttcatgtattttcctgagtttaacttattaatacataaagataaggaacagcctcataagtaggtttaccaaattatttaaatgggcaagaacttgtttacattaataacagataaagctaagatgcttctaagggcaaacatttaacctactggatcttatttactagttgaacattctggtgaagttagaaaaaaatgttccatgtcatcaaaaagcagtcctttctgttctcttttccagtaaagaagtctgccaagctacagatatcatcatgtgtcctgtgtgtgataaatactgtccattcatgaggctgtcagacagctgtgtatatgccaaggtaatttcaaactgtagcattttagatgaattgaatttaacatacaccttcctgagggatggtgggtaactctattctgtcatttccagtctttgattttcaagtgaatgttgtaggatagacttatctccatcattcagtattctaattcccatatctttgttaattgtccatgtatttggaaggcatggctctagacatcatccatggagctgcagcatggcacagtgtgaggagcacggtgctggagtcagagaaagttaggtccaaattttgactctgctgtttaccatttctctatctgggaataagatatttaacttctttgagtctcagttttctcatctgcaaaatggagaccatgatgcttgtttcacacggagttaaggtgtatactgagcatagtgcttggtaaatagacctcagtaaatgacagctatcatcatttgcctcctcttcatcatcattattgtcaaaatgacctccaattaaggctagctcagccacttacctctttagccctgaaatgtgccccctttctaagaaactcttttttcatagaaagaagctcagtcttctgagctttcttgtctctaaaatacaggaaatatgtgtcctctctgtcctaccctattggcatgacgtgaggactaaagaagagaatatatgtgaaagtgctatgagaaaaaaaatacatgacaccactatttctattatgtgttattgcatacctctttctcgtgatatgccttactttatttcttagacatattcctcacattcctagagttttttgatacttaggtggtggtgtccataacacaaaacaatagctgaagtttgagtttgcgaagacttttccaagagctactgccttttggcttgcccagattcagatataaatggcattggcagattttatccagcttttgtaatcactgaagcctggatctatctaattactctcttggcattgcagagttttgttcattttaaacaagggaacatttgataggcaacccaggatcccgcctatctataatgtctttagtactgcaggtggccggtctgtgtaggaggagcccagactgcagcagtgagcagtggttttagaaagatttgagctcttatgttgcaagggacaaaaaaagcacaaaatgctctgagccctatctttaggaaacactcagatagacctgagtggataaggataaatttaacagagtgactttaggacatagagatttggtgagcatcaagagctttgtcagtaatataattttgtttaaaggtcagatataagcctgaatgactcaggttttaaaattctgcttctggggaaaccccaaaatcagaagccaatttttttttttaatgtggaaagatatgcttgagtaaaattctctttttaggagatccttaataattcttttaaagaatcgtcatgaatagtttatgagtgctcagattttataggggcttattttgggagttattctccctaacttaagacctagaacaataataattataatagttacagctataataatagctagacaatctacattgattatttctaattctcacagcaacttcaagataggtgttattatttccattttattcagagactcaaagaggtaaaaattactcatgcatggtcatgcagcaataagtagctgggccttggtttattgcactgcaaaacatgccttctttaccactgtgccctgctgagccacaagatgtttagattctgaatttaacatttggccttgcctagaaacttagtaaaatgaaagataaaaagccttagaatgacagaattggagttatacagggtttcctttagaaatatttattagagatgtcagagtgatttcatgggactgtggatacacagaaatattaaatcagattggcgctgggatctagtccaatcagtggctgttctgctgatagggatgctgtatccttgactcttgtgtttgcaagaatcagaaacccaactcctactggcttagtcagaaagtgatgtaatggtacattttgccagaacagatactggggtggctcacgctgtgggatcatgagggcctcacagcctggaactgttcctccagggaccccggtggccctgcccacatgatcattctgtagactagttctctgtacaatagaaaagatggctaccagctgccttggctccaggcttacgttttccttcccttgtctccttaagtggatttttgtgcttattttaaactcctggtctgctgccacactgtgtctatgggaatcttctttggaggggaggggttgttgtcttccccatatatttcattattttggcctgttgggtacttgtcctctggaggcgtcagccactttgagtaagggtcagaggccaaggccaagtttgtcagtcctagtgagttacagagaggacagcgtgccccaggcacgactgagtgctactgctctatcagaggacttttctggtcagtttcatttttaaacctgcttagaacaaagcagaattgggcactttcccttgattgtaatctgccaatgctggggtttaagaggaggtggactatggagtgaatgccccagggcagctatccaggtagcacctgcttttcacccatgtctaacagagcaggactttgagcattccctgatattgctccaggaataccagcacctgtggtgtggcctgcttagctgatttctgagggaggggaaactaattgtccaatggccatttgagggagagaggctagagtagagcttatgtatttctctaacctgtgctctcactctacctggtatctacaacctacctctccccacacaccaccaccatcacacacataccagttcaagataacctcccatctcccctgaggtttctcagggtctttgttttttgtttttgtgttttgttagttcctggaatctactaccttgcttctccaggactgattttggcagaaggtgtcatcagcttaagctaactgactatctcattgggaaccggagcccctataaccttacccctcctcattcatatattgtcaaattgataactgcagcagaaagctgtctgtctccaaatgtttgtgtatcagccccagggcagtattctgattggttctattttgagccatgtgtcccttgggaccagcaggagttacctggagaaaggagaatggaagacagatgatctgggtagccaaaacaatgataactgcagtccattccagaatggacactgatggtgcaagctacactttctagcaactctcagtaaatactctgatagaggctgggcgcggtggctcacgcctgtaatcccagcactttaggaggccgaggcaggcggatcacctgaggtcaggagtttgagaccagcctggccaacatggtgaaaccccatctctacaaaaatacaaaaattagctgggcatgatggcgggtgcctgtaatcgcagctacttgggaggctgagacaggaaaatcacttgaacccaggaggtggaggttgcagtgagccgagattgcgccattgcactccagcctgggtgacagagtcagaatccatctcaaaaacaaacaaacaaacaaacaacaacaaactctgatagatagcacagtccagtcaaataccgctagaaccttcaaggttggtttgatactgagtgcccaatatacagcttaacattccctctggcatatgaaatagattagcttcagacatttgtctcacagtaggtatttgagtgctgcccatctctcctctattcaaagaaagagaaacttctggaataatctgaaatacttcacgttctgatataacatgaaaaacctctttatatttggtgcattctcgaaggaacaataaagtatactttataggtagctataaagtacccccaaaaaaggttattctttatgaacctatcagtcatcatttcaatttgtcatggacattggtattatttatactagaggcaggaatgagcttggcagttttgcagtaaaaatggatatttttgctttcttctgtggtgtttgcaatagaatatattattctagcaataaagtattgctagttgtctttgtgttatgtgcagtaggtaaatatagtgattacccaaggctttaataagggtagagttggatttagttaatggttctgctcttttttataaggctgaaatccagagggcagcccagaaaatgtttgctcaaaactgcataaacaaaatagccatgttttcaaagtgaataaatgaggcattaaaaacagtgcttgggaagttgaaaacctttaaagcagcactaacaataccttcctggtcctaaatataactatatccatacacatatgtacgtgtataagagttttgttgtgcacaaaaggggattcttagtagcactattggggatgctgataaatgttcaactagatgataaccacataaagagaacaaattgtatcctctatatatgaactaccttgcaattagaggaagccttttcttatttatggttcaaaaggaatattccccctacccaaaacaaagcctgtaaaactcattatataatcacagctatttttacagaacttgaaaaaatttgaattggaatatcatatatgagaaattaactcagcaccgattcttattattcacaggtaacccacctttttgacaatggagccactgtcttctttgctgttttcatggcagtctggggtaagtgttctataaccataaaacttgagttttcctcatatgccctatgatatattcctttagaagtttcactttggatgtgaaagaaagaagcttgagtaaatggaattagctttcctattagtagaaagttggtaaataatttattgggtttattttaaacgatattgtagaagagagacatgtctgatttctcttaaaccttcaacaatgtcattagcactctgttattagagtagaatttactttctgttggacacagaaataaagcttatggtacaactttagtttaggtcaggggagaactgaaacaccatctcagtatatataggactttctattgtaagtggctaatgtgtgagtacccacctttagctttcttctagctctgtacaaaattacccctaaaaacaaggtctattcacaggactgatttgagctttttgatataatttcaagctaacagccccatcacacaaggtgtgatggaaacagtcaaatatttggaagtaacaggacttgattgaaatctcaactccctttacacactaggctgtgtgatttttggcaagttatttaacctacc

SEQ ID NO: 6114 - DNA, 6000 bp, Homo sapiens
gtctccaaacaaacaaaaatggtgccagagtcttttccagggctgaggggagatacaatgaagtgtgttattttttctgataagagtgctaccatctttcattcttgtgtgccatttctagttggggtgaatttgttttcggagttcctttcccagctgtttgcctgaaaaaccatgaaatgtgttccacatgaactatgaaatgattagatgctaatgtggcaaagaaagtgtgaattctcttgtagaaacagggacatttggttcggtacagtaagttgttaatgcgtgactctgtgctttcaaattctgtggttcaaaagtacttttcactcctactgtgtatttaccttgagaaggtgaatcccctaacaatttggtcaatgtatcagtattctcaacccgtctatcaatttttttttctttctccctcttttttctttttttgggcaaaataccttttttgctttttatccccttaaaataaccattgtccctcacatgtgcactcttccaaatttcagaaaagcaagaggaaagggcacgaatatacaaatattaagtattctctagcggaccagacgagtggagatcagagccctctcccgccttgtactccaacgccaccctgtgcagagtaagtagtgctgaaggaaattctttttacctggtcatggtggtttaaaaaggtttaaaaaacaaaaacaaaaacaaaacacaagtttgtagcacatgcctttcactggtgcacgttcctgttgccctactgttagtgtatctgtgactggtgatatctattgattgtgttaatgctatctcaaccacgttttaattttcctaagctggccaggcacggtggctaacgcctgtaatcccagtgctttgggaggccgaggttcatggattactttgaagtcaggagttcgagaccagcctggccaacatggtgaaaccctgtctctactaaaaatacaaaaattagccgggcatggtggcgcatgcctgtaatcccagctactcaggaggctgaggcaggagaatcgcttgaacccaggaaacggatgttgcagtgagccgagatcatgccactgcactccagcctgggcgatagagtgagcctctgtctaaaaataaaataaaataaaataaattcctaaactgaaggctgactgctatgctagctaggattatatgggattttaagtatatcaagtggtggttctccaagaagaatctaatttttcttttgatgggctggggattgtaacaaaggaaggtcatatgtcttaatgatgtgttaaggctctttgcaaaatcaaagtaaataaattgaccactaatgtgtcagcccagccatgttctgctcatttgccaccagtcaacagaaatctactttgggtgtttaaaccaggagtcagcaaactacagctcacaaggccagatgtgggccatggcctgttactgtatggcctgttaatggttttaaagggttgtaaaacaaaagaacacaaaacaaagacccaataacaaaacaaagcccgaagaataatatgcgacagagaccatgtatggcatatagagcctaaaatactgactctcaagcccttcccagaaatccttcccgactccttgttgaaaacacggtaggaaagcatttgtcaaattgaggatatgaatagcaattgtaagttattatttttctatatattcgaaagtcacttgctagtataacatttaccttttatttttccctaagaatcttctctctgtttgctttcgacatggatttttaaacccctgcagattttaatattctatataaatgttttaggtggcatatatgaggtttgtattaacatttgctttctatttaacattgaaatgaaattatacagcagaggtattttctcgtccaagttgccacttctttctatcttttttcttttctttcccagtggactgcctgggaaaattgatattttaaattgctctctgcaataatttgcaatggaactggaatgccagggttctgagtccttgccagacagctcgtccctcctgttggcatgactgagtcagctgtcatgattccctcagtaccagtggcatgcctgtgacagacagcctgtctgcctttcattcccgtcgtctcccttgtagggttcagatccaggatacactggtcctggagcccctctcagcctggcacccacagctgctgggttccttactctcctggactgctctgatgtcatctccctgctcagcagaaagaagtctgggatcttgatgctttggccctctgtcctaggccctaaaccacccattgcccttcacataacctgagctggggctaaatagatctctcatcactgcctgcctgctcctgtattttcccttcttggagcttttgcctgttcagatccctctactggaaattaataggatttcattctatgtgtgcatttccaacctttcttcacagtgcgatccaaatgcctcatcctacaggcctccttaaaacaacctgctttctgccagaccccagggagcaccaggacttgaggcttttattgcacttctgttgtttttttgagatggagtctcgctctgtcgcccaggctggagtgcagtggcacgatctctgctcactgcaacctccatctcccgagttcaagagattcttctgcctcagcctctcaagcagctgggactacaggcatgtgccatgacacccggataatttttgtatttttagtagagacggggttcaccatattggccaggctggtctcaaactcctgacctcgtgatccacccacctgggcctcccaaagttctgggattacaggcgtgagccaccatgcccagcgttatttcacttctgcctctgtaattatattgctgtatggctatctcttctctccctgggaatgtcaggtcctaggcacaggaactgtgtctgtaccatatctggtgcccaaagaatgtagtatgtgttttatagatatcatgtaagcttaaacagcgtggtctacatttttgtaaatgtctttctttttcttttctctccagaatgagagaagacagtgctagagtctatgaaaacgtgggcctgatgcaacagcagaaaagtttcagatgagaaaacctgccaaaacttcagcacagaaataggtatttaaatgcaagtgctctattggttaattgtttatataattggcagtatttttaagcaggcaagcaatttgggaatgttttagcaaagtgtaccataattgagttttacaaaccaggctcctttttcctctccctgtacttctttttccaagatggttttagtttagagttcattaaacattaaaatcaaacacagaattaattctgcatgaggcaaggctagcacttattccagagaaatggctgatactggtggtagagtgcaggtatcactgttcctgcaatttttattagagttggttagcccaggctgtgctgggggatgatctgtagggatctgggaagcatcgggactcagcactgggtggttgggagtcaggaagcctgagttctcatttcagtcagtctctgaccaactgtgtggcatggggtgctagaccacttggctgccgactgggtcaccgacatcccttccagctctgctgctggaaattcatctctcccatatgttgcctccccatcaattacgttttttaagtgtgacccaagtatatgatgtatgttttcatgataaattagaaacttatctgggcatggtggctcatacctgtaatcccagcactttgggaggctgaggtgggcggatcacctgaggtcaggagttcgagaccagcctgaccaactaaaatagtagagaccaacccgtctctactaaaaatagaaaattagctgagcatggtggtgcatgcctataatcccagctactcaggaggctgaggcaggagaggcagcggttgcagtgtgccaagatcgcgccattgcactccacctgggccacaagagtgaaactccatctcaaaaaaaaaaaaaaaaaaaaaaaaactcagtgtcagtatttcatgtcgaaattccacttcaatgggtagtgtagttaaaagctctaagtctaccttaaaatcacctaatgctttgttaagcttttagatatatgttccttaaaaactcttaacttatttcttccccagatgtggactttcaccctctccctaaaaagatcaagaacagacgcaagaaagtttatgtgaagacagaatttggatttggaaggcttgcaatgtggttgactaccttttgataagcaaaatttgaaaccatttaaagaccactgtattttaactcaacaatacctgcttcccaattactcatttcctcagataagaagaaatcatctctacaatgtagacaacattatattttatagaatttgtttgaaattgaggaagcagttaaattgtgcgctgtattttgcagattatggggattcaaattctagtaataggcttttttatttttatttttatacccttaaccagtttaattttttttttcctcattgttggggatgatgagaagaaatgatttgggaaaattaagtaacaacgacctagaaaagtgagaacaatctcatttaccatcatgtatccagtagtggataattcattttgatggcttctatttttggccaaatgagaattaagccagtgcctgagactgtcagaagttgacctttgcactggcattaaagagtcatagaaaaagaatcatggatatttatgaattaaggtaagaggtgtggcttttttttttttcttttttccagccgttgaccaattatagttcggctgttgactgagaagtttgtggtgggaaaacgtttgccatattttctttgcatttgaataattgtcttgtacttagaaaaaaggcgtctatgaatgaccagtgtttttggtcgccaaatgttgctgacaaacttatcccaaaactttagtggcttaaaaaaacctgcccccaactgttagtcaatctgagctgggctcagctgggctgttcttctgccagcctgcaggtggccactcatgtggtcagcaggtcggcggagagactgggatggctgggcttctctctctgcctgcagtcctgagtctctccttcttcgtgtagtctctttcagtggcctggctggcagggtagctagacctctcacatgcagctcagagctcccaagagctcaaaagcagaaatggccaggccttctgaaaacttaagtccagaattgtcacagtgtcccttctacttccctctattgatgatgatgatgatgatgatgatgatgatgatgatgatgatgatggttttttctaatcagaagaaagctggggtatgccctctacttactaaacaagtcacaagcccagctcagattcaagaaaagggtgtgaagtagaggtgcagttaagtggggggccactagtctaacagacggtcacaaccagtgccatggaaaaccaaggatattagcaaaagcagaagttgctagtgaccttgggaagccgaagctgcttacagtagctgggacaagctgaaagtcagactaagaaataaagagagggccttcaagaagcttcctgaatgatttctgctagccctgagcctatttttggaaccagcacttggggaaactgatcttgtgaggatggatgtgtttagggacacagggcttttgagagcagcaccaccccactggggcatccccagacttgggaaacgtgactctttcttaatgccactgggttttagtcaggccacagtgagaaggaacagccctaacaggcctccagccaggttgaatgagctcatttttgttgtagccaaccagtaagatttgctaatgttctacattaagtgccttctccaaagacatccctctttgcctcatatgttgaatcatccagtgcggatatttcaatgaaaatatca

SEQ ID NO: 6115 - DNA, 6000 bp, Homo sapiens
tattatgattaaagtagatcatccatggaaagaactaaatttcaattattcaaccatagaagttgctagaattatcattgtcatctgtataattattattaccatttgtttttattagtcgtgggtcaccagcccacagtcgtaagtgctggccggttccttttaaatccctaaatgcatccctcctcctcctcctgacatcagggactaggtgtcaattcagcaaatgtgtattggggtcaaagcatcctatctgacccaggaaggagaggcagagggcccacagatcccgtcccctcctctggaagctcacagtctctgccgggagacagacacttacataaataactgtgaagcaaggcaggcagtgataagtgccgtgtaagagagattcatgcagtgtctcgggggactgaggcagagagcgatgagttccaggttgggaagggtttttggaggaggcatagcctggagactaaaaggcatggaaaggcttacgggtagggggatagaaggtgggttcctttttaacatcgacaagcatttttgttgctgttgttattgctgtttggagatttggaagggggaggttgtttttcatgttcaattgtatttctttttaaatggataatatatttgcatgaatcaacattcaaaaagaagactaaagagacatgatgactaaacacagtctgggacctgggttggatcccagaacagagaagggacattagtagaaaacaggtttgatgaaatccaaatagagtctggagttgagttaatagtaacatatcaacgtgggtttcttagctttgacaaatgtaccacggtaatgcaagatgatgacattaggggaaactgaaacccagtgaggggtgtactgggattttctgttctatctttgcaacttttctgtaagccttaaattattccaaaataaaaagtttactttaaaaaaaatctttgaaagatataaaaaggaggcctgtcaccatatgtatgtatatgtgtgtatatatttatacacacacaaacatatttttttaaaaaaaaacataagttatagtacattctacctatgctgttttctgcaccttcctttttaacttaaaactctatcttagagattgctccttatcctattttatagctgcataatgtgccattttatgaatagaccagtttgtttaaccattcttctattgataggcatttagtagctgataatcttttgttattacaaataaggctgtcatgaatgatccagaatggggagatcaattgcaccaacctgggcccatcgtgttgattaaaggttaattcaagggaagcatttagaactgctcctggcacgtggtcagggttcaataaatattagctcttatgggcatgcatcccatttcacacacacatgagctcttggtaggataaatttctagtggaagaattactgggtcagaaggcacacagttttgacagttattgctaaactgccctctgtaaagaatgtatccacttaggctgttagtatgcagtatgacacagccgcttgcttcttccctcaccaacacacagcgttaccaagcctcttttgagctttgccaatctgacaggtgacaaacggtatctcagtgcagttttaatttgcatttccctaattatgagcgtggttgagcatcttttcatatgcttcagagccatctgtagttccttcttggtagcagggacaatttgaacatgatgtcaaggtgaaagtctgacaagctctctaagcctcagtctgtttgtctctcctccattcttctcctgataccactatgtgcaactggattagaaattcttgggaggagtcagacaagacacccattgtcccagatctaggagtaacagctgtacccagtgctggttgaagactgtacatatgaccaggccaggcacacattttagtcttgctctgttgctgtgagctaggcctggaaaggcagagatgattcacataggtaaatgggtcatgctgattcctaaaagcattgaatgaatgaacaaatgaatgaatgacttggttgcgatgttgcttcctccataaagtctttcctgactctgcttctccagactagtcacgtccctggctatatggtctcatagatgcctgtgtttttcctacttagcacttattccaattgttaactaggtagttcatttggtaattagatgggcaaggtctgtctgcctcctggtgaatcacaagcaacatgagagcagataccatgtctgtcttgtttagcagcagagccacagtactgtctcagtaaatattggatggatggatggatggagggatggatggacagaaggaaggatggatgggatggttggatggaatgtttagattaataggatggttgggtgggtggatggatggatggatggatgggatgggtgggtgggtggatggatggatggatggatggatggatggatggatgaatggaagtgaatgatggacaggtggagaagttggtgggtgagtgaacggtaggtggacagaggtataagggggtgagtgactgtatggatgggcaaatggatggacagatgagtgggtaaataggatggatggacagatggacggatggatggaatggtgtccaagtggaggagtggatgggtgagtgtaaaggtgggtagatagaggtataagtgggtgagtgacagtgtgggtgagcaaatgaatggacagatgggtgggtatatagatgggtgggtgggtgaatggataggtggaaggaaggaaggaagggagggagggagggaggggcggaggggcccactaggctaaagccacaccttgtctcccctttaagctcaatatgtcactcccactccacccactaccccctgagctagggctcaggaagcagattgttaattgaagctggttgggcagacactgagcatgtcctgaggttagaacactctgctcaggagcacacttgcccagttaggcactctgcaagtatttatggtgtgccctctgacaggctacagggagccagggaaagggcattttgaacacaaagtgagaagcttggttcatttaaagaaatcctttgccaaagagaagagtaagagtgcatttagagaatgaactgtcctccaattcttggtcactatgagtttggttttttgcatgttttatgatatgaaggcaagagggcaagagaatggtgactcctgttgatttcgtgcttacaagttcttcatacttgaccttatctgtccccatcttcacagacacttcgggcgggaagtagttaccctatttaatagagacaaagaatcaggctcagaaaaacaaagggatggacttgcctgaggtcccgttgttcctcagtcacagaaccaggattcaaatccagagcctctgatgccattggccatgcccattccacaaggcttggtctcaggctttgagatgcccccagggctgcattacaagatcagagcactttttccagaaattcctgggaatagtctctgctgtgtccagccaggcctgtgcacgttgcctcctcggaatgaatgaatggctaagctggaatcagagttcttgacacctacctctgactcctccatccagtcatctatgctttgagggcttattgagcaccaacaatatcctaggcactaactctgtaaccctgagcaatgcatttcattgtgaccctgaccctccatgtcatctgtcacccaagattgacaagctgctgggcagcttgtaggacttttttaagagtcatatgagatgatgtatagggctgtatatgggttttgaaaatcatagtgtattataccgatattcagtattagtgtttaattctaagtctggacttggctggcctggtttgtgtgattaaagaggatctgaggttaggggtatgtgtctgtgtgtgtgtgtgtgtgtgtcctgtctggtagtagccacattttcagtaatgtcatttttcgtaattaaatgcttcaaacatcctttcccagattccctataatgagtaagggttttcactacaaagtcagatgcttttagtatcagttatcaattgctgtataacaagttaccccaaaactcagcagcttaaagcaacaaatgtttattatctcacagtttttacgggtcaagaatccaggcacaggccaggcatggtagctcatgcctataatcccaacactttgggaggccaaggtgggcagattgcttgaggccagaagttcaagaccagcctaagcaacatagcgagacccccatctctacaaaaaatacaaaaattagccaagtgtggtggtgcacgcctgtggtcccagctactcagaatgctgaggtgagaggattgcctgagcccaagaggcggaggctgcagtgagccgagattgcaccactacaccatagcctgggtgacagagggagaccctgtctcaaaaaaataaaatgactgggcatggtggctcacacctgtaatcccagcactttgggagggtgaggcaggcggatcacctgaggtcaggagttcgagaccagcctggccaacatggtgaagcccggtctctactaaaaatacaaaaattagcctggcatggtggcacacacctgtagtcccagctactcgggagtctagggcaggagagtcactggaacctgggaggcagaggttccagtgagccaaggtcatgccactgcactctagcctgggtgacagagcaagattctgtctcaaaaaatatataaatataaatatatatatataaatatatatatataaatatatatataaatatatatataaaaatatatatatataaatatatatataaatatatataaaaatatatatataaatatatatataaatatatataaaaatatatatatataaatatatatataaaaatatatatatataaatatatatataaatatatatatagagagagagagagagagagagagagagggaggatccaggtacaacttagctgtgtcctctgccacagggcctcttacaggctgcagtcaaggtattaccagggctgtggtcctctcctggctcaacttggggaggagctgcatccaagctccgccgtgtggttgctggtaggattccgttcctaatgggctgtgaaattggaggcctcagttcctcactggctcttgtggccagtagataccctgagttctggaagtcacagtcttttgtaacctaatcccagaagggacaccccatcaccttcactgtatcctccttgttggaagcaggtcactaggcgccacccttacttaagggaaggggatgcatgaggctatgaacaccaggagaaggggatactgggggccataatggaaatctgcctctcacatgcccgaggttggattccaaccctgccacttagcagctgtgtaccttgggcgcacagctccccctctcttgagtctcactgacctgtctgtttgctgttatgagactggggtgcaattatgcacataaagaacattggcagggcctggtatcatgttcctactttattttatttatttatttgtttgtttgtttgtttgtttgagacagagtctccctctgtcacccaggctagagtgcagtggcatggtcttggctcactgcaacctctgcctcccgagttcaagcgattctcctgcctcagcctcccgaatagcttggattacaggcacccaccaccatgcccagctaatttttgcatttttagtagggacggggtttcgccatgttagccaggctagtcacaaactcctggcctcaagtgatccacccaccttggcttcccaaagttttggaattacaggtgtgagccactgtgcccggcgtgtttatactttataaggggtagtggctcataactgcctgttctcctcctcacctgcattcatccacctggacccaggcctggctgcttcctgctttctcggct

SEQ ID NO: 6116 - DNA, 6000 bp, Homo sapiens
tcatgaaggagggaaaagggttaggaggctttcacacaagctgagtgagggaaagggggtcttagctgagagtcatggaaactgcaatgaagagatgaggtggatttgagatacatttctgatacagacccaataggactcgctaattaatgtttgtgatgatggggagagggaaaggaaggaaacaaggatttccaagtttctggcttaaccaggtgggtggatggtggcattagttactaagtggaaaaattaggggagtaatagattttctgggggttggggagagaataaaatcataataatgcatgaaattcccaaggaaaagggaagaggaataaagggttaaaacactgagaaaatctggacatttttgttgagggccatggagggaaagaaggtgaaacaattggggaaatcgtgaattttttaaatggaggctaaaggagtacagagatcactggagatgtttaaggtgggacagaagctaggctgccatgtgactatgaacttggttagggcaggttcatgccagggtgtctcatagatgtgttgccagctcctgtcacagtgtctggccgataacagctgcttaaatatttgtgacatggatcagttgatgagtggatgataagaaagtgttggaaattaagcatagatggaacattttcaataaatttgccaatgaagaaatggggaaaaggttgttagtgggaggaatgttcatttttcttttcagacgtgtgtgtgtgtgtgtatccttagataacctgtagagaggagagatgaatgatgctggagcagaaagggtaggaagaaatatgaattcctctggtatgctgctaattgtttaataactggctctccaaagaacgggactcctgatttgtagtgtttgctaatgtaaatactcccactgtggctgattgcaagctacgagtgtgacttcactgaccatggagttgtgagagctgtcatagtccgccatgatgccatgtttctaccagacggatgcaatagacataaataacctcaaaagcatagataatagcaaagtgaagcaaaaagccaactcaagagtagtgagctttgaatatgtactaccttgtttaaaatatgacatatttaattttaagtttatttacttgaatttttaataatggctgttttttaagtaagcgacttgtaaaattcctaaaactttgtcagctcttccaaaccagtgtcagccagttccagcacaccagtgagaaggtccctcagtagggggaagaaaactttctattatccaactactatgtaccagaaagggggctagcatgtcccatgtgttattctatccaaccactgtggtatcacttttagggtagatgttgtaactcccattgctatgaagaaactgaggcttagaggttaaaaaaccttgtccaagttcacatagtaagtggtagggtcaggattggaacccagactgtttgactcctaaacttgtgctttgaccatttactgtgctctaaagcccagagtccagagcgagggctaagctttggggaagaggcagggtgcttgtttgatttctatgtggagctggcctctccattgaactctcagcaggtacaaagattcttgtagtcatctcgggttccacaaatgagacacctcttgacttgcttcagtatggggtattggtgctaatacattgagctaggtgacatgctttgtagattactttttcatctttttaacctcaggtagcaggctattttagaaagagtgatgattggagagcagcagatagcacagctggaattgggccggattctcactaagttaatgtatttatggtcccggaccatcttcccccaatggaaagttgtcatatatgttttctctttggaaaacaaaaaacaaaaaacagtgtcatacctttgagtatatatttgattactgttacaattacttttgaaaattgtgcttgtacttttgtcagaaggtgatcaggtaaagcaaataaaagttggaagaggcaacgttatcatagttcttaagatctctgactctgcagacagagtgtttaaatcatggctctatcacttacttgatcccagacgagttatttgatctctgtgagcctcagttttctcatctctcaaagggtgaaatgctggttgtcaggactaaaagcatttgtacatgtataagcatgtaattggtgcctggcataccatggccactcagcacatggaagccagcagcgtcattattattagtttagtattctgaatattattttccccgtatgggtttctgaacaccaggatgcattatgaaaatgctgaacctgcaatatgcaggcaaggaatgagtttgtgtgcgatttttttgttgttgttcaacttcaaaactattaggacatagtcatatgggatgcattggtgtgaggttgacaagaattgggccaaatgttatcaggcaaaatattgttttcagaagttatctaatacagggaaaaatctaagcccaggaaaaaatcctactgcaggtcatttatttagtttgcctatttttatgtgacttactgattgacttatgggtagaaagtataatgaaaagcctagagttgagagtacctactctagaatcagattacattttagttgatgcttcttttactgaattattccatgggaaatgagaaatgttttgtgtgtaaacatcccccaacatcttaaatacatcaaattcaggcacacagggaaacactttccctttcacattacaaagcccagtgaattctaaatgaaatcttatcttcattccatatatatatcaagtatatacacacctatatatgtatactcattcttcatatatacttgattggtttcatatttaaatgacaatgaccacaataggcattgaagacagttcttggctcaataaattcttggacatttcctctttcctctgctacccttcagggtatattatggatcattcattcattgaatactgtttactgagcacctactatgtgtcaggcactatttttggtgctggaaatatggcagtgaaagaaacaaagtcctatccttataaaactttatgggatgatgatcatgatatttctacataaaacgaactccttttctacttctgtgggcgagataatggttagattttcatttcagtggctcttaaaagttttttcctgtaaataccttgcacataggtgtacaaataaaaaaactaaaacaagtttaggactagagaacagtttggcactaaagtgaattataaggtaattaaattcaagagacatagggaggcatataaatattttgaccttcaatgataaaatgggtagctgatcttttaagtgtcatttttatgttttattgctgtagacctttcatcgtactctttttccccaaagtaagaaatgctgtgcaaattaaactcctgaggtaggcttttgaacttttatgtcacacgttatgattctatgagtagggaaaatgtgttccagattattaacagcctcgtaccatctttgagagaaacctagtgagctagtgatatgagatttgcaggtgacagaacaaatctatgttgaaagcctgtattattgatgaataataactgggttctctttctcccctttatacatcatattcattgattgatctcagatgagccattttcagtctcattcagctgctgctttcaaaaatgaaatgactgaataagaggtgtggagttaactaatgggtccacacagaaaatacatgtaacagttaaaagtgaagtttctaggttcatatttttttaataaatcccacatccctcattttaaaatctcttaaaatataaacctcagtgatgcacgttagaaacacaaaccacctcgtggaagcagatatgaaccaatatcttactttaaagggttgttgcaaatttttaattgctgctaatagctttttccttgcttcccttgctttgtgtataaataagctggtccacatttcactatggaattctctcttcaatggcatgcatagttaagtctttagatgtagtttttaggtgaccgtattcagatcactgtgagttatttccaggaggtaggagcatgatagtggtagacccaagaaagcaataacttttaggctgaactatataatgacactgaccaaactaaccagtataattaaagttacgtattgttaaacaactttataactgtttatactcagggtcctgtcgttcagacacagtacccaaattatatctttcctaatctttatccatatgcattgctgagctttttcccttcttcagcttctttctttttttttttttttttttttgattgagtctcgctctgttgctcaggctggagtacagtgatgttatctcgactcactgcaacctctgccttctgggttcaagtgattctcctgcctcagcctcccgagtagctgggattacaggtgtgccaccatgcctggctaatttttgtatttttagtagagacagggtttcaccatgttggccgggttggtcttgaactcttgaccttgggtgatctgcccgccttggcctcccaaagtgctggaattaaagtcgtgagccactgctcctggcctagtttctttttaatgtagtgaattgaccatcgtttttgctaagaccctgtgccctttggtgttctgggactacaggcacacttggtgaatgttagggcactgcagaagggaggtggttgattactgcaggcaaatgacctcctatagagaaggaaacagtttattgaaaagggtaaatgaatggcggtgttttgctataggtgtgacagaaatggcaggaaatgtgttttaaaaaataaaaaaaattaaagttgggcactgtggctcatgcctgtaactccagcactttgggaggctgaggtgggaggatcgcttaagtccaagagtttgtggctgtagtgagccatgatcacaccactgcactccagcctggatgacaaagcaggactctgcctctaaaaagaaaaaaaaaagttaagtacaaaacttattttcaaaaataaactttgtcagttagtgttaaaaggctttttaattatgaactgtgtttattggaatagtgtcattactgtgcctttaatgttctttggtgggttacttactcaagctggtttcccaggtctcattaaagtagctttttttcaaatatagaacttgccagaaaagtgttttctttgatggctagagaatttgaagaaagatttttgatttttctgttactgtttcttaaccattaattgagaaggatcttatccctttttaaccagacccagagtatgtggtaaagcaggaagtacctttatgagttcatctgaaagcttcttggaactccacattggttcctgaactgagctcagcactaaagtggatcatttcaacaacgtgcttattggcttcattcaaaagttagcactaaaagcttcttctaaataaatcacatgctaaggaggcaaaaattccttttaatttatgggtagcagttgatagtttcttttattttattatactttaagttttagggtacatgtgtacaatgtgcaggtttgttacatgtgtatacatgtgccatgttggtgtgctgcacccattaactcatcatttagcagttgatagtttctaactgctgacagtccctggttcattctgcttcatcttgattgggtatcggttcttggcaatatttgatcccctgtgaatttcagtcagtagatgataagctctttcctttctcagtgtagagtaatcaagcttaggcatctgccttccaactggatgcacagggacatatgttgaaagagaacgctgtcagaacataggcatttctggttggcatgcaattccatcactgtcacaacaggctgttgaaagaggatctcgggtctcatgactttctatcagctcagcagacacc

SEQ ID NO: 6117 - DNA, 6000 bp, Homo sapiens
tctcaagcccttcccagaaatccttcccgactccttgttgaaaacacggtaggaaagcatttgtcaaattgaggatatgaatagcaattgtaagttattatttttctatatattcgaaagtcacttgctagtataacatttaccttttatttttccctaagaatcttctctctgtttgctttcgacatggatttttaaacccctgcagattttaatattctatataaatgttttaggtggcatatatgaggtttgtattaacatttgctttctatttaacattgaaatgaaattatacagcagaggtattttctcgtccaagttgccacttctttctatcttttttcttttctttcccagtggactgcctgggaaaattgatattttaaattgctctctgcaataatttgcaatggaactggaatgccagggttctgagtccttgccagacagctcgtccctcctgttggcatgactgagtcagctgtcatgattccctcagtaccagtggcatgcctgtgacagacagcctgtctgcctttcattcccgtcgtctcccttgtagggttcagatccaggatacactggtcctggagcccctctcagcctggcacccacagctgctgggttccttactctcctggactgctctgatgtcatctccctgctcagcagaaagaagtctgggatcttgatgctttggccctctgtcctaggccctaaaccacccattgcccttcacataacctgagctggggctaaatagatctctcatcactgcctgcctgctcctgtattttcccttcttggagcttttgcctgttcagatccctctactggaaattaataggatttcattctatgtgtgcatttccaacctttcttcacagtgcgatccaaatgcctcatcctacaggcctccttaaaacaacctgctttctgccagaccccagggagcaccaggacttgaggcttttattgcacttctgttgtttttttgagatggagtctcgctctgtcgcccaggctggagtgcagtggcacgatctctgctcactgcaacctccatctcccgagttcaagagattcttctgcctcagcctctcaagcagctgggactacaggcatgtgccatgacacccggataatttttgtatttttagtagagacggggttcaccatattggccaggctggtctcaaactcctgacctcgtgatccacccacctgggcctcccaaagttctgggattacaggcgtgagccaccatgcccagcgttatttcacttctgcctctgtaattatattgctgtatggctatctcttctctccctgggaatgtcaggtcctaggcacaggaactgtgtctgtaccatatctggtgcccaaagaatgtagtatgtgttttatagatatcatgtaagcttaaacagcgtggtctacatttttgtaaatgtctttctttttcttttctctccagaatgagagaagacagtgctagagtctatgaaaacgtgggcctgatgcaacagcagaaaagtttcagatgagaaaacctgccaaaacttcagcacagaaataggtatttaaatgcaagtgctctattggttaattgtttatataattggcagtatttttaagcaggcaagcaatttgggaatgttttagcaaagtgtaccataattgagttttacaaaccaggctcctttttcctctccctgtacttctttttccaagatggttttagtttagagttcattaaacattaaaatcaaacacagaattaattctgcatgaggcaaggctagcacttattccagagaaatggctgatactggtggtagagtgcaggtatcactgttcctgcaatttttattagagttggttagcccaggctgtgctgggggatgatctgtagggatctgggaagcatcgggactcagcactgggtggttgggagtcaggaagcctgagttctcatttcagtcagtctctgaccaactgtgtggcatggggtgctagaccacttggctgccgactgggtcaccgacatcccttccagctctgctgctggaaattcatctctcccatatgttgcctccccatcaattacgttttttaagtgtgacccaagtatatgatgtatgttttcatgataaattagaaacttatctgggcatggtggctcatacctgtaatcccagcactttgggaggctgaggtgggcggatcacctgaggtcaggagttcgagaccagcctgaccaactaaaatagtagagaccaacccgtctctactaaaaatagaaaattagctgagcatggtggtgcatgcctataatcccagctactcaggaggctgaggcaggagaggcagcggttgcagtgtgccaagatcgcgccattgcactccacctgggccacaagagtgaaactccatctcaaaaaaaaaaaaaaaaaaaaaaaaactcagtgtcagtatttcatgtcgaaattccacttcaatgggtagtgtagttaaaagctctaagtctaccttaaaatcacctaatgctttgttaagcttttagatatatgttccttaaaaactcttaacttatttcttccccagatgtggactttcaccctctccctaaaaagatcaagaacagacgcaagaaagtttatgtgaagacagaatttggatttggaaggcttgcaatgtggttgactaccttttgataagcaaaatttgaaaccatttaaagaccactgtattttaactcaacaatacctgcttcccaattactcatttcctcagataagaagaaatcatctctacaatgtagacaacattatattttatagaatttgtttgaaattgaggaagcagttaaattgtgcgctgtattttgcagattatggggattcaaattctagtaataggcttttttatttttatttttatacccttaaccagtttaattttttttttcctcattgttggggatgatgagaagaaatgatttgggaaaattaagtaacaacgacctagaaaagtgagaacaatctcatttaccatcatgtatccagtagtggataattcattttgatggcttctatttttggccaaatgagaattaagccagtgcctgagactgtcagaagttgacctttgcactggcattaaagagtcatagaaaaagaatcatggatatttatgaattaaggtaagaggtgtggcttttttttttttcttttttccagccgttgaccaattatagttcggctgttgactgagaagtttgtggtgggaaaacgtttgccatattttctttgcatttgaataattgtcttgtacttagaaaaaaggcgtctatgaatgaccagtgtttttggtcgccaaatgttgctgacaaacttatcccaaaactttagtggcttaaaaaaacctgcccccaactgttagtcaatctgagctgggctcagctgggctgttcttctgccagcctgcaggtggccactcatgtggtcagcaggtcggcggagagactgggatggctgggcttctctctctgcctgcagtcctgagtctctccttcttcgtgtagtctctttcagtggcctggctggcagggtagctagacctctcacatgcagctcagagctcccaagagctcaaaagcagaaatggccaggccttctgaaaacttaagtccagaattgtcacagtgtcccttctacttccctctattgatgatgatgatgatgatgatgatgatgatgatgatgatgatgatggttttttctaatcagaagaaagctggggtatgccctctacttactaaacaagtcacaagcccagctcagattcaagaaaagggtgtgaagtagaggtgcagttaagtggggggccactagtctaacagacggtcacaaccagtgccatggaaaaccaaggatattagcaaaagcagaagttgctagtgaccttgggaagccgaagctgcttacagtagctgggacaagctgaaagtcagactaagaaataaagagagggccttcaagaagcttcctgaatgatttctgctagccctgagcctatttttggaaccagcacttggggaaactgatcttgtgaggatggatgtgtttagggacacagggcttttgagagcagcaccaccccactggggcatccccagacttgggaaacgtgactctttcttaatgccactgggttttagtcaggccacagtgagaaggaacagccctaacaggcctccagccaggttgaatgagctcatttttgttgtagccaaccagtaagatttgctaatgttctacattaagtgccttctccaaagacatccctctttgcctcatatgttgaatcatccagtgcggatatttcaatgaaaatatcattggttgacttttgtgatggtaataatgctatggcatctttgccatgaagttgtggcctccttggattcttctgactttggcttctgaaaggaaggcctagatccagccctggtggtagttcctttctgaggtctctcagtcccttgagactttggggtagtttggctgccattctcactgacaaaatgtatatcagcccccacctccaccccccaatattccttgaactttgaattgcttcagaacacaggtgtggcctgaaggtattcccttattagggaagtgtcactgctgtcttctagtcaaacttgtaaagaaaaagattccagttcagtatttgcagcaagaagcttgaatgctgttctttttatcgcattgttacatcgactcattctccattttgctttggttttgtcttgacttgacttgactttgggggtaaagtctttcaccagcacacaagagtttgattgtacaaatatatcttctgcattaacatctctgcctgttgcttaagatcagttgcttttatactcagaatggaaatacctgatcttggctagttttgttataagatattgatttcatttagatttccctccacgaggtcagcaaactatcatgttcttatgtaaacttaggccaaggccagagttatcatagtccctaggttgctacggcttatcatgtgcttggtaaaaggtgatcgcaggttctcagacgagtttactttacatgagatggaatcaggcagagaggctgggatgatggagaaagctcgaggtgaagttttaaaaaaaaagttgtggaaaggaaagttccaaagaggtggtttctgaggaagtcagagcgcccagggccagagcagtcagtaatgggtgaatgaggttgtttggaaagtcggtgtgacagacacatggatgccatctacttctaggttgctggtgggtattaaatatgcacaatattccatagctcactgaggattttaaaattataagcataggattttatattttggggtgaaagaattatctggcacattaggtattggagtttaaaaaaaaagccaaatttcacagtcttaataactttttttaaaaaaaactaaaaggcgcttcatgtccagtgtgtggcccttctgaaacttatggtcatctctcccactgaaaccaaggtcttttcaaatgtggctaaatggggatgaggagacacgggtaggactttcttggtgtgtgtgcattctttaaagagccaagttgcttcggggaaacagccaggaaaatggtcaagattatttttagaggttattttattggggattttaagaactaataacatcttgagttatttttaattcagggggatgtggaaaggtttgcaattgtcaagtgttttgttgtagcttagtatccataagggaaacttagactatagacataactacaaagccagtgcagcttttgttttctgtatgttgttgggggatcaactttcacacatagcaagcacatggcctccctgatgtcaggatgcctttgttaggatctgtatttgcccttaattttgttgaaatcttttttccttcttcctc

SEQ ID NO: 6118 - DNA, 6000 bp, Homo sapiens
ttgctgtgcaaaagctctttagtttaattaggtcccagctatttatctttgtttttattgcatttccttttgggttcttggtcatgaaatccttgcctaagccaatgtctagaagggtttttccaatgttatcttctagaatttttatagttttaggtcctaggttgaaatccttaatccatcttgaattgatttttgtataaggtgagagatgaggatccagtttcactctcctacatgtggctagccaattatcccagcaccatttgttgaaaagggtgtcctttccccactttatgtttttgttatgttcagttagctgtaagtattttggtttatttctgggttctctattctgttccattggtctatgtccctatttttttttatagcccagaggtcttttttttttttttttttaacacctattatgccatgaattcacagggaataggttccagcagctcaggctccttcccattggctctcacaaagtgtgcttctctgggtggagcaggctggcgcttgagttgaacccaggtacctttctcttccgcttctttctttttctgatcattttccttcatgcatttcaggaagctatctcggctctcagagtgcttaatgtgctcaatatgcacattaattctctcggcaagaatcttgcccttaacttgtttgtttacaacaatgccaacagcatgctgggtaacattgtagactcttccagttttgccatggtaacacttacggggcattcctttttgaacagtacccattcccttgatgtctacgatatcacctttcttatagattcacatatacatggccaaaggaacaactccatgttttctaaaaggcctagagaacatatatcgggtgcctctcctctttccctttgtgttcgtcattttggcgaattactagaagatggcagttccggctgaaaggaaaagatatgtccttatttttgtaccagtaccatgctgttttggtgactatggccttatagtataggttgaaatcaggtagtgtgatgcctccagctttttctttttgcttagtcttgcttcagttatgtgggctcttttctggttccatatgaattttggaattttttttttctaattctgtgaagaatgatggtagtattttgatgaggattgcattgaatttgtagattgcttttggcagtagggtcattttcacagtattgattctacccattcatgagcatgggatgtgtttccatttgttcgtgtcatctatgatttctttcagcaatgttttgtagttgtccttgtagaggtttttcaactccgtggttaggtatattcctaaggtttttttttgttttttgttttttgttttgcagctattgtaaaaggggttgagttcttgatgtgattctctacttggtcgccgttggtgtataaaagagctactgacttctgtacattaatcttgtatctggaaagtttgttttatattggctgtgggtttatcatagatggcttttattacactaaggtatgtcccttgtatgccattttgctgagagttttaatcataaagggatgctggattttgtcaaatgctttttctgcatctattgaaatgatcatgtgatttttgtttttaattctgtttacgtggtgtatcacatttattgacttgtgcatgttaaaccatccctgcatccctggtatgaaacccacttgatcatggtggattatctttttggtaatttgttggattcggttagcaagtattttgttaaggattttagcatctatgttcatcaaggatatccatctgtagttttcttttttggttatgtcctttcctggttttggtattagggtgatgctggcttcatagaatgaattagggagggttccttctttctctatcttgtggaataatgttaaaaagattggtaccaattcttcgaatgtctggtagaattctgctgtgaatctgtctggtcctgaacttttttttgttggtaatttttaaattaccatttcaatctcgctgcttgttattggtctgtttagggtatctagttctttctgatttaagcgagaagggttgtatttttccaggaatttatccatctcttctaggttttctagtttttgtgcataaaggtgttcatagtagccttgattggccttttatatttcagtggtgtcacttgaaatatctcctgtttcgtttcttagtgaggtcattggattttctctcttcttttcttggttaatcttgctaatggtctatcagttttatttatcttttcaaagaatcagcttcttgtttcgtttatcttttgaatttttttgtttcaatttcatttagttctgctctgatcttggttatttcctttcttctgctgggtttggatttggtttcttcttgtttctctagttccttgaggggtgaccttggagtgtcagtttgtgctctttcagtctttttgatgtaagcatttagggctatgagctttcctattagcaccacctttgccatatcccagaggttttgataggttgtgtcattattgtcattcagtttgaagaattttttaatttccatcttgatgtcatttttgatccaatgctcattcaggagcaggttatttaatttccatgtgtttgcatggttttgaaggttcctttgggagttgatttccagttttattctgccgtggtctgagagagtacttgatataatttcaattttcttaaatttattgaggctcgttttgtggcctatcatatagtctatcttggagaaagttccatgcgctgttgaatagaatgtgtattctgcggttgtcagatgaaatgttctgtatgtatctgttaaatccatttgttccaaggtatagtttaaatccattgtttctttgttgactttctgtcttgatgacctgtctagtgctgccagtggaatactgaagtcccctactattactatgttgctgtcaatctcatttcttaggtctgttagtcattgttttataaatgtgggagctccagtgttaggtgcatatatatttagaattgtgatattttcctgttggacaaggccttttaccattatataatgtccctctttgtctcttttaaccactgttgctttaaagtttgttttgtctgatataagaatagctacccctgcttgcttttggtgtccatttgcatgaaatgcctttttccacccctttaagtttatgtgagtccttatgtgttaggtgagtcacctgaaggcagcagatggttggttggtgagttcttatctattctgtgattctgtgtcttttaagtggagcatttaggccacttacattcaatgttagtattgaaatgtgaggtaccattgcattcatcatgctctttgttgcctgtgtactttggttttttcattttttgtttttgctttttaacttgtatttttgttttatggtcctgtgtgatttatgctttaaagagggtctgttgtgatgtgtttccaggatttgtttcaagatttagagctccttttagcagttcttatagtggtgacttggtaatggcaaattcttggtaatgggtgaattctcttagcatttgtttgtctgaaaatactgtatctttccttcatatatgattgttagtttcactggatacaaaattcttggctaatcattgttttgtttgaggaggctgaagatagggccccaatcccttctagcttgtagggtttctgctgagaaatctgctgttaatctgatgggttttcctttataggttagctggtgcttctgtctcacagctcttaagattgtttccttcgttttaactttggataacctgatgacagtgtgcctaggcaaagacctttttgcgatgaatttcccgggtgttctttgtgcttcttgtatttggatgtctaggtctctagcaaggccggggacgttttcctcgattattcccccaaatatgttttccaagctttcagaattctcttcttcaggaacactgattattcttaggtttggtcatttaacataatcccagacttcttggaggctttgttcatattttcttattcccttttctttgtctttgttggattgggttaattcaaagaccttgtcttcgagctctgaatttctttcttctacttgttcaattctattgccgagactttccagagcatttcgcatttctaaaaatgtgtccaaagtttcctgaatttttaatagttttttctttaagctatctatttccttgaatatttctcccttcacttcttgtatcatattttggaattcgttgcactgggctttgcctttctctggtccctccctgattagcttaataactaactttctgaattctttttcaggtaaatcagggatttcttcttggtttagatccattgctggtgaactagtgtgattttgggggagtgttgaagagccttgttttgtcatattaccagggatggttttctggttccttctcatttgggtagactccgtcagacggaaggtctagggctgaaggctgttgttcagattcttttgtcccagggggttttccctctttttggtactcttcccccttttcctatggatgtggcttcctgtgagccaaactgcagtgattgttgtctgtcttctgggtctagccacccagcgagtctacctggctccaggctggtactgggggttgtctgcacagagtcctgtgatgtgaactgtctatgggtctctcagccatggataccagtgcctgttgccatggaggtggtggagggtgcaatggactccgtgagggttcttagctttggtggtttaatgcgctatttttgtgctggttggcctcctgccaggaggtggcgctttccagagagcatcagctgtggtagcgtggcgaggaacccgtggagctctagaactctcgagtttctatggcctttgtcttccgctaccagggtgggtaggagggaaggaccatcgggttggggtgaggctaggcgtttctgacctctcactctccttgggcgggtcttgctatgggttaagtagatgacattcccaggtcactggtgttgtgtaccaaggaggattatggttgcttctgctgagtcatgcaggttgtcagggaagtgggggaaagctggcagtcacaggcctcacccagctcccctgcaaaacgaagggccggtctcactcccaccatgcccaccacaacagcccccagaccatttccaggtggagagcgataggggcttgaaaacctgccccagactatccgcctcccagctgccaaagaagagggtttagttcgtgccgccgctgtggagtctgcacactggatttgcaccctcccctgagttctggccaggaggcttcttaccctgttcaaattgttacacagttcagctagagatttgcttctccctgtggagttttagcccttgctcctacccattggatccccgtggtgccagacaggaatgggctgctgggggacccagtgagctcccagggccttgctgctgcttcctctacgcctgtattttgcttggctttccaaattgactcagcgccagataaagttggaaacttctcctgcaaacagaccttcagcttcccccgtgagggtgagtgttcgggagaggagggtctccctttcccacttccgcagttggggcattcgcagttttggggggctctcctgggtcctgcaggagcagtccgtttccttcagagagtctgtgggtcctctcgggattgctggtttgtccttgcagtcaatctggtgctaaaattcacaatgcgagctgccgcccgctgctctctctggagctgcaatctagtcctgcctcccatccgccatgatctcaccaaaacctcttcttttatttcataatttttagagacagagtcttgctctgttgtccaggctgcagtgcagtggcatgaccatagctcattgtagcctc

SEQ ID NO: 6119 - DNA, 6000 bp, Homo sapiens
tcagttaatttatgtgattcaatctaatgtaaatatataaacaggcacatggctcagatgtggtcattttgatgccactattagaatgcagagttgtccttatgaagcctaaaagataattatgaactttctgtgtcttttccattgccaggtcatgtgtgcatcgggcattgttacccattcctaggcctcgctccttccccaaacctgggggaagcttaggcaggcctgagagctccagcaaggttgagagttagaatagtactttgcaaggaggttgcagaaagagatgggggagagaggagcaaatgtcatagttgtctcttgctcatgacacttggttataaaaagtaacgcttcttatgaagttttacatataagatgaagtgagtggaccaagaaattataatacattttttatcatcaaagagttgcatcaaccaggctatagcacaaagtctgattttcagtactgcctcatgacagtaaatatgcattttctagaatggtgctgtccagcagaacttttgtgacaatggaaatattcagtagctgccctgtccgaggcagtagccactagctacacatggctactgagcacttgaaatatggctggtgcaactgagaaactgaatttttaattaattgtaactaatttaaattggaaaagccacttgtgactagtggccatcaagtgaacacagttctggaaactggataattcagatttttttacctagcatctagggaattggagatactgacttaaaggatataattattttttaaaatagggcttctaggctgggcacggtggctcatacctgtaatcccagccctttgggattccgaggcaggcagatcacctgaggtcgggggtttgagaacagcctggccaacatggtgaaaccctttgtctactacaaaaatacaaaaattagccgggcatgttgtggtgcacgcctgtagtcccagctactcgggaggctgaggcacgagaactgtttgaacccgggaggcagaggttacagtgaactgacattgcaccactgcactccagcctgggctacagagaaaaaaaaaatacagcttctagtttagtgaagaaaagggcaatttgagggagagaaaaggaactgcgttctgtgtgaaaggacagagaagcctggtgatcagagaataagatcccaaggcacttcactggggctgacattcagggagcctcctggaagaatcatttcaaaagcaattgcagtcaaaacagattttgagagcactcttagacccagaaatgtatagttgtctgcatgtaagtgctaaggctaataaaaatcagaagacatttggaagacatatccttgaattgaaaaaaataataattgaatatagcaaatgcaagttcccacttgttcagcaatctgtttaacttcttatcagagtcattgttaatacttccttttgttgtacatgccagtgcctggatatctaacgtacaatttcttgtgctgtcatttccactttccttttcaccaatatgaccagtaaatacagtaagaaatagacactattgatacagagcctggatagtcattaataacagtaatgttagtatcgtattgagcactcactatgtgtctaagcttttgacaggtatttggaagataggtaagcactggataagtattagttgtttgttgctacatggtgtcttcactctaagagatacaatttttaattgtgatggaaatgtagagggtcactggtgtttatccacatgggagctataactaagaatagatggaacaaattcatactttttctaatgggggaactccaacaatcttagctctgagaatttgcagaatacagatctaaaagagggtggaacgaataagggaggtaatacatccagaagcagaaaaaatgctgaaaaaagctaatagctgtgactgagttgccagggaccccttctgggaccaggcacacatggttgctagttgaagaatcaaacaaaacagttggaagccaacagagggtggggacagttgtgtttagtaggtcaggagtcacataccatactgcactaaaagtatatagctaatgcatactgctgcaaacctgcagtagtaaaaaatttgacttcacattcttatcaagtcttttcattgcaaaaaactttattaggcaaaagttacttttacgttttaagctgaagactagaataactgctatcactaaacagagagagtggatacataaactatttaatcattcttcttgcagttttaaaaacattttctcatctctcattctcccatcccctccaccccattcccctaacatgaattttgtgccatggttccattttacaaggaacagtactagccccctgaggacaccaggaaatggtaacctcacaccctgcattagtagaattgaaaatctgtttttctgccatttatccttacagtataactctcctctttcacattctgcaactgatctagtgcttaaaacaaatggagtcttcaaaagcaccaatagacaaggataaaattacacatacagacagagtttccatatgagaacattaatgtaaaactgggcagagggtcagtttcttagtctcttcattctctgagagagttttgtgatggatcagaatgtaattgctccctctttcccacccccagggaaaatatgtgtctgcaagagcttattatgagagagccttacagctggttccagacagcaaactgctgaaggaaaatcttgccaaattggatcgcctagaaaaacgattacaagaagttcgagaaaaggatcaaacatagcaccaccgtctgacccaacctcataggataatgtggtgcctctgaaaggggagtgatggaagccttgctttcacatcagcaggggcacaactaatgagattttctctcattccgagttcagggtgacacattttgggacatctgctggtagcccagtgctgaaggacttgcttttccatgaagaagacgaaaacagcaaacaagggcaagaaggtctgagagggaaggagaatgacatttacacattttacagatttttgtttggtttaactccagatttctcttgatatatctctgtgcttttgagacctggagatctaattctgtttagacattttttgtcccagaaatacagaagcttgaaatgctatgaaggcagagcttctattctttatgggatgaaatatttcaaaagaggataaatcctctgtggtaagccatttggaaaatcctaccaagaattggcttatttaattttccagaaccaggaatgagtatctaatagcttttgtagaaccttccagaatatgtggggaaaaagggctattgctaagtgagctttatctaatatcctcctaagagttttactagtgcttttttgaggaattacagggaagctcctggaattgtacatggatatctttatccctagggggaaatcaaggagctgggcacccctaattctttatggaagtgtttaaaactattttaattttattacaagtattactagagtggtggttctactctaagatttcaaaagtgcatttaaaatcatacatgttcccgcctgcaaatatattgttattttggtggagaaaaaaatagtatattctacataaaaaattaaagatattaactaagagaaatgtcctactttattatcttaatgttcagacatcatgagatttattatttttttgaaaaatatattgaaccattgaggaacctttatgatgtatcacagaaatcttcatagattctaactagatggaaaaagagctctatttatttgtgttcctaggcttaatgagaattctgggcttagaacatcaacgattaatacccagaattctttgttttgagaatattatggagaatgctctaaaaatctagggtaaagatctaaattcaaattttaaatatatatttatatttaagaaataggaaaggcaaagttgaactcacaatttgacatttatttttagtgttatttatttcataacttataaaatatttaatatatacatacacactcttcttttttctctgtacaaagtggttttaatatcagctttcaaaactgatcttataaaatgtaaatctaaattgtaaaatagttaagttttaacagtccctcccaaactttgtgttgattattcacttgctaaagagatgtgaggaatcagccttcagttttttggcagtagtatattttggaagtgaagaaattggaacacctgtttctaatttggtcttcatcattagagacaaaaccaaaacactccaggcagtactgtttatagtgctgagccaggtagcacacagacatagtagcctaaaggctcacataattcgcatgctcaggccagggcagggtaaaaatagccttctgcttctttcaacccagtatcaggaagcactaccccagtgttattatttgttttgtcaaggtaagtctaaataaacaagaaaaacttcttcggaaggcatggcgaagggagtattttaaatgaaaatgattacagaatttgaattagcatgcatctctttgtgtgcaacagtaatccaagaatgtatatgttaccactacaaccatttgtttctaatagttttttcatgttatataacataaatgtatccacaaccttaattaagaactattcttcccccaaaatcatagtcctagtgtcaagaaacatactccagtgtttattgtaaaataacaaccacaccctcaaattgaaaaaagtgaatgtctaggactttattacaacttttcagaataatctgtaatgaaaactcatgcttaaaaatttaatggaaaagactgagccccaaattttgaatagtgattacgccttacttgaagtgctaataaaggtaggagagtacatttgttggaataacagaaatggtgatttcagcctaaaagtttctgagggtaaaggatcacatgaccttcaggaaactctctgcctcctgtaggtgctttcctatctcccccatccttccctaccccttttcccttttccttcctctctttttctctcactgtcactctgtctacacacactggcatcttttgaacactaaaagtaagcactgttttttaaaaaagtaattatttgttggatcagatacttttatcccaagtgaataccttcactgagatgtggccaatgcaatagtttcacagtaaaaacagtgcctataagaaaatagatcacatactatttttcaatgatattaagtgtattttgtaactattttcatttggtccttgtaacatgaaataatacatggaacttacctttataataaaaatggagtgccctggttcatcatagaggtgcatctagtttgcccttaatggaagtatacttgctgtgtggattgatagcaccttcttgaaatggaggagctcagctggcctcatggatgtgcaatttttgcagtcccacagggccttgcatacagaagcaccccgagctcagttgaatgtctgtttgattttttcttatttatttttttgagacacagttccactttgtctttttgtcacccaggatggagttcagtggcacaaacatggctcactgtagcctcgacctccctggctgaagggatcctcccacctcagcctcccaagtaaccgagactacaggcatatgccagcatgtccagctaatttttgtattttttgtagagacagggtttcaccatgttgcccaggctggtctcaaactcctgggctcaagcgatctgcccacctctgcctcccaaagtgctgggattaaaggcataagccaccatgtccaactgaaattcttaataattaataatttttgagcaagaggtccacactttcattttgcactgggttcccaaacaggtcctgggtaggaaggatggctgaggataaaacaggagttgctttggcctg

SEQ ID NO: 6120 - DNA, 6000 bp, Homo sapiens
attccttatgaagtctcctgtgtcacgaaaaacttatactaaacgaatttgtatgcatttctcttgatctgtcttttgttacagagatccagccaggaaccaacaaaggtaggaagaaaagacagtgttcctctcctgcaatattttgtattgcaatgtacctatgtatacttttatcttgtagtaatatactgacaaagtttattgcctgagtgccagaaaatgcaaggtcacaaataatttttgatactcttaaattttattaccgtgcagatgccacagagagacactttagggatggaaggaaagacagtttacctccagggagatcccctttttcctcctggggctgcagccgggctgccactgttgcttctgctgccaccagtctgggcccaggtctgggcacagccccaggctgtccgacacctgccctgtcaggtgttgggccagcttcttagagcacatgttgcctgctgtaccacaggcccatgggttggggggtaatttaaatttttttgttcttctttctacttttctgtattttcttcaagagcagtaatatttaaacaactagacaacaaaaatttatgttttaatgtaaactatagtatcatttcttttgtaaacgatattatcacctttgtaatattgcatttggccatttatataggttatatttgaataaaggacatcattaggctgaaaaaaagcacagggagcagtgttaaaataaaaagattattcaacaatacttgttaaagcatggtagaatttattcaggaccatcatgatagttatagggaccactgcaatgcggtccttcagtggggaagacagactggactcaacttcaaatacagcaagaaccccctacccttgatatctgatcactctcttgccaaactgacttagtagtgttctttgctaaaactggattttacaaggaagtacaatgatggtgctaggaagtttcagaagactaactaaagtttggtcaagcaaagaattgttgttagcagtaatttgaaattggttttattacaatagcttgcccttgatttatttttagttgtgtcctaatctctttcagaaatatggtccatcttaatttgcatgagtgacttaatctatatgagcctcagagaggtacttctacaataattcatgttttattataaattgcttttgagtggacacaaggcgtttcaggaggtagtattgcgctaattatcaatcctttaaaaataattagaggctaagtaacaagaattaaatctaacttccttttgggcccctttattagtcaagatggatgttttccactttaagagagaagcaaatggcttgatgggctggcatatcaatgtaaacctctctctgacatcagtacttctatacttttcctaccacacagagcagtattgaatcaggaggtgatgaggctgcaaagaaactaattattattattattattattattattattattatttttagagatagagtctcacacggtccccaggctggagtgcagtggcgtgatcttggctcactgcaacctccacctcccaggttcaagccattctcctgccttggcctcccaagtagctgggactacaggcgcgtgccaccacgcctaggttatttttgtatttttagtagagacagggtttcaccatgttgaccaggatggtctcgatctcctgacctgatctgcccacctaggcctcccaaagtgctgggattacaggggtgggccaccatgccaggcccgaaggaactaatttttaaaaatattcactgatcagttgtccttgagaagacttgaagcatttcactattttaagtcaatctcaaatttgtcatctgagcaaaatagaataaagatgccactgaacctagaggaaagattaggtaaccaggaatcctactttcaggtttcctttatctcttctttttatgatctctttggagtctcagtcccaagtcctgcactactctccatggtcatggagcactctgatactgtttccatctaaaaaagaaaacaactccgagaagaagggggtagccagagctcttccttggaaaaggatgacttaaggataatttgaggaaggaaaaaagactttctttctataaaaatctactattagaggccactcttttcttttcttttttgaggcagggtctcactctgtagcccaggccagtcttgaactcctggcctcaagcaacgctcctgccttggcctcccaaagtgctgggattgcgggtgtgagccattgcacctggcctagagtcactcttttgggttaagacgttctctctagaaagcctccgttaattataggtaaggattgatacattgacctattacctcaactatgatttcagcaaagataatttcactatcccaatcagctgttaacttagaaagctagacttttatggtgttaaccacacacacatacagacgcacacacacgagcagctttgggtcttccaatcctatacttagcacattgtagcacaaagaatctccttaatatatttttattaagttaataggtgaataggaaaggctgtagtgtgttatacggggaaatagactcaggtgtgtctagatattaaagtcggtatattaaggttaccaagcgtgaaagattttgatggaagaatgaaaacatccatgtccaggacttccagtttcatttctcagtcactaatttcaagtcaccaaataaacaaagtgaaaatgggtgaaacgtactttgagttacaataagtttatcttaattcattgacttttcaactgctcagatgtcttaaaattttttaaaaagtaagttgttatagtaaagagccacacaaatactcatagcagaggaacaatttctggattatgtcggtgagctttttaagggtttggggaggatgagaataaaagggtgactttttattttcagtttttctatctggatgtgtcaaattcctgataacttctaacactcagcaatggaaatttagaaggtgcctgaaagaacaaatagaattttcagacctggagaaattctagtaatcatcactctgggacatattattaaaattagtattttaaaaaagaaaacaatctttcagaaagacaggaagtttaggagccaaagccagaggccctaatacaaatcgcccccacctccccatccccccatccccaccttcttccccgccctgttcaaacacgcccacagcccaggaaataatgagacccaagtgatccagctagatagaaaaagtagtttgcttggcatctcccaaattatcttgagcaaacaataaaataagaaatgtttcagaagacaattcggctcccaggcccaaaccaaaactcgaacctggtactttttgtaagtgcgggccaagaaaggggctgtaaagttaaagagccggtggcgcctctgaacacacccgggcagggcgagcaggatgtccttgtccagggagaccccttctcctggctttgaggaaggtgctccctatccccgcgggttcctccgccaagcgggacgccgcgccgggcgggtgagagaaagcccgggcaggagagcacagagccggcgactggacgcgagcgcggggcgggtggagagcgtctctccgggcgccgctgctgttgtcccgggtgctgaaaagccgggaacttcccgggaagcagcggcacttttctccctggaaggtgggtgtgggggttccagactgcgcacctgctaaaccctcctgggtcccccgggaggggtccgccagatgtgccccttcccagccccattcgggggagaaggatgggggcgggggcgtgggggtgagcacagccggacaccgcaagtgggaacctggggtgtccttccccgcagctcccgggcagccgcgcgccgcgaaccccggtccacctgcaagcaaggcgggccgggggcagagggcgccgggctgtgcgggggaaccggcccgcgtcccgggattggggggcggtggaagagagagcgagcgggcatgcgcagtggggcggaggaggtggcgatggccgggggaggcggggggactgctgtttatttgcagctgggccaactccgcggcgcaggcggcggcggagcgcggggagctcgcggcgggtccagctgccgcagcaccatgcccgagcccccctccgggcagacgccgcgcgccgccggggccccggtaggggaggatgccagacgcccgggagaggccagggcagcagcggcggcggcggcgcgatggtggtgaccacctctgcccgaggcggcggcggggaccgcacaccctcccggcggcggggctgcgggctagcgccggccggggccgcggcgctgctggccggggcaagctgcctgtgctacggccgctccctgcagggcgagttcgtgcacgacgacgtgtgggcgatcgtgaacaaccccgacgtgcggcccggcgccccgctccgctggggcatcttcaccaacgacttctggggcaagggcatggccgagaacaccagccacaagtcctaccggccgctctgcgtcctcaccttcaagtgagtccctcacctcgcgctagccgccgctgcctcctctaccctccgcccgtccctcggaccgggagaagttgcgggactgacttgggggcatttcatttttgccgccctttccctccacgcctccctcctctccaggatgtgcatggcactttgctccgggatccactgcccggctaatctgggctctcggggcggttcgggaggcgccggctggggagttgggatcgagtttctcaactgtctgccctctcagcgggcttctctctcgaggcagggctgggagcgggctggtgaaaccgcctccgcaccccttcgcctgccggatcgtgaccaagtgggactagcgcggacccagagggttccggaggggtggcggtggtggcgatgcttccaagtagagaatttctcggaggctgttgggcagctttgcagatgagaagtgtatcagccccttaagggtttcgttcagatgagacgaggcgggagccttgagctgacagggctgcgtgggttcaggagagggagcagaaaactctcccgagccccccagcccccgccttgcacccttggctgctcccagaggctctccaatctgccagacttctctggatctagactttagaaggtgcagagagaggtaacgcagagcctaggcttctccagggaccctggggccccagccgaaatagtttttcttttacaacctcggagtcatgattcagcgtttctggtgtgaataagcgtaaagggaaccgagaatatgccaggtttttgaggggtggagtattttctttaatttgaaaagaagcctagcttctgaggaaagaagagaagtgctcatttaagggaaatgctatcttacacaatcaggagcttgactcaaccctttataatgtggctcagcattgaagttcattttaacgcgccggtcaaaactgttgaaataatattggtgcgctattatcggcgttttaagcctttttgcaacgggtgtaataggaacccgtgtttatggtaatgattatttgagactgggttggcagcttgaaaagcctgctctggatgagaggctgaggcctcttgacaggtgtctctgatgactcagaaaaggaaaccatagcaatcggcaacaattcatgggcttttgacttacgtcttccactgaaagtttaatgtttttaaggagagtgagaaaattacatatttgactttgaagagaatgtgttatagacatttgttctcttagaaagttgttctcgttttctactgaaagataaccttggctaacctcgctattcagtttcccagatgtttcttaaaatctccttgggacaaatataaatgtttcacttctagattgacctgctttttcattattacagtcagggttgttggttaat

SEQ ID NO: 6121 - DNA, 6000 bp, Homo sapiens
tttagtttatgtcaaccctgctaggactacatgaaagctccagttcttctgggctgcactgatgaaggagtgagtcagggtctcaggcgggtgcttctccatgagacaccagcatttcacccaccttatttcctttcacctctccacattgataaagaaatgctaatgggagaccatatgatgccatggacaagtgtatttggagccagaaaactctgtcatatgtgtgcaaactctgctatatgcttgcagtgggaattgaatgaattacagcctcttttaggcaattttctttgatgcaagaatgagcgtaatgcccacttcatagaggatttgctgtcaaataatccgtatacacaaatgctttgtaaactagcgaatgttctacatgctagtagtatttttaatattgtatgcggttcattaatagaccaacaggattcttgtatagagacctggagacctgagcctgatgcgtggtcagcagtcagttcatgcctcctcaatgaatgttgaacctgtgctcaatgagagaaagtatattggtttgaaataaacatgttaaatcctttatagcgagaaagataccttaggcaaaaaaatgaacccagtatttattttgcagaaactgtatttccttttttgcagatatatgggtaagaagttgctaacattctcagacgttgaactccattttccctgctctgatgaagctctctattaataagattactatattaatggcacatgtaaaaggtcagaaagacaatgacatttcagattcactttatactttatccatggtaacaaaaattctcattttaactatgttcattgtagtttaatgcaaaataagaaaaaataagctggcatagcttcaggaggatgtttctgagtgaagggaatgcctgtagcactgggtgctgaagagggctacaaaaaggcagaatcttccatctttgcccctcaactatatgcctggacaactgcaagtctagcagatatcttttattgggttgtagaaaagtatatggttgccccaggccgaaatgaaagtataaattcaagtatttccagattctaaggcattattttattatcaggctgatttcttaaaacccatagaatccatttattttaagacctgagtgctagggaaataattatagacagacatagtcactgctcctgaggagcttctgttttagtgaggaggatgggcacattcatggacagttacagggcagtgtgccaagccccagtgcaatgggacacccacctggcctggggagggatgatatggaaggcttgtcacaatgagtggtgtctgctttgggacctgaaggatccagaggagttggagttcaaggacctgtgagagttgattccagaagatgaggtgagctagtcaggtgctgcggtcagaaatgtaaaacttgagggtgaggcaagtggtgtgaagatgatagaaaaggagaggctggggacagaactgctaactacactcagcctccattatgaacaagcacaagaagcccctgagcagagggtggaggtggagcaaatgctaagagaagcagggcagccaggaggaaggcatgtagccttcatggaagggtgctgcctttctttcttgcagctgcttagttttgtttccctaagaatcttagttctattctgagttttctgtctttgaattattctgggaattttgtttttttaattttccataggttattggtggtacaggtggtatttggttatgtgagcaagttccttagtggtgatttgtgagattttggtgcacccattatccaagcagtatacactgcaccatatttgtagtcttttatccctcgcccctctcacactcttccccccaagtccccaaagtctgttgtgtcatttttatgcctttgtatcctcacagcttagctcccgcatatcggtgagaacatacgatgtttggttttccattcccgagttacttcacttagaataatagtctctagtcccatccaggtcactgcaaatgccataaattcattcctttttatggctgtttagtatttcattatatatatatatacacacacacacacacacacacacacacacacacacacatatatatttatatatttatatttatatttatatttatctataaattatatatttatatttatatataaattatatatttatatttatatataaattatatatttatatttatatataaattatatatttatatatatttatatgtaagtatatataaatatatatttaaatttatatatatttatttatatatatttatatataattttatatttatttatatatatttaaatttatatataaaaatatatataaatatatataaatatataaatatatataaatatataaatatatataaatatataaatatgtatataaatatatataaatatataaatatatgtgtattataaatatttatatatatttattataatatatatttatatattatatatataatatataatatatataatatatataatatatagatatatattatatattatataatataacatatatattatatatataatatatagatatatattatatataatatataatatatatttatatatgacatatattatatattataatatataacatatatgtgatatatattatatattttatattatattatatataaaatatataatatataatattttttatattccatcatatatatattccatcatatatatgtgatatatatatatatatcacagtttatccactcgttgattgatgggtatttgggttggttcaccatagcattgtgctattgtgaattgtgctgctataaacatgcatgtgcaagtatctttttcgaataataacttcttatgttctgggtagatacccagtgtgggattgctgcatcaaatggtagatctacttttagttctttaaggaatctccacattgttttccatagtggctgtactagtttacattcctaccagcagtgtagaagtgttccctgttcaccacatccatgccaacatatactgtttttgatttttttgattatggccattctcccaggagtaaggcggtatcacattgtggttttgatttgcatttccccgatcattagtgatgttgagcattttttcacgtttgttggccatttgtatatcttcttttgagaattatctattcatgtccttaacccactttttgatgggtttttttgtttgtttgtttgtttgggagtttttttttttgagatggagtctcgctctgtcacccaggctggagtgcagtggcgcgatctcggctcactgtaagctccgcctcctgggttcacgccattctcctgcctcagcctcctgaatagctgggaccacaggcgcccgccaccacgcccggctaatttttcatatttttagtggagacggggtttcaccatgttagccagaatggtcttgatctcctgacctcatgatccacccacctcggcctcccaaagtgctgggattacaggcgtgagccactgcgcctggcctattttttatttttcttactgatttgtttgaggatttgtttcaagatttagagccgcttttagcagttcttgtagtgatggcttggtaattgtgaattctctcagcatttgtttgtctgaaaaagacttttttttcttcatatatgatacttagttttgctggatacaatattcttcactgataattgttttgtttgaggaggctgaagataaggccccaatcccttctagcttgtagggtttctgctgagaaatctgctattaatttgataggtttttccttaaaggttacctggtgcttctgtgtctcacagctcctaagattcttttcttcgccttaactttggataacctgatgacaacgtgcctaggcaaagatctttttgtgatgaatttcccggtgttctttgtgcttcttgtgtttggatgtctagatctctagcaaggacaggcaagttttcctcgattattcccccaaatatgttttccaagcttttagaatcctcttcttcctcaggaacactgattattcttaggtttggtcatttaacataatcctagacttcttggaggctttgttcatattttcttattcttttttctttgtctttgttggattggattaattcgaagaccttgtctttgagctctgaatttcttcttctacttgttcaattatattgctgagaacttccaaggcatttcacatttctaaacatgtatccaaagtttcctgaagttttgattgctttttcttaagctatttccttgaatatttctcccttcacttcttgtatcatattttggatttccttgcattgggctttgcctttctctggtccctccctgattagtttaataactaacctcctgaattcttctccaggtaaatcagggatttcttcttggtttggatccattgctggtgaactagtgtgatttttttgggggggtattgaagagccttgttttgtcatattatcagggtcggttttctggttccttctcatttgggtaggtgctgtcagagggaaggtctagggctgaaggctgttgttcagattcttttgtcccacggtgtgttcccttgatgaagtactctcccccatttcctatggatgtggcttcctgtgagccaaactgcagtgattattgtctctcttctggatctagccacccattgaatctactgggctctgggctagtaccaggggttgtctacagagtcctgtgatatgaaccgtctatgggtctctcagccatggatactagtgtctgttccagtggaggtggctggggtgtgcaatggactccatgagggttcttagctttggtggtttaatgctctatttttgtgctggttggcctcctaccaggaggtggtgctttccagagagcttcatctgtgctagtatagggagggaccgatggtgggcagggccctagaactcccaagagtatatgccctttgtcttttgctaccaggatgggtagggaaggaccatcaggtgggggtagggctgggcatatctgagctcagaccctccttgggcgggtcttgctgtggctgctgtgggggctgggagtgagattcctaggtcactggaattgtgtatgtaggaggattacggctgcctctgctgagtcatgcaggttgtcagggaagccggggaaagccggcagtcacaggcctcacccagctcccacacaaaccgaagggctggtctcactcccaccatgcccccctcaacaacccccagaccgtaagcgatatgaggctgtctgcctcccagctgcataagaaaagggcttggttcttccctagcctgtggagtctgcacatcagatttgcaccctcccccgagttctggccaggaggcttctcaccccgttcaaactgttacaaagttcagctagagatttccttctctctgtgtagttttatcccctgcttctctcccattggatccctgtggttccaggcaggaacggcctgccaggggagcccgcgagctcccagggcctttctgctgcttcctctaccccagtatttcacttggctctccaaattgactcagctccaggtaaagtcagaaacttctcccacaaacagaccttcagcttctccagttgtgggggacgtgtttgggagaggagggtctccctttcccacttccactgttggggcattcacagttttgtggggggtctcctgggtccttaagagggtctgtgggtcctcttgggattgctgatttgttcttgcaatcaatctggagctaaaattcacaatgtgagccccccctcgctgctctgtccacagctgcatctgttcctgcctcctgtctgccgtgatctcaccatacgtctcttctgggaattttaaaaatagtctccgcctttaa

SEQ ID NO: 6122 - DNA, 6000 bp, Homo sapiens
tactctagattgtctactggataaacagaaaaaaatctgtaccattactgactctatttgttacatgtaaataaatgcattgactattacagagatttggttgtagggtattaataaacagactgcttgattaaaacaagtagactccttttctggctcattctttgatctatttcattttagttggtttggttcatggagatgctgactaaggagcatactccaaactcttgatttgatcttcttgatcattataattgtctctctggcacactatgttccctcaaaagttttcaatggttacatacagccatttgtaaaatgtcaaatggtctctctttaattgagatgacaaaaactcaaaaaagagtgttctcataaagacatcataaccaataaatgatgtactgagaccaaaaccctaaaataatggtaactgagaatggcgttaaaagcctaatggtcacactcacctaagtaaaatcataaccaaaaggaagaaactgttaaacaaaattaggagatgccattattttggactgagttcatacaataggccccagcagaccagaccaaaccaaaatagagtcactcatgctaagtgtgacataatcaaattaaaattttttaaaaaaatcctaaacaggtaagtcctaaaatagacgcgaattttctttctgccctccaaaaaacaagagattccaacacagagaggtcccctgtactctctttcaaaaaaataacctaaaaaaaccatcttacaaagctcactgttctgctatttcccagtaaaacttaagaccaaataagtgcctttacgatagtggtagagtgaaatcaatgcctacagttttggttcacctctcaattttgaggggagcattgttaaatgtagcctaaaactgcctccttacatattttaagcttgccctaaaagtttctctgtacctagtaaactgtaacctaactggatgcataaacagaccaccttgtgcctatttctctcctaccaatcagccaatcaagacagccagctgttcaaactatgttcaagtgagacaaacactgagctgtaaccaattcagccatttctgtacctcacttctgttttctgtaagtcgctttcctttttctgtctgtaaatcctccctgaccacatggcagtggcaaagtctccttgaacctgttctggttcagggggttgcccaatctgtgaactctttcttgctcaaataaactttgttacatttaatttgtctaaagtttttcttttaacaatggtgttcgtgaaatatttgtcaaggaaagggagggagggacaggttggatggatgaacagatggacaaatacccaaaagtgtaactgtttatgccagtcatgtttgtttatttccaaaaatactgcttttattcagggctccccaattccccattggcccactgaaaacctagcttctattctctgtccccatgtagctatgagattttggataagtaaggataaagaccagcatgataaaccaacgtgctgaccatgtgctgagcattgttctaagtgtttcaaatgttttaatagatttaatcctcaaaacaaccctataagataagtatgattgttgtccctgatttacagttggggcacatggtgggtaagaaaggtcacacagacagtagatggtggggcttggatttgaatccacgcagtcaaatcttgggagcctcgttcttaaccactatgtcatacttctatagccattgcagtaaatgcatgtggaatgaatggatacatgaatatacaccctatggtactctctagatgttaattttctcaggttgttatataatttctgttctgcctgtcttcattacacacacacacacacacacacacacacacacattgtcagtccttcaatggacgagagcttcagaaagcttctcttcaatagattgaaaggaaatattttgagactttaattcatctttaaattttttgaatttgataatttgttgagtttggcaattaaaaaacatatatttagagacatggatccttatttttgctggagtgtggatgaagtttgacaaaccacaccttgttccctaatgttacttaaatgtaggaactcaaatagatggcattggtcattctacagagtgtaaagtatatgtccctttctgggtcaaatcagatttgggcttcttggcttattgttcagccctcaatgtaaatatctaaacacataatcacaagcttaaggtgccacgtctcaggaaattgttgctctacattcctttgtcatgtgtctggttgaatgcttggtaggagtaacttgagataaggttttggaaaatgtccatactcagggcatatatgtattttttaaagctggcatgtgctttgtgccaaatcatcttattttacatgaccatcgcagctgtactaggaaaagatgacattttgttaacttgtgggtaaataagtcttagtatctgggaacctttgattaattaatttcaccttctgtatagtaaaagtaagtgtgacataacagtctctaatggttgtgaaaaatatgcctaaaagggccaagtgcagtggttcatgcctgtaatcccagcactttggtaggccaagacgggcggatcacttgaggccaggagtttgagaccagcctggccaacatggggaaaccccatctctactaaaaatacaaaaattagctgggcatggtggcacatgcctgtaatcccagctactcagggagctgaggtgggaggatcactggagcccaggaggcaggagttgcagtgagccgagatcgccccattgcactccagccaaggcgacaaagtgagactctctgtctcaaaaaaaaaaaaaaaaagaaagaaagaaaaagaaaaatgtacctaaaaagtaactcagaattactaaagtttgctaaagtgaatctttagacaaagagaacacaagggcaattagaattggagccctagaatgagagatgtggtgatcgacctgaaccttgccacacaggttggaggtacacccttgaggggacatataaacctgttggagggagcagctcagaggtggaaagcatggactgagtatgggaagtagccaccagtctggtgggctgtagacatacttcaagtaatgaaaggatagggcagagccctccccaacatctgcatctgcctcccctctctacttccctcaaaaacttcccaaaacaagcagtacagtatatagataaaaagagagtcatctatccaaatgcagctagaaaacaaattccccagactgccctgcctcccaaccacattgccacctctgaaaacattccaccatttttgcatcccccgttttcgtatggagagtcaccggggtgaagggcatcctattcgaacaactattttcagtcctttttccccggtaggcgtgcatgttgtacaggtccatatccttccaaaggtcccatttgagaaaacatcatctttttcgccctaagggaactaaatacagatatgaattttgggtattttgtacacagttaatattgcctttaattcaaacaaagttcatagtgccttatctcagtagcctgttgtatattaggtgcttagtaagatttattttttttttgcttttcctgctcctaatattcagttattgttggttttagaaagctttctcacttattttgtttgtttctttctttttaaaggagcggtttaaagaagctgaagaaatataccaaactggaataaagaactgtccagacagctcagatttacacaacaactatggggttttcttagttgatactggtaagtgaaattaaagagaaactgtactgctgagattagctaatacaatttatcaagcaaaatggaaggcaaataatcctcagaagtaaaattcactgggcttggcaggaagctcacactattgacagtcattatacctcggggctgtcatttctctagatcttcaagctcgattcagtaaaatctggccattctcatactcatttctctatggaaaactccccaggggacaggaagtagccttatgatttaataagtcccaatcttctttgaatattatttatatatatttataaatccatgatgatgaaatgtttctctacaatgatgcaaaacctgcctctgaaagcagttactggcagatggtaaatacttttctataacatattttttaaaagcctccagaattgttccatcattccttccttgatgtacattagaaactgcattattaaaattgatacaatgctcttatatgacaggtgctatataaaatacacttactttatcttacttaatgcaaaacattactgggcatgaattctcttttctttatgacttatgtagtgcctctgtactgttggcatgcaatgtaagtaatgaaattatatttaaatgtaaggccaaagcaccactttgttcttgttgattactagactagctgccctgcagcaaaatttagtttaattagtttttcaatatgaaatgcttaaaggggttttattttcaaggatatttggagctctcttgttttacagaatataaaatttacattctgatacatctaagaaacttaccttatttttgcctgtgtaaaattgttgtgtagtgccacctgctggttcattggccacataataataaactgtcttaaaaatataaaaactagaagaaacctctagttgggcaggtctaaccctcctccttttacttcaacaacagtcccaccccaccacacccctaaaaatgataactctgtgaccaccctatgacattgagcctctgcctccagagacagaggctcctagggacctcctagtcaaacttgtattcaaacagatacgcttgaaaagatttctgtgtagataatagacattccattctatttagaatttcacagtgttctaaagtgtagttactgaatatagtttcaccaggaagctactttgaagaaacctatcagagtagagggccttcattctgcttctggccttactctcacttgccttgggatctttatcaagtctgttgaatatctttgcactttagtgtctatatctgtaaagtggaaaatttttgtgtgtggttttttaaatatctcttaaatcctgataaacagctaaacagtatcaaaaggcagctaaattgtataaaaaaatacctgcaaaaaccatacaaatgtaagtatttaaaaatatataatgcattggacaagtgcatggtggcattattatgttgtaagtcttattaattaagtgccattcaaatgaaagtgcatgattttaaaagagattttcactatagagctgatatgtgttatttaaagtaatgcttcaattgctatgttgaagtatagttcattgagacagacccttagaaattgcttctggacagttttatttctacagtagcctgttctattttttatataatgagagccagttatatcttggataaataacaatcactaataatctgaaggcatcctattagcaagagcgatgaccagaaaaatttcgactaaaataatatatataattaaaacaataggttttagtttttactgcttttttgttaatttttttggaagtatgaatgaacagtgaaattgttcaaagttaggcaatggccaggatgagaagctgaaatgcaagctaatttgcatattgaataattttggtataactctgtaataatgagaaagaattataagtcagaagagaaagtgaaatgttcatgtcttttataaaaaggcatgttctgctcttaccaacctgtcactggttacaggcttaccagaaaaggcagtggcccattaccagcaggccatcaaacttagccccagtcatcacgtggccatggtgaacttgggaagactctacaggtcactgggagagaacagcatggctgaagaatggtacaagcggtaaagttccctttctt

SEQ ID NO: 6123 - DNA, 6000 bp, Homo sapiens
tcgagaccatcctcgctaacatgatgaaaccctgtctgtactaaaaaatacaaaaatcagccgggcgtgatggcaggtgcctgtaatcccagctgcttgggaggctgaggcagaagaatcgtggaacctgggaggtggaggttgcagtgagctgagatcgcgccactgcactccagcgtgggctgcagagcgagactccgtctcaaaacaaaacacaaaacaaaattgtttctcggtcaaatcctccagcggtgttcagtttttgggcgtgcagtgctttctgcagagttgggaagactcactggtttctaccctggccctttctggactgcaccaactgaccctggtcagggcagtgacgcgacccgagcgcgggcaccgcggttgcagtgcggactcctgcgcggccccagtcgggcggtggtgcggctcccggcgggcagactgggcctggcacgtaacccgccccctgccctgggtctgcaatcagtcgtgcccgccacggagttagccgaagaacaaaaaccactctgtggcagcatccccgagccacaatagggctttgtgcggcccccgccccccaaggttaccccgctgggctgagggggctcacaggccgctccccccggcctgggcccgactcccagctgcgccccgcgtcggactgtccaccgcacgggtcgcaagaggggctgctacgggtgggagggggccggcgatcctgggggggctcgggttacgagccccctccccaccctgacgccactcccgcccccgcccaggtgcgaaatctcctgccctccggctgggcgcgcgacttcaaaggcgctttgaagaaatccgagttccgaagacttctttagtgggctgggggctgtgacggaagagacccgggagagggggctggggcagaggaaaggcggggggcgccttggagctggtctgagcgaggcggcggcctggagtggaaccccgggatcccgcctcaaccccgccgggcgggctcctccggaccccccagagtctggccctctcgcctcccggtctccgcctgtccggtgccagctcccgcccgccgcagcctcgcggtcctcccctccccaacccttcggcccctttcatcttccctagactccgcttggggttttgctggtttctgggagataaaaaccgcttcaaatagcggcggcgcgctgccaggacaaacagggccgggcgggccatgtgcgcctggttaccggccccgggtcgggacgccgggctccagcgggcccgggaaggggtagcgggcggagctccgggcacccaggctccggtgacgactcccaaagtagggggccccttttagaagcggcctgcgcgctctctcggttcccgcccaggtcgtagggaggggccggcggagaccgcccgctaagcgctcggagcccatagggcgtgggtcacggtcgctgcgttgcctggccagccgcgccccctggtgaagttactgggtgagcgcgccgggcctggacttgggcctttctagaacccgcaaatggtgaaaagcgttccacaaacgttaaataagcagtatggaggaggggacagtacttgtgccaggccagggcgggggcagcgggcggaacagcactgttccttctctccagttcaccttacagggtaagaagcaggcacctaaccgatcattataacctgatggtgaaaatcgaggtttcatcgaaggatgcaagttgcaggccggagtgatttttcctaggggtatctgggtttggatggtgttacgactaaggtacaaacggaaactatcgtgggtcctcagtgctctccactaatctgtcagtcaccgacttcctctccctcaaacctgcccacttccccttctcagggaggctttcccagccaggttccccaaaccatccccagtgtataccttatgttcttcaagctttctgtgacttcccaggtgacggtgaactcacataggaaattaaatggggctatgggaaaaggttagagcaggggtcgcgccacggcccgtcgtgtcggtggcctgtaaaggaaccgcacagccggagacgagctgagcaagctgagctccgcctcctgtcagatcagcggcattagattctcatagtagcgcgaactctgttgtgaactgcgcacgtgaaggacctaggttgcccgctttttatgagaatccaactaatgcctgatgatctcaggtgtaacagtttcatccccaaaccattccctcccccgctccccctggaaaaactgtcttccactaaacctggtgccaaaaagttggggaccgctaggttagagccttgctacttaaaatgtggtctgtgcagtatcagctggggattctttggaactatagcctctgagcgccaccttaggagatgctcaggtgattcctatgtcccttaacagttgagaagtactagattagaggagatccacttgccttctcaggtgaagtgcattttcaggagactctggagccctttgttttctgacctggtaataactctcttggggggaatttttcaggtgaaaaagaagggcagacacggaatccagaatactagaactaaatgccccctagattattcaatgagactggtagctcttgggagtggggacagccttctacatcttcaaatcacttaacatttgttaatgaactctgaccaaggtcacctagttgatggcacagttatagctattaacctctgacatttgtttagcactttaaaatttattaaatagcttcattttattattttgtatggaaaacaaccatatgaaataattaggacactgcaaatgagaaaagtgagactcaaagaattcaatgttttttccaaagtctgtaagaggggcccccattctctttctttctttcctttctttctccctctcccttccctcccatttttttttgttttgttttgttttttgtttttttttttttttgagacggagtttcgctcttgttgcccaggttggatggagtgcagtggcgcgatctctgctcactgcaacctccgccttccaggttcaagggattctcctgcctcagcctcccgagtagctgggattacaggcatgcaccacaatgcctggctggttttgtattttttagtagagatggggtttctccatgttggtcaggctggtctcgaaatcccgacctcaggggatcagcccacctcagcttcccaaagtgctgggattacaggcgtgagccaccgcgcccggctctttctctctggcttgcttgacagggtctcgctctttgacccaggctggagtgcagtggtgctatcttggatcattgtagtctggattctcctatctcagccttctgagtagctggactaaagacgcttgccaccaccacgctggctaacttttgaattttttgtagatacagggtcttgctattttgcccaagctggtcttgaactcctgggctcaagagatcagcctcggcctcccaaagtgctgggattacaggtgtgagctaccacacccagccttacttttattcttaagtgagaataactggtttgggtgtatctaggtccaatctctctgtgactcactttcctcatggtgacagaacagcacccaccttatggggttgtaaagattataaaagcacttatcgtaacaagtgctcaggaaatagttttgcagcccggcaaggtggctcaggcctgtaatcccagcaatttgggaggccaaagcaggcagatcacttgaggtcaggagtttgagaccagcctggccaacatggtaaaacctcgtctctactaaaaatacaaacttagctgggcgtggtgaagcatgcctgtaatcccagctactccagaggttgaggcaggataatcgcttgaaccggggaggcagaggttgcagtgagctgagatagcaccactgccttcatcctgggcaatagagcgagaccctgtctctcaaaaaaataaaataaaataaagttttcctttttgagacgaagtttccctcttgttacccaggctggagtgcaatggtgcgatcttggctcactgcaacctccccctccggagttcaagagattctcctgcctcagcctcccgattagctgggattacaggtgcccgccaccacgcccgactaatttttgtatttttagtatagatggggttttcagcatgttggccaggctagtctgcgaactcctttcagatgatccacccacctcgacctcccaaagtgctgggattacaggcgtgagccaccgcgcctggcaggaaatgttagttttccaaccgtccccacctccctttccaggacgcctaaccgtgtgggtgcagcactgttcctcctctctgaggcttttccctcagctttccagccagctgcctgtgacatagcctgtattttcctctgggtgatccacaggcctgggaggattaatttggtacttccctgaatgtggcttatttcgggctttctaagcgctaagatagtgagtgggagaaggtgttcgggaattcggagctgggaaaaacagtagtctcatggaaaacaacagaaaaaaaccccactccagcctggtaaccaacggttggccgggggacgtgtccgcgctgctccccctccggccgccagggggcgcaggaagaagctttggaggtctgtcccgggaccgcgtactcgtccttctttcccgttagtcttttcttcacttccgttgagttccgcctcgccgtttgtcccttgcggtacccgtccgcatacgaatctagcccgggaaccgagttgcgggagtgcggtctgtgccgttccggccaggagtttgccgactgcagacgtcctgcgaaccggcaagatgtgctctctggggttgttccctcctccaccgcctcggggtcaagtcaccctatatgagcacaataacgagctggtgacgggcagtagctatgagagcccgccccccgacttccggggccaggtggccagggcgaggagggaggggacctacaggcatgggggcggagtcggggactactggggaaaggaggcagtgtgacaggggcagggtcacagagtctggcggagtggaaacagcttggccccggcaggaggctagaagggctggaatctgttttaggactgggattggagtataacgggggaacggttaaggagctgtggaggaggcctagagggaatggagagaatgagggagaatctagggagtgtgaggatgcgggagaactatctaaaagttggggacagtatctggggaggatcagaaggatacaacatggaacttttttccatggtgttcctgggaaggacaaggaagggaaactgacatttattgagcgtttgctatgtaagaaagaggctgagtcaggtgttttctaaaaatgtcatatggtttcataatcacagcaaccctatgaaatattattctagttgcacagatacgggagctaagacttgtttcccattctcacaagtgttagctttgtggaaatgggaaacagacctctggaatctcttatacttagcccagcggtgggttggagatggcacggaattaaagatttgggaagagactgaatcaccgtcacactcctcacttttgtgctatagtggatcaatcttcctgtcctacaactgacaaaggatcccctaaagacccctggaaggctggaccatggcacaagaactgccttcatccatcaccgggagcaagtgtggaagagatgcatcaacatttggtgaggcatggcaaagggtttcctgggtcacagtctgcagatcctggaaaatgagtcaacacccctttaccttggggtgttcttcaaaagacttttattcaggctgtctccacgagagctgtatatcctaaatcatatgaaatttttagtccttattatagaactcaaatgctcaataaatgtcaggttcccttccttgcccttcccagga

SEQ ID NO: 6124 - DNA, 6000 bp, Homo sapiens
agtgggaacattacattacatttaatttaaaaagacaaaatagagaaggcaattttataatatatacttattaaatacaattattttagcactctattcaaatacaaacttatcagtgactcaaaattgtagaaaattaacctctttacatctgtgttttttattcaggtgaatatactgagtaaaatagtgagtcgagcaacacctggacttcaaaaattttcaaaaacagccagtatgctctggcttcttcaacaggagatggtcacatggaggctgctggcttctttgtataggtaatggcgtctagaattcataagtgaaataaacataaggtaataaaccaacaggcaaattaatttaaaagttagggtaggtcgtgcttggaaataggttttgctatttttgatgcttatcatttcgaataccttagttgtcaagagtgagtcaagagggaagaggaagatatcagatcataaggctggtagttaccaaaattggatgtgtgtaaagacttaaggaaagtactaaaaatagtgcaatacttaggctaaattaagaaaagagctgaaagttagacttcatgtaatatggaagtttgaaagaagttaaccaaattttccagaaggcgaagattataccatgtacatatccttgaatctaggaattttatgcctagaaatttaacctaagaaaataatgagaaatatatacaaccacatatgaataaaacttttaaatctcaaaaaattaaaaactactactaaggaattggctaaatgaattacagcagctctgttagaaccagaataacttgcagccattttaaattagcacttgtgggctgggcacagtggctcatgcctgtaatcccagtactttgggaggccaaggtgggtggatcacttgaggtcaggagttcaaaaccagcctggccaacacagtagaacgctgtctctactaaaaatacaaaaattagccaggcgtggtggtgggcacctataatcccagctacttgggaggctgaggcaggagaatcgcttgaacctcggaggcagaggttgcgagccgagattgtgctactgcactccagcctgggtgacagagtgagactccatctcaaaaaaaaaataataatttaaataaataaataaataaccatttgtgtatattcattgacatggaaagatattcatgacatattgttatatgaaaactggatttcatattaatatataaatgatgtcccctctgccatttgttttgtttttgaaaaagagtctcactctgttgctcaggttgagtgcagtggcacaaccttggctcgctgcaacctccgcctctgaggttcaagggattctcctgcctcagcctcctgagtagctggtattacagatgctggccaccatgcctagctaatttttgtatttttattttatttttatttttgagatggaatctcgctctgttgcccaggctggaatgcagtggtgtgatctcggctcactgcaacctccgcctcccaggtttaagcgattctcctgtctcagcctcccgagtagctgggattagaggcgcatgccaacacgcttggctaatttttatatttttagtagagacagggttttgccatgttggccatgctggtctcaaactcctgacctcaagtgatccacccacctcggcctcccaaagtgctaggattataggcgagagccaccgtacctggcctaatttttatatttttagtagagacagggtttcactatgttggccaggctggtctcgaacacccgacctcaggtgatccacccacctcagcctcccaaaatgctgagattacaagcgtgacccaccgtgccctgcctaactttttttatttttagtagagacggggtttcactctgttgttcgccaggctggtcttaaactcctgacctcaagtgatctgcctgtctcagcctcccaaagtgctgggattacaggtatgagccagtgtgcccggcctgttgtcccatttttgtttacaaaaatacagatatacatatttgaaaaaataaataataaaaaatttttaaaaagaagttagccaaattttccttctctcagatgctcagtggcaagttcattatattcgtgtgaaataaggcttttttattttgtcttatttttccccagagacagaatacagtctgcattagaagaggaaagtgtattcgcagttactgtaagttttatattaattttttcttttataaatacatacaaattaaaatgttactaataggattttttttttttttgagttggagtttcgctcttgttgcccaggctggagggcaatggcgtgatctcggctcactgcaacctctgcctcccgggttcaagtgattctcctacctcagcttcctgagtagctgggattacaggcgtgccccaccacgcccagctaattttttgtatttttaatagcaaacggggtttcatcatgttggccaagctggtctcgaacttctgacctcaggtgatccacccaccttggccgcccaaagtggtgggattacaggcatgagccactgcgcccagccaggattttattttcagccttccatcttgagtttcttcattttaaaaattttacaagtaaataaaaagttcagtctcataaaataatcaaatattgatttatattagagagttagaggtaaaagtccctttttatcccactgactatttagtgtaacagttttggtatgtatcctaccagacatttttctatgcatctttatagatacatacatatatataaacatacactcacatacttgtatacacacacacatttgttttttaacatataatatgatttcatttatacattatactgagagtttgtttgttttttttttttgaaatgaagtttcactctgtcacccaggttggagtgcagtggcacgatcatggctcactgcaacctccgcctcctgggttcaagtgatacttctgcctcagcctcccgagtagctgggactacaggcttgtgccaccacgcctggctaatttttgtgtttttagtaaagatagggtttcactgtattgaccaggctggtctcgatctcctgaccttgtgatccgcccacctcagcctcccacagtgctgggattacaggtgtgagccactgtgcccggcttatactgagagttttaaaattattatttcttagattttttaaaatttatgtaggtttttaccatattttttcatagtatgtcagagtataaatgtactgtaattttttgagacattcagccggacatatttaggttgttactggtatttttgctgtagccattaataatgcagtaaatagtttggtgtagaggcacatgcctgtggtcccagcaacttgtcaggctaaggccagaggatcacttgagcccaggagttcaaggctacggtgagctacaaccatactactgcactctagcctgggcaacagagtgagatcccgtttctaaaaaataaaaaaaaagtgcagtgaatgtttttcttcatacatatatatgtgtgtgagagaaattctggacaagtaaacaccattcttttgcccttaggattcaatgctgtcttctacagcctccaggcctgggatcctgaaaggaccttgggtggtaaaactggccttggctggattgagggtttggggaagaaacatgcaaatagcctcagatgttttttaaatgcagcaagtaacatttctggatgagacttatttccaaaataaaccagctatatctgttttgaaaaaatatgtacacatatatgcctgttaaatcatcaagatcagatgcctttttggggtttaacttctttatattttctgtttttaaaagtaattcttttttttttttaagagatagggtcttgctctattgcccaggctggagtgcagtggcgtgatctcagctcactccaacctccacctcccgggttcaagcgattctcatgcctcagcctccctagtagctgggattacaggcatgcaccaccacacccggctaatttttgtacttttagtagagacagggttttaaccatgttgtccaggctggtcttgaactcctagcttcaagtgatccacctgttttggcctcccaaagtgctgagattacagacgtgagccaccgtgcctcgcccaaaagtaattcatatttgaagcaagtatatatagttaaaaaaggagataatgtatatttataataaatattttatgtatatctgttagactgcttttttttttcttttgtttctttttcttttttggggggtggccagcacggcggggacatggtctcactttgtctcacaggccagagtgcagtggcatgatcatagttcactgcagcctcgaactcttgggctcaagtgagcctcctgcctcagcctcccaagtagcgaggactacaggtgtgtaccaccatgcctggctaatttcttttttatattttatagagatggggtgtcttactatgttgcccaggctggtctcaaactccaaggctactttttcacttaaaatattttttaatatctttccaatcttttaatttgtttatcccacaaatacttcattccaaatgcacatgtaggaagactgtcatatttggctatttattgagctcacttactagttttaataggtttcctctggttttccaggcaattctgttatctacaagtagtgatgactttgactgtttttccatactttttgctaacttaattcttttcctggttttattatgttagttagacttttcaaagtaaagttgaataataatgaactcttactcctcatcttctggattttaaagggagtatctcactttacagttaagtatagtcagccgaaattccttatatgtgggttccacatccatgaatttaaccaactgcagatcaaaagtattctttaaaaaaaaaaaaaaaaaaaagaatcaccaagaagcagcttctctgttccttctcgaatctccgcctagctcagcctgcctgccttcactcctgcctccaccatgtccatcagagtgacccagaagtccttcaaggtgtccaactctggcccaagggccttcagtagccattcctacatgtgtgggcccagtgcctgcatcagctcctcgagcttctcccgaatgggcagcagcagtttccggggtagcctgggtggagactttggcagggccagtggtaggggaggcatcaccccagtcacggtcaaccagagcctgctgagcccccttaacctggaggtggaccccaacatccaagctgtgtgcacccaggtgaaggagcagatcaagaccctcaacaacaagtttgcctccttcattgacaaggtacagttcctgcagcagcagaacaagatgctggagaccaagtggaggcccctgcagcggcagaagacggctcagagcaacatggacaacatgttcgagagctacatcaacaaacttctgctggcagctgtacactctgggccaagagaagctgaagctggaggtggaacttgataacatgcaggggctggtggaggacttcaagaacaagtacgaggatgatatcaaaaagcatacagagatggagaatgaatttgtcctcatcaagaaggatatggatgaagcttacaagaacaaggtagagctggagtctcacctggaagggcttactgaagagatcagcttcctcaggcaactgtatgaagaggagatccgggagctgcagtcccagatctcggacacatctgtggtgctgtccattgacaacagtcgctccctggacatgaacagcatcatcgctgaggtcaaggcaccgtacgaggagatcgccaaccacaaccaggctgaggctgagagcatgagatcaaatatgaggagctgcagacgctggcttggaagcatgggatgacccgtggtgcacaaagactgagatctccaaga

SEQ ID NO: 6125 - DNA, 6000 bp, Homo sapiens
tgttgcccaggctggatgggctcaagcaatcctcctatctcaaccttcagagtagctgagactacagacactgttttaaagtacagtttgattacatggatttggcatgagctcagtccaaagcaatgctccccacatcaattttatttaacagaagatacatgctgaaaaatttaggggtgaagtatcataactacagctaactttcacatggttcagccaaaaccaaaaaacaaaaagacagcaattgtggtgaaatattgtatgttgaggtctactgtactattttttttttttttttagaccaagtctcgctctgttgcccaggctggagtgcagtggcgtgatcttggctcactgcaacctctgcctcccaggttcaagtgattttcctgcttcagcctcccaagtagctgggattacaggcactcaccaccatgcctggctaactttcttttgtatttttagtagaggcggggtttcaccatgttggccaggctggtctcaaactcctgacctcaggtgatccgcccaccttggccttccaaactgctgggattacaggtgtgagccactgcagccggccttactgtactattcttatataagcttttctgtaggtttgaaaattttcaaaataaaaagtagggagggggtgagcaaggtggcttatcatcctaggactttgggaggtcgaagcaggaggatcacttgagcccagaagtcccagatgagcctgaacaacatagtgagactccatttctacaaaaacataaattaaaaaaattagcaattagctaggtgtggtagtgcgagtctgtagtcccaggtactcaggaagctgaggtgggaagattgcttgagcccagaagactgaggctatagtgacccaagattgcgccactgaactccagcctgagtgatccaaagagcctgtttcttttttcttttcccttttttttttttgagacggagtgttgctctctcgcccaggctggagtgcaatggtgcagtctcggctcactgcaacctccgcctcctgggttcaagtgattctcttgcctcagcctccagagtaactgggattacaggggtccatcaccatgcctggctaatgtttatatttttagtagagatggggtttcaccatgttggccaggatgatctcgaactgctgacctcgtgagtcgcccacctcggcctcccaaagtgctgggattacaggcgtgagccactgcacctggcccaaagagcctgtttccaaaaaaaaaaaaaaaaaaaaacttggggtggggtggtgggggtacaaataatgatatttgatgcctcagctgttggggataagggaggtgaaggatgctctggagcaaacagttggagtttgagtgtctttgggaaagacgcttcctggccttcagctcctgaggagctgtgctatcccagaccttttctccagtttcttaacaattccaagatctcctgatgtgcttccagtaaattcccttttgtttaagttaaccatagtcaatttctgtcattgcaaccaagaatactaaacataaagctaccatgtatacaatatacaccacataagaaatttattccacatccttttaaggtaatgaaatgaatatgttttgaaattttggcagggttgctatggtgttcatgcctactaattaaatgtgtcaaaagtgaaacccagtgcactttccaaaaagttttccatctttgcatatgaactgaacacagggctaatttttttgccccaaacacagggctaatttttattgtgtgcttcatggtcaatcacctcaagtacacttcaagtatactacacgaataaaactcattggaattcaactgctgagggacacagagcaagaacatgaaccacagatcatactttgaataaacttgccccagctctgattaggactacatttcactttccataagaaaaagtgaacttgtatacaggaaaattaggaggtgggagaatgagaccatgccagggcattattcttcagaaaggttattaaaggagaaaagtaacatttcaatgacctgctatgtacagtgtatacagttgatgtctctgttttttttgtttgtctgttttgtttttttgagacaaagtctcactttttcatccaggctggagtgcagtggcatgatcatagctcattgcagcctcggcctgccaggatcaagtgatcctcctgcctcagcctcccaagtagctgggaccacaggcacgtgtcaccacacgtggctaatttttaaaacttatgttagagacagggactccctatgacatcttgtttaatcctcacaacaccccctgacaaaggtattgttttctccactctacagatgaggaatctgcaggtgcaggggggttgaacctagatggagcccaaagcaatgtttttatcaaaatgccatgttgtctgagaggggataataaggtatgaagaggccttccggggaactatgcttcccagaattacagcagaacataaatgcctaaggcaaaacttccactgatttcctctttcccagctgaaaccatggagggtattgaagacaagaaaaagaagattcctgctgtgccagaaaccctttaaaaatgtgagggaaggctgggcactgtggttcatgcctgtaatcccagcactttgggaggccgaggcgggtggatcatgaggtcaggagttcgagaccagcctggccagcatggtgaaaccccgcctctactaaaaatacaaaaattagctgggcatggtggtgcacgcctgtaatcccagctacttgggaggctgatgtacaagaatcgcttgaaccggggaggcagaggtttcagtgagccaagattgcatcactgcactccagcctgggcaaaagggcaagactctgtctcaaaaaataaaaataaaacacatgaaggaatttcacagagctaaaggtcaagtgcctgagaaagaagtttgcccataaaatgctttgaaaagaaaggagaaggccaggcgcagtggctcacgcctgtaatcccagcactttgggaggctgaggcaggtgaatcacctgaggtcaggagttcaagaccagcctggacaacatggtgaaaccccatctctaccaaaaacgcaaaaattagccgggtgtggtggcagacacctgtaatcccagctactcaggaggctgaggcaggagaatcgcttgaacccaggaggcagaggttgcagtgagccgagatggcaccactgcactccagcctgggcaatggaatgagactccatctcgaaaaaaaagaaaaagaaaagcaaggagaaagctacatctatgaaaaagctaggcactgtcagatgtggtggctaacccctgtaatcccagcactttgggagacccaggtaagaggatggcttgagcccaagagtttgagaccagcctgggcaacaacataagaccccatttctccaaaatatttttaaaaaacgggggaggagaggaggtcaggcatggtggtgcgtgcctgtggtcccagcaacctcaggtactagggaggctgaggtaggaggattgctggagcccaggaggtcaaggctgcagtgagccgtgactgtgccactgcacgtaagccgggacaataggacaagatcctgtctcaaaaaaaaaaaaaacaaagaaagaaggaaggaaggaaacataatttaaaaaatcaagtccaaaaaaaagcaagcaagaagtaaaaaaaaaaagctcagcactgtcacaagaaatatatggcaagaaaagctggcaatttctatatacctgtgaaacccaaattgtcacttgccttaaggatcaaatgtatcaatggtgtgagcccaaaactctgttgcaacttcttcactttccccagatcttcaatggcagctttgttaaactcaacaaggcttcagttaacacgctgaggattgtggaaccatatatcacatggagtacctgaacctgaaatcagtaaatgaactgatctacaaattggttatggcaaaatcaataaacaaattaccttaacagataacgctttgattgctagatttcctgataaatatggcatcatctgactggagaatctgattcatgagatctatgctgttgaaaaactcaagttcctgtgatccttcaaattatcttctccacgagggagaatgaaggactacctattttgtattaataaaaggtataaatgccagcaacagaaaagactatatcaacaggcttattaaacggataaactgaagcatctaacattatttttgtaatctggtcagttaatagccagtcactactttcaaactggaaaaaacaaaaaccaaaacaaaaatgtgactgactccttcaagaccaaaatacaccactttttgcctagacggcactttgaaatagagggcaataccatcatatttcacgcttgcctttctactttttaatacaggtgaactttttctccttaataggaaagaacaccaagtaaagaacaaatagcagttatggaaaatagttgcaaaaactgcagggggctacagaacaaaggactgagtgtaggcagagagatagagatccccgaggtgtggggcagagcccacgcatctgaattccaagaacaggcgctttctgacagagaataccaggaaatgacttcacatttttccagactatcaacatacttcattcttcccagtaggagaacccagggcctgttccacgcccacagactttggtcaggcaaagcggccgcagggcgtctgggctaaacgcaaccaggaacacattggcaaacttttgcgcctgcgcccaccgggcgtgcacctgtaggctgaagtcgcgcatgcgctagatgggaacgttgtttcttctcccctaccccttttctgtgggtctgttttagggacagactgcttccgggtcgaagggcttgcttccggagagcgggaaggctaaaacgcggtagctaaactgcagccaactttggttgtgtgtggaaaaggctttagccatggacaggtcagtactgatggtggcagctgagcccgaagtcttgcccgtctcgcctgttggcgaaacgaaataggtgaaactagactcccagaagaagccaaggaggtcccgggtgcttcccctaaggctccttccccatgccgggaaatttggccacaaatggggaaaaagccgcttggcgtgcgtcggggtggggtacagatcataatagtcccttactttcccactacgttctgcgatctattcggcgctttggggcagcaacactgttcgctcctggggtgggcggggtaggtagcgcggcgttcgaaatgctaagtgaccagcctgagatcacaaagccagtcagtgaagatactgggatctcagcccagactttctgattacaagtgccagcatcagattctgagttccctctatgatctgggtactgtgctagccgcctacaacaaagatcagttattcaagatccttcccctcggggaattagttgtgtaatggagacaaccaagcagtgtaaagtggtaagtgtttgggggcgattaagtctccttgtcactgtaactatcaggaagacccctcaaagaaggtaactttctagctggtctttgaataataagagtacattattcgtactccaaacattgagtacctactatgtgactgccattgttctaaaggcgttgaatatatattattagcttatttaatcttcagaacaagaaaaatcctatgagatgggtactgttatccttttttcatatataacactgagactaaaagaggttaaggaacttgctgaaagttcggaagctaataaatacaagaaccaaattgccaacctgcatctgtgtgtctccagcctacctgaggctctttgaggagtaagtagttgttgaccaggtgctcaagggggcaaatgtaggtctttgtaaaagaagcatattcagaggt

SEQ ID NO: 6126 - DNA, 6000 bp, Homo sapiens
agatcctgggtacttctcagcgtccataatcatgggagctaatgcctcataataaatctttttctatatctctgtatatccatcctattggttctgtttctctggagaacgctggctaacaccatggcacttactgcttatgtgcaagattgttgaacattcatctctcctacttggctgtcagcccggggacaggagctgtgtctgttttgttctgtgctgtgctgtgtttccagtgagagggctggcctaggtgtttctccgaagtatgttccagctttcggtacctctttatttcttatttcttccttcccctgctctccaagttgacctaaatagtttttgcaccttttcttaggttcactgaatctccaagcagcgaggtgtatctggaaagacagctcaagaattaagggtgctcacccttaattacactccattttcctcaggacaggctggaacagatttgggatggcgagcccccaaaccagcactctacagatttcgggacccctcttaactcatttcccccatcctcccaatgacgtctattcgcctgcagcagacccgaaggaagcttcggctcaatggttcatttgcatgcgcccgtgctattggtcggaggggcggcaccgtagccaatggtgtgcaggggtgttgaccgagccgcagctctgcgccgccgggtgaggtaatggaatcctggctggacctgctgcggctccctccggactggctagtgacgtagcggcttccccggccccaccccgcccagcccggccgcccccgggagcgcagctggggctcggccctgttccttccggcccggcgttccggtcgcgggcccctcagggaggacccgccgggccagatcccatctctggcgacgcggagaaaaatctggaagccgtcgtcggaggatgaccaaatcctcgctcctctgggagtgcgattacgggcctctcacttcgtaaatcacgcaggcctgaaacgctcacatttgtttaccacgagcatgtttgattttgtaatttaacaaataaaattgcagaggatttttaagagccctggcctggatttaggggaaatctcgcattaattccagctctgccatttccggtctggagaccttggccactttctcttggggccctgacgccttccatggcaactaagtagagcaaacgtggaagtgcttcgaaaacaccaagtggggtctcctcatccttatgcaatctggagagtgtaaccccatctgggcggtgtctctggacagcccctgagccctgagacagccccaggaagacccgtctttgtgtctctattttttcggcccttaaattgctcttaagcctggggagaggtcgggggaccccggccaggtagttcttgatcctcaagaagaggaaggaaaccatgaagggaatcccttccacagcccctctccttattcagggccagggcctgagcaggggagccccttctctgcccaaatgccctagggaacccccttgacatccttttacccccgcccccgagggccaggatggaggtggagtggaagggtgtctcctaggtggggtggagtttcagatgctgtgagatggaagggcacctggggagggccactgagagtctggcttatggtcctgggtcctgtggcttaccttggcccactacttcccaccctcaggatctcagccctgccctgccgcatacctaaggtttgggggcagcctctctcctccatggagtgccttttctctataccctgcctggtcctgtctcttctttcacactgggccctacattctcttcctccagggaggcctcttgagactagtcctctagattctaccccaatgccagctcaaggcttcttggaggccacttcttggatgtcctggcaatgtttccatacctattcttgtgtcctgcctccccatcagactaggagccagctttctgtgtaggagcttgtcctctaggaacctcccacaatgtggggcgtcactggccatggtggcctgtctcccctctgctccgactccctgggccatgcacgttgttcaccttttctctcctcacctttcctatctgcaataggggctgtgaagcagtgcctgtagaaaggagaggaattagatatgaaggaacaagaggctgggtagaaagagcactggcctgggagtcagaagaccagggctatggagacagaagaccagggctatggttctggctgggcaactcactagctgagtgacctggatcagggagacaacaacagggcagacgtttactggacatttgtaatgactaagaagcgacattgctcctatctgtgcagcccccacggcccccagtattcccaataaacatactggctgggcaaagctagggtaagcaccttggatgtacagcttcaagacaaggtcccaagtcctccaagtcctcctgtatggaaatggcagatctgccatgatgtgccagactccgcttcatgctttatgtctgctctcaaagaggcactctcatggcaaccctgtgagataggtttcttatcatctttgtgtttgaggtgaggaaactgaagcccagagagggcaagtaacttccctggagtcatgcagctggtaagaggtagagcctcttgtgggttagggaaatgagactcctagggcagagcagggaggagaactaactctgagtgcctgctgtgtacaaggtacctccacatctgttcagtcctccgacaaccagtgtccatcccagacctctagagactgcttcttccaccatctcacgccgcctccacatgccacccaaagcgtgcgtgttctggcattccacattttagaatatgttttatttgattataaataggagaatatataataaagacaagttatgctaaaagtatttatggaaaggagagacctctgtgggctggaagccttcatggaaaaactggtaactgagccctttttttcccttcctgtctaaataaatgtatttctcccacacaggcaaatattttaaaatgtatttcaaaagttagacttctggaaaaagaaaggaaaagagggggtggggtagctgctcctctaagaagcccatgtgaaagaagctgctggggtaggaaacaggagggcacagggtgagtgaggaaaagtcagtccctttcccccaccccaacgccttgtcatttttgaagcctcagtttctttatctgcaaattgacctaatacttgaacctgggagagaaatgtacaggttcttgggatgtgattttgagagacaaactctgcagaggttcttggaatcattatgaagaatgagagaaagggaattctgagttgcgccaagagtttaggatttgtccagcaaaggatttctgggggtgggcagtggggtggagagaggaatgcagcccctggaatgagggctgagtggaggtgtggggcctcttttggagaattttgagcacagaagagattctttgctgcgtggggcctgggctgggtgctggagattgtatagcatgctcataatttaaggtggctccaaaaaggatcaggggctagtggctggcacagcagagcacatgactggatcctccctaatgggtgttccccaatgaccttgcctgtacgggggtataggagcagagatggtaacccccaaccccacccagccagccccaatcccattgctccaactttggccgggccttcctgaccagcctctcctgagtgggcagctgctgggggagaaggatttgctcaggacaggatggttcttccatttccaaagagggctccagtcacatgggagagagaaaccttccaagtgcctgcacccccaggaaaattcttaccatggaagcctgggcctgaagactctggtcagaggagggtgggcttcccagggcttcctggtcacggtggtgggcctctgagtgcatgaagcactcctttggattggggagagcagggagaactaactcagtatctactgtgtacaaggcacctccacagctgttatcatcctgacagccagatatggtggataatctgatcatatcatgttttagagacgaggaagctgaggctcaggaggtcaagtgactgtcctaagtcacacagtggtatgggagcagccagatcagtgaatccatcacctgggctttgccggggcctgcacccccgcctcgggaagtgccctcttcaggagaaagtcctatttctctgtaagctgccttctcgtgtggaagctgggtgccctgctacctgggttccttgcccttggggtggcatgaatgccaagcgatgcaggcagggcgcccgcagactcaaaggccaggccctgtcctcgccagcagccgaatcgctgtgactttggaccgccaccgagtctctctgggcctcgctctttccacctcttcctggggaagccccggctaagtttctttataacctagccccaggtgcccagcctcggaaggtgtgagcgagacctcggcaccctcacctgagaaccagctccccggctctggccgcgggttatgtaaccgggtgtgcggcgtggggggagccgcggggcggggcgctcgcggctattccgggcgccgctatttttagccccattgatgaggctgcgtcggccgccgccgccgggattccggagacgtcaatgggcacgcgtcacggtccccgccccgcccgccgggggaggcgcgccggggctgggacagcgcgcgggcggccgcgggcgcgggggcggggggcgccgcgcggccggaactgcgggcggggggcttcccgggggcggggggcgctgagcggctgcggcgcggctgcaggagcgcgaggaggaggtggcggcggcggcggaactggcgggggtcccctcgcggcgcccgggacccccggcctccaggcatgggcgcccctgcggtgcagagcagctcagggccggctggtgcgcgaccccggaaagcgggggtggagaggcgagcggagcccgcggggccaggtgaggggctgccggggtggcgggaggtgggccccggagaggccgggcaatctcgggtcttcggtggatgcctttgggcgggctcggggccacgccggagtcccgcttggaaactggggagtcgggggggggactggattcccagcggaaccgctggctccgagtcagcccccaagggcgacggccaaggctttctctccccagtccgccaagggtggggtttggcccacgaggggcgctggaggtggccaggccagagaaattccttccatttctccgccggctgcgggaaccggttccaggagcgcgggagctcgtctgccaggagacccagccgggagggaccgatgctgcgtgatgcaaccccttcgagggactgagtcaagaaaccaaggctgggggtctcgtggagtcaggcggagctggggattaggactcggggcttgtgtctcccaggcgtgtttttttgttgttgttttgtttttttgccgcaacatcttccttatactgggtggggtgggggcgggggtggtctgtatttccagacctcctccatggtggtctggctgtgtggagggcagggcacagttccttgacttggctcattcccccccaacgccccccctttcttttttttttgagatggagtctcgctctgttgcccaggctggagtgcagtagcgtgatctcggctcactgcaatctccgtctcccgggttcaagcgaatctcctgcctcagcctccagagtagctgggactacaggcacccaccaccacgcccggctaatttttgtatttttagtagagacagggtttcaccatattggccaggctggtctggaactcctgaccttgtgatccgcctgcctcggcctcctaaagtgctgggattacaggcgtgagccaccgcgcctggcaggctcattccctttttatgccttcgtttttgatagatgacctgggga

SEQ ID NO: 6127 - DNA, 6000 bp, Homo sapiens
tcgtgtccatttgtactcattgtttagctcccgcttataagtgaaaacacgcaatatttggtttcctgtttctgtgttaatttgcttaggataatgtcctccaactgcatccatgttgctgcagaggacatgattttgttattttttatggctccatactattccatggtgtattttcttcagcacttaccaccacctgaggttataaatttagttgttcattatctacctgttccattagaatgtgaactccatgaaggcagggacctcatctggctctccactgtacacccagggcctagctcagcgtccagtacatagtaggcgctcaataactacttttttctgaatgaaaaaaaacttcattcatagaagaaccaatgcagcgaaggagccatatttatcactttcattttttctctcagcatttctgaatttagatccattcacttcagagaataacagacattttccaagtgttttggacgagaatacgctcacttcttctactcctaacggttcagaattgcttaatcttcctgaatagttggacgaagtttcttccccctctgtctcattattagagaccaatggagttattccttgttgattaattatttggtttttttttgagccggagtttcaccctgtcacccaggctggagtgcagtggcatgatctcggctcactgtaacctctgcctttcaggttcaagtgattcccccacttcagcatctgagtagctcggattacaggcatgcgccactatgcctgcctaatttttgtatttttagtagagacagcgtttcactacattggttaggctggtctcgaactcctgacctcaagtgatccacctgcctcagcctcccaaagtgctgggattacaggcatgagccactgtgcccagctaaattgttttttttttttaattctctgttaggtaaaaaagttatgaggggaggagactgagctgtcatgggcaaggccgggccgctcgcctagcctcacaacactccccacattcttcactatcacagcaaagtggtgtctacagtcctgcagaaaggcctcagagctttatattgctagaacaatatatcccactcttctggcaatctgggggaagggcagagactatgccttgtatttacaaaggaagaaaccaagaaacacaaaaaggcaagagagattctccttactgcggagtctgccccaagatggcagtgagacagtacttgcttgggttacagaacacaggggccaactctctccctactccacagctacattccagagaatggcattttcggagcacaagtggtttccagggccaggcaacaaaggacttatcagactaactggaagagagaagctgatgtccccaaacccactccaaactccaaactccaaagtctccattctatgccccaggcacatttactcttccctggagtgcagtgtacagacctgagctcacttgagagcctgggacagcccatccatgttggcaggctggctccctagagccagccatctcatccttgtgagttgataatttagcacaactcccccaaaggatgcattagtaaaggactcttgaagatgctgaagaattttcaaaccaaaggaatgaattgctaagaataaagtaagttggaggagatgcttttcagcttggggcctgcccagcatcacgctgtgtgtcactcaataatctatcaattatagattatagttaatcctgttgaaatgactacaggaacccagcaaaacatgccagaggatcctctttgacctctatcccaagcaaacatatggtggtaatggatgtcaagacatgggagggagctagaaagttccactaaagctaagtctaaatgaagctcggctctgggtggggcaaatcttgagaaatggcatcctattgcagtttggttttctttccgtgtttatcatctctatcagtattctcctttaggcacagcgtaaattgaacagaccttgggagagagaacacaaggactggaccacctgctctgctatatcataactgaatcttgggcatattttctaagaatttttttcttttagagacagtgtctcgctctgtcacccaggttggagttcagtggtgccatcatagctcactgcagcctcgaatttctggactcaagtgatcctcccacctcagcctcctgagtagttgagactataggtacatgccaccacacctggctaatttttaattttgttttgtttttgttttttgggttttttttttgagacggagtttcactcttgttgcccaggctggagtgcaatggcacaatcttgtctcactgcaacctcctcctcccggcttcaagcaattctcctgcctcagcctcccaagtagttgggattacaggcgtgtgccaccatgcccagctaattttttttttgagacggagtctctctctgtcgcctaggctggagtgcagtggcgtgatctcggctcactgcaagctccacctcccgggttcacgccattctcctgcctcagcctcctgagtagctgggactacaggcgcctgccaccgcgcccggctaatttttttgtatttttagtagagacggggtttcactgtgttagccaggatggtctcggtctcctgacctcgtgatccgcctgcctcggcctcccaaagtgctgggattacaggcgtgagccaccgcgcccggccatgcccagctaattttttgcatttttagtggagacagcgtttcaccatgttggccaggctggtctcgaactcctgatctcaggtgatccacccgcctcagcctcccaaagtgctgggattacagacgtgaaccactgtgctgggtcctaagacttaatgtactagtttcctggggatgccataacaaagtatgtatcacaagcttgagtggctaaaacaatagaaatttgtcatcttacagttctggaagctgaaagtacaacaggaaggtgttggcagggttggttccttctgacagctgtaaggcagggtctgttccacgcctctcccctggcttctggtggtttgctggtcctcttaggtgttccttggcttgcagatgcattatcccgacctcagccttcacgtggcgttctccccatgtgcgtttctctctgcgtcccacttcctccttttaataagagcgcagtcatatgggagtaggctcatcctaatgacctcatcttaacttcaccatatctgtaaaggccctatctccaaatgaggtcgccttctgaggtactaggggttaggggtacatttggggggtgaaggaaacaattcaacccataacactttctttccctctaaatggggattagaatacagtatttcttcatataattgcagtggttgtgaaagtgtctcaaagaggcttggttcctagaagctcagcagacatctggtttgtctgaaagtacatgtgccttggagctgtctgagtcagactgcacccttagggagcagggctcaggtggggtaatcaccctgtgagcatccaacacaggtaaacaggtgcttggccaatgcgtttccctgatggtgaagaggaaaggctggagagaaaaatctgctgataagccagggctagaaaaagtctgataccaagtcctggagaggatgtggaacctcaggagcccctgtgtgcagctgtctcagtgtgcactggtaaaaacactctggcaatatgccaaaaaggcaaagctgtatatgggatgccccagcaattccactcctaggtgtaggtgtatactctagagaaatgcctacataggtgccccaggagatgtgtgcaaaaatattcatagcagcattgtttgttagacctaaaaatgaaaaataacctacatttcctcaatgtcatgcatgcatctaatggaatactatgttacacagcaggtgaagtcaattaactagagctgggcataccgtatggatgaatctcactaacaaaaactattcagcaaaaaagagcagattgcagaagaataaatacagtgagtaggacaaaaccaacgacatattgcttagaatgcatatgtaagtatttgcataaagaatataaagaagtctgggcctgataaacaccaatttcagcaggcggaagtggaagtgcacagggagcttcaacagcttattttttaaactggtgatgagtgaagagtactggttatcttattctttataacttctgtatatttgaaatgcaacattttttaaagagccaggacttgaggagagtcatataaaggagactgagatgccagggacaatttctactcgtgggaagattcagagttgttcctgtcattccctggaacccagaatccagagtcaattagttaaagactctgacatctgctaggcgggaggcaagagacctaacaaggtaaggctagggggatgagaggagggaaggacgctctcatgctgcccctctttgatctgaacccagttactggcctgcgcgccagccctgggctgcagataatgccaggagaaaacagctgggcagtcctgggaagcctgggagggatgcagaggagggcgggggccacacacgctgggaggtgcactaaggctgctgcccccacacagtgacaagcgcttcctcgcaaaccacctggcacgggcaccctgacagtttacagcactgtctctcactctccttctctctctctctctcacacacacacacacacacacacacacacacatacgccccatccaccgcccgctctgaccaggaccccagcgttggggatgcggccaagtcagccagctgtgggccctgccaaccctccctctcttctaggactgggtttttccagccggagtctcactccctctacagcaatctcgggaaattggagactgacgcggctgctcctgcatgttatttatttttcctctttccctcccgtggagaccctcctgttggaaagagagctgcagcacgggacagagacaggcaggaagaagcagagaggactcggtgacgcccccaccgagcagcccctggcccactcctccagcaggggccatgagcaccaagcaggaggccaggagagatgagggagaagccaggacgagggggcaggaggcacagcttcgagaccgagcccacctgagccagcagcgccggctcaaacaggccacccagttcctgcacaaggactcggccgacctgctcccgctggacagcctcaagaggctcggcacctccaaggacttggtgaggcatcacccctcccctgccagcgtcccctggccttttccttccacttcccagatcctgagcaggaggcaggaccagaaagtgcagaccctcagctttcaggtcccgctcccttgctgagatggggagaggtcatcctgccaactcaaggctcttcaccggggatgttcccatggtttggtggctctgagggttcctattctctcattgcttggcttccctttttcctctaatggccccaaacttgagggtggtgaggagctaggctgtttagaagtgggggcttacaggaacacaggaaccctctagagtggtcacttacaaccaggagggcctggaggactggccagtttagggttgtgacttcctgcttcccccgaaccacaggttccccagaccaggtctgtctatccacttgtcctttctcctcagaatcaaaacatcgggggtctccatccttcccagggcatcagggttttgtgtggctcttgccgggggcccctggccgccttgagtgctgctcccccaactcctgagtggaatggaccttccaggctcctctcctcccatcccatgtctgcagcagctttggcctcagaggaatggggcaggggagtaacagtgaggatgtgagtgggcggcggaaaactgcagattcaggcattcccctctgagaggcaatgctgacaagcggggctgcgcagccacttcgcttgg

SEQ ID NO: 6128 - DNA, 6000 bp, Homo sapiens
gatgtggggaaagtctcctatttggtaatttagttaaaatgtaaatgttatatcacagcatatgttggtatgttttggagtgtgcttccattgtgctcagcttttgaaaagtttgaaatccactttagtcaaatgtagtcaatgggatttccagagatacatattgtttttcttagtgtaccacacactccttgaaggcagatactgtacttaatatatcactgtcttccataatactgccctaggtctttttagtttttaagagaccgggtctcgctatgtttcccatgctgaactcaaatgcctgggcttaagcaatcctcccacctcagcctctggagtagctgggactacaggggcatgcaccaccaggcctggcttcctaggagggtctttaaagagaaaatatttgttcaattgaaaacaggattcttgtcatctacaactccaacacagcctgaaaatatccacattataacctggaccttagacctactttctccactatcctgcaaagctacatctgtaactacctattggctatctatatgagtcctcaagcatctcagactttacatgaataaaactcaacttccttcccattcaaatctgtttattttcttctgtaagagaaagataccatttgagactccagaatctgcctctaactctcaacaagactctgcaattactcaagtatcctttccatcctcattgccctgctgttattacataggccctggttcaagtccttgttacttgttcccattattgcaataacttctaattccaatgccgttgtgtgatcccattttaaacacggccagagcagtcttccaacaacatagctctaatctagtttcatccccacttttacatgcctcagtggctttcccagtgacttggcatggaacacgtcctcagttgccatacattccagctaactcttacccaacctttctttgttcacacagtttccttttccttcctcattgacccatccgcatctctgtttatccaagacttctctgtgatagctgacccttagtctttctctcccctattcctccagactagatcctgtctccttcctgcagccccgacacagccttcagttcatatcttttgcatgatgcttagcaccttctatccctaaggacaacttactcatttgagatttctggcagggtaccttgcatgcagtggacactcagtatttgctgaattaaattccttcctatggatcccttctgattttttttaagtgcctctaatacacatatcattctagggctcatgccacttttaatgtcattttctaaaggaaaatcttatctatgatattttcccttataagagatagttgttttgagtagggttttttaaaagataaaggtagtaggaaattttttaaagcctaaatatcaaattcctttccctttggagttgggggaaggaatgaagggggagcaacttgctctttcatatgagttggtcatagcatgtaagaaccaatcttgaaatatcgttttttttttaatggcttataatgtatttctagaaatactttgtacttaaaatgataacagtttgtatctttttgtccatatatactttataaataaaaaaattagcattgtaaataatgttaatatgtatttatacaaaataaatttactataatatattttgttggtgtgatttttttccccctcaagacagagtcttgctctgtcgcccaggctggagtgcagtggcgcgatctcggctcattgcaatcttcacttcctgggttcaagcaattctcctgcctcagcctcctgaggagctgggatgacaggtgcgcaccaccatgcccggctaattttttgtatttttagtagagacgggatttcaccatgttggccaggctggtctcaaactctgacctcaggtgatccacccgcctcaacctccccaagtgctaggattacaggcgtgagctactgagcctggccagcatcatagatttaaagatgaacttcggctagagtcacacatttaaagatgaacttcggctgggcacggtggctcatgcctgtaatcccagcactttggggaggccaaggcgagcggatcacttgaggtgaggagttcgagaccagcctggccaacatggtgaaaccctgtctctactaaaaatacaaaaagcttagccagacattgtggtgtgcgcctgtaatcccagctactcgggaggctgaggcacaagaacctcttgaacccaggtggcggaggttgcagtgagctgagatcaagccactgcactccagcctgggcaacagagtgagactctgtctcaaaaataaataaacttcatttacctcttttcctgaagcataattaatggaaacgcttcttcacctacaaatgatgttcctaaaatggcttctacttccaagttttaacaagtcaacttattgtgacttaagtgaattaattgggtgataaggggtaaccacaagcatcactataggcatacatattctccaccaagaatagtgaagaggtctcagattgcctgtatccattaggcctatagtgcagtcatgcactgcataacaatatttcagtcaaggacagaccacatatacaataatggttgcataagattataatcccctatttttactgcactttttttttaaaaggacttagtttactttttctatgtttatatatatttagatacacaaatacctaccattatgttacaactgcctacagtattcagtaacatgctgtacgggtttgtcctaggtttgtgacttaagagcaacagactacaacatacagcctaggtgtgtctaggctagaccatctaggtttgtataagtacgctctatgatgagagtaaaatgaaattgcctaaggactcatttctcagaacatatccctgacgtgactatactttcataattttcacctttgggaccagcttatggtattggcaggggtctcccttaaaaccaaaccaaatacacaacaaataatgctaaaaggtagaggttggaaaaaaaaaaaagtttcactctcgcccaggctggaatgcaatggtgccaacactggaccagactcctgggcttaagcaatcctcccacctcagcctcctcagtaactaggaatacaggcctgcaccaccatgccttttttttttcttttttttttaagagatggagtctcactatgttgcccaggctggtctcaaactcctggcatcaagcaagcctcctacctcagcctcccaaggctctgggggcagaagccactgtgctcagcagaggtggatttttaatgagggataaagcatatttttacttgttagggattgtttcatgccttgatctctgtccgtctgcctagttccagagagaaataacagagatgttctcattcccagcaaacgtttgtttttccttccttggatttctgccctgagtttgtggctgctttcctacagtgccgacctaagctagataaaatagaaatttcatgacaaaacaaaggagatttaaaaaaaaactagaaatttcaagaatgcttcaaaatctaaagcgcagagtactttgcacacagggcagttattcctgccacaccttgccactacaggtggccactgtcagaatgcgatgttccaccaatgtctcttcatttcacaatttgaaaaattttttttgtggaggcagggttttgttatcttgcccaagccggtctccaactgctggccccaagtgatctttccttggcctcccagcagccacttgcctggctttcatttcatacatcattattgaatagcaggcattgtcctatgtgcttggtaatacatcactgagcaaaacagacaaaaaacggccattgaggataatcctcaatatataataatatatatattatagagaggatgtggaatatacatatatatgtgtgtgtgtatatatagagagagagagaaagactcattgtgtcacccaggctggagtgcggtggtgtgatcttggctcactgccgtcttgactcaggtgatcctcccacctcagcctccaagtaattgggacgacaggcacgcgccaccaggactggctaatttttttgtagagacgggttttcgccatgttggccaggctggcctcaaacaaccgggctcaagtgatccgtccgcctcggcctcccaacttgctgggattacaggcgtgagctaccgtgcccagtctctagtgattatattcttgccctgtttagccattatgtctctttactcacaacagtttataagtgaaactttgccttaccatttgcatgagtcggcctcagcttgtcattatatataaagcttactaatgtaaatgacgagttaatgggtgcagcacaccaacatggcacatgtatacatatgtaacgaacctgcacgttgtgtacatgtactctagaacttaaagtgtaatacaaaaaaaaaaaagtttaaatatgattggactctaccccagagcccagttttccagaaattagaaacagatatgcctaagacccagagggttatttattactcaaatctaaaacgttgactcaaaacctcccctaatgcccacctttggcaaacgatgcttaaacctttgcacgtggcttcaaaaattacctggctgggaacgcgtagctctggcggggcactctgcctccaagccaaaagggggcagtggactcacagagccgctgctcggccctccgatccctccaccccaccctgggaacgtcacgacctcctctcgccgcttctccccgttgctaatgcgcaggcgctggcgggatagcgcgccgccgagccgagaaagaggtcacgaactctgaccccccagaaatacccaaacacagaaagctctctccgccgtgaatctcgatcccacatcccgtcggctttcttcaacctctcttcccggagcgccccccaatccacgagtggcagccgcgggactgtcgcgtcggcgcccgacgccggagtcagcagggcgcaaaagcgccggtaagaaacgctgggtggggacaccagcgaccgcgtcgggggcgggggccagggggtgcccttcaccccaaccgccaacggacgcggtcccagcgcatcccccggccggcgtcctgcggccagcggagccgttcagtttgggagcgccgcttggggctgctcgacttcggctgggagcgcggagctgcggcgccaaatgcgcggggccccgggagaggcgggggcgacaggggcggcgggacgcggggccggacggcgagcggcttggagcacacaaccccctttccagctgcgcttaccgcagcgcctctgacctttaacctgcagggaaagcttccgcggcgctgcagctttccccgcccgggagagccgcgcgcagcgccggggcttccagggcgcacggctaacgccggcacgagtgagacgtgggagaggccgaccctcggctagtggccgcaagtcccggcctgcatcccgtcactaactcccgtgctttcacgggacggacagaatgactccccccactttcacttttctctcacggcaaatctggccagggtcgtcgctgcctgtgggcctggatcttttcagaagaaatggaacggccccagggttctcactgcagggggcatgtccaagcttccgatagatagctcttttgttaagaaataattcttccaactcgggcagataccatttttgtgcagtacgaatgttgccaggttgtcccataatcttcagtaagtaggtcagcctttaaaaaagtaaccggaaagcaaaagcagaaagacctaaaattacggcctttagggtttagtaccgctagaatttgtaaatggaccttcgattttgagcttttttgaaccatttctgctgtgtggttggtgatactcgatttttttttctttttttttttttttttttgagagggagagggagtctca

SEQ ID NO: 6129 - DNA, 6000 bp, Homo sapiens
tgtgttttaaagaagggtggcagagcctaatcccaacactttgggaggccaaggcaggaggatcacttgagcccaggagctcaaggttgcagtgaactgtgatcacaccgttgcactccagcctgggtgacagagcgagaccctatctctaaaaaataatataaaaacgccttgggacaggtgcagggtgtgccgagggccctgcccgggcatatctcaccctctcctccagttctgggctggctgttctgccaggccctgtgggcttttctttttttctttttttgagatggagtctcactctgtcgcccaggctggagtgcagtagcatgatctcggctcaccacaagctccgcctcctgggttcaagccattctcctgccttagcctcctgagtagctggaattcaggcatgcaccaccatgcccgggtaatttttgtattttcagtagaggcaagttttcaccatgttggccaggctgggctcgaactcctgacctcaggtgatccgcctagtttgcaacttctgcttcaaagcacatcaaaagtaagaaaaacatagataagctttttctacacagacacagttctaggtgtgcgtgtgaggcttggctccagggatgctcacttgggtgtctattgggttgttactgatagatagtgtgacataggccccttgggtgcgatccagtggctagtccagggctcctggggtagccagggtcaaagctgctcagggcaccatgtcccccagcatgagtcctcaccctatagatgccttgttcctccaggcccaccttgaaggtggggaattttttccaggagtggctggaatttgatctgataccatggttgaccatgtgaacttgattagcctgaatgggcatcacttgggtgtcaggctaacaaataaaacttttttttttttgttttttttgatggagtctcactctgttgcccaggctggagtgcagaggcatgatcttggctcaccgcaacctccgcctccagggttcaagcaattctcctgcctcagcctccggagtagctgggattacaggcatgcatcaccacacccggctaatttttgtatttttagtagagatggggttttaccatgttggccaggctggtctccaactcctgacctcaggtgatttgcccgccttggcctcccaaagtgctgggattacaccatgagccactgcgcctggcccaaataaaacatattttagagacagggtcttgctctgtcatccaggctggagtgcaatggtgtgatcacagctcactgcaacctcaagctcctgggagtcccatctacccagaggttgggaccagtggaaaggtaaaggcttcatcctaaaatatgcccaaggagcaagtgctggaaaacacagatacaggatcagccattcccacttgtttctagatttttccagggtcaacacctgcctccttccccctctgttggtgcattcattcattcatgtgttaattcagtcgcaacacatttgaattgagtgcccactatgtgctgaggatacagcagtgagctggccagaaaggtctttgctctcatggaactgacattctggtgaccaaagacaatatatatcagtgacaaatgcccaggatagtttcaggtggtgataaatggtgacaaaaatgaataggatgttgagttagtgagggccttggcggtttcttcagatacagggtcagtgagggactctctctctttatttatttattttttgagacagagtttcgctctttttgcccaggctggagtgcaatggcatgatctcagctcactgcaacctctgcctcctgggttcaagcgattctcctgcctcagcctcccgagtagctgggattacaggcatgtgccaccacacctggctgattttgtatttttggtagagacagggtttctccattttggtcaagctggtctcgaactcccgacctcaggtgatccacccacctcggcctcccaaagtgctgagattacaggcatgagccactgcaccctgctgcaagggactctctaaggagctgggacctgaagatagaagatgacagtctcaggcagacggaacagcaagtgcaaaggtgttgaggcggggatgagctggactattttgccaagtacttagaaaggaatggttgaaggattggagggagtctttaggaaggaatggttgaaggattgggccggagatggtagagacaaagcccaaggggcagaaattggcgccaactggacgggagccccctggatatatatacagcatgctccagccagctgcagcctggcctgggacacatacaacatgcttcccagtgtccctggtgacttcccaactgagtctccctctcccttcctgtaaaatgggtatgttgaaagtctttccctcacaaaggcaattgagatgtttgggaagctcttagctgttactgttactaactcacagtccagggggcccccccgggaaggctgtttgtgtgcagtgttctttggccgctttttaaaggtactgttcccattagttgctcatggactgtcactcagagcccagtagaaacaaagtagcaaactagggtgccggtctgcgattgggggaaggggcgggctcagctgagacctccccagagtccagatttccagcactcatttggaatcacgggctgctgctggaggctggcaagtcgggttcttcatctctccaggcctgtttccctacttgggaccaggccccttgcttcccccagggtaagtgctcactcagtgctggtgttactccccgccgtctgtgagggtgagattaataacccaattcagccaggaaacaggagcagacgggaaagggccaatccctttcgggataaacgctgcccttctcctggcctcagtcttgccatctgtgacatggtcgggccagaggccattggcgcttgagttgataaggcttccagtgagggatttctaggtgacgcttgggacattacaaagctgacagaccccctgctttccccgctcctaagcctgcagggagccctcgagggcagaagctgggagacccctgaagacaccccaaatgtccctcctccagcttcaaatagagctgaatctcatggaaatgcaaattcccagagggttttcaggtgacagaggagggctgccaggcggcctggggctggcagaggagctcccccgcccccgcttccctctccaagacccttggtgggggaggtgggggatcaggccttccttctgcggctccagctttttgcctgtggattcggaccgactggctgggcagaactggagctggtcgggccaaaacaaggaggtggggggggggcactgacctatgacccctcctgtttcagtctgcaaactgctcccctccacacccacttcccttttgccagacattgtcagccccagaggctcccgccagccccccaaaagctcataattaaaagcccgagggggcagagaaggacctggctgcaggggagcccggcaaacccagcatcctggcggaggcgggaggcccgccggcctctggaaaccacgcggctgcctccccaccgcagccattccccgctctccctgggggttctcagatgttgccagatggcagaactgaatctgctgagacgtcactccaaaaaaggaaagttgaactgaaaaaaaaaaaaaaaattcaaactctccaacatcttaggagaaagcagaagaggagggagggagggaggctccaggcccagggctcccagtgccctctgctgttcaaagagatctgccctggttggagagggcaaacctggagggggtgggaggagggggtaaatgaggacactgggttgtcagggcggccaggggggccaggttcctgctggagcggagagtgtctgcctgtgcgtgggggagcgagcacatgtgtgccgtctgtgactgcgtgcttgtgcaggccgggcgtgtgtggctcccagggtcacgctttgggatgtgtgtgtctgtgtgtgtgtgtggggggggcgggggggacacaggctcgttgcattgtctccgcatttgtgtccctgaatgtccccaagtgggacttcactcaacacattcgtgagtccctactgcgatagggcagtgaacaaaatagaaatctctgccctcaggaaactggcattctagcgtctgtgtcctccggggtgctgtgaactcgcgtgggtgtcccagtatttgtctgtgtgagatctgacatctccggtccgtggtgggtggtgagtctgcagtgtgttcgcccgggctgggtctcgggtctggggaggcccagcgtgttcctgcctggagagggctctgcgctactgtctgctcccgtccccaagtgccccactgggcgtgctcctaaaaggccctgtgtagggccctccctgcgcgccccctccccatccagcggccactccagagttataatttaatagctgaaacgcgattccagtgaggtactggggctggagaggaggaggagggcccccgggcccgcaggagaagagggaggggaaggctgggaggcgcttcccccctccttcctcctcggggagctgccaaaaagaaactcggcgtcgcgcccaagtgtgtgcgtgcgtgtctgtgtgtgtggcggcgtgcgcgcgcgagtggggacgcgcagggcctggagagaaggcgcgggccctttaaggagccagagggggccgggccggggcgcgtcgctgcgggcggggagccgggagcagggaggccgagccaccgcctcccgggctcgcgccccgccccctcctccccctcccgccgccgccgccgccgccgccgccgccaccgccgccgcggccgccggggagcgcggagccgcgggcaggccgggccgcaccggagccccgcgtccgccggcgccccgcccgagccctgcgcccgcgccctgcgctccgcgatgcgcgccaacttgcgggccggggacccagggccggcgccctaggaggcggcggcgggaggatcgcgtcccgacccgaggccgggcctgctgcgcgcccccagcccgatcggcaccgccacttgcctgagcgccccggcggcccgagcgcgccccaagcccgggcgccaccgctgccacctccgcgaggtgagttggggccgagggtccccgcgaagggcggggggaggcgcggagcgcgcttccgggggatccggggaggatcgggcggcgcacgcggcggagttggcggggcccctgcactcccgagttggcgctctcggggggtggcctgctggggagcaaggcgccccgccgacactgcggcccgcgtgctcgggggcgccggggaacttaggggaactccagctccctagcgagggggcgggaaggagggaagtggcgttggggtgggcggggggcgcgctggaaatgcacagagcggccccccacagtgtgcgccggctctggggacttggccgccaggcgtcccttgtacccggtgtagccccggacctggcggggcgacactgcgccttattttccatcgggcagcgcgggtttgaaagcccttggagatggtacccctagctccctggcctggctgttgtggaggggcgcatgagggtctctcaccagccgagggggagagccagccttgtccctcctaggcgtggggccacggggcgctgggcggggtccctcgggagagtcgcccctggtccccctcccccgcgggccggtgttcctggtgtctgggcctgcctcccgtggctggtgacgcctcattgggccgcctcctagtccctcccccgggctgtgcggatacttgggatgccactactttgcgaagttggaattcagagctgatcccacttgggcacgactgggaagacccagacccttgtctagagggcagcttcctcagaggcctgcggggagtgagggcacccgtggggtacgccctccccgccccaga

SEQ ID NO: 6130 - DNA, 6000 bp, Homo sapiens
aggaggacccctttctactatgagatattgcattccctgctaatcatacttgtgctctatctgttgatagaacaaatacataatgagaaacagccactgtgctttcagaagaacacacttgaaagaatttgttctcaataaattacatctgcatctggatccatatgaagaaatacgttcctctcattcaggcgtggctattttaaaataaaatttgggccgggcacggtgactcacgcctgtaatcccagcactttgggagtccgaggcaggcggatcacgaggtcaggagatcgagaccatcctggctaacacagtgaaaccccatctctactaaaaatacaaaaaattagccgggcgtggtggcgggcgcttgtagtcccagctactcaggaggctactaggaggaagggaaacagtatgcacagtgggtgaaacagtatgtgcaaagtgggtggtgggaaggtttagctcaaggtccttatatggggtcggtggggaactgcggtgatgagggcagatggataggctgggccgtggtgtgggggcctgactaggtggggctgtctcgtctccatcgtgacatctctccccgcccttccatgttgtcatggccttgccttacctccaggtccctgtctctagttttggatacctctctcattattacctgttccctcctaccccatctccccgacaattagctgttcactctgaccttgttcttgaaggttagacttggaggggtgtgtgctgggagtctgtggccagtctgggaccagcatttgttttaggcctcccaaagtccacgtcaattgtgcctttctccaaagttccactagctggaccccactctctcagaggcccaggccattctcccttgagggcccacaaggcctgggatccccaagcccctttcacctctctcgcctttatcttaggctaggtgctccacacgggaacctgcattggtggccccagctgtgtttccacagagggactttgcctttttctccttatttacttattttcagaatgtggtgtgttgagcacccccaccatctcccacccctgcaagcatgaccaggtggcagctgtagttccttatcctcctccaggctttggggcagcaggactgcagcctccataacctgcagcagcttggggaggtggggcctgggctgcaggcccagatctggaggctagatgctgagattcagaccagggacctggacagctcctcaccacactcagttttccttgggcttatgggtgggcctaccccacaggatggtctgtgccactttttacaaatgccaagttgtgaggaggagaggagggtgcctgagcttgaggctggttcaactctcaaagagctagcaaggctgggccgagggcggtggctcacgcctgtaatcccagcactttgggaggccaaggcgggtggatcacgaggtcaggagatcgagactatcctggttaacacggtgaaaccccgtctctactaaaaatacaaaaaattagctgggtgtggtggcaggcacctgtcgtcccagctactcaggaggctgaggcaggagaatggcatgaacctgggaggcggagcttgcagtgagccgagatcgcaccacttcactctagcctgggcgacagcaccatctcaaaaacaaaacaaaacaaaaacaaaaaacaaaaaaagagctagcaaggctgagattgagcacagactggtcaagccacagataacgcacttgttcttgctggttggcaggaagaacaatggcttggctgatcatcttttgctacctattaaaattggttttattttggccgggtacagtggctcatgcctgtaatcccagcactttgggaggccaaggcgggcagatcacaaggtcaggagatcaagaccatcctggctaacacagtgaaaccccgtctctgctaaaaatacaaaaaaattagctggcgtggtggcaggcacctgtagtcccagtgactcgggaggctgaggcaggagaatggcgtgaacccgggaggcggagcttgcagtgagccgagatagtgccactgcactccagcctgggtgacagagcgagactccgtcttaaaaaaaaaagttagttttattttctagggaaggccctgctggggtggagggagacatcctggggcaaagtgggtgctaggtgaggaagtcagcctgtgacacagctgggatcagttccacccagcaagacttgctgtgtgctcctgagcaaagtgtagctcctcttggaacccttgactcctaatctgcaaaatgggaggacttgaattctatatgtggttttaaaccttttttttttttaagctgtggagtcattttccacaaaaggattccacaaaatctaagcaaaatcttacggaaaagcctaagagaaagaaaagcaaaactttgcctgaaatgaggtagggatcctggatgggtccaattggcatcatcctgcccacacttcacattcaaccagtggccttgaaggaagatggtttggagcaacccagagctctctgcagatgcattcacgttgagactgtatgctgggatggagggttctggcaggttctgaccagatgactgaatgccatcagcattacagtcaccccttggtttatgaagggggttggctccaggaccccaacttgtactgcgaatactcaagtcccactgttggccctgtggaacctgtagatactaaaagtcggccctctgtatatgtgggtttttggatccatgttggattgaaaaaaaatccccaaatccccatatgagtggacctacacagttcaaacgtgttgttcaagggtcaactgtgtatgaagactgctccatctgtggtggacagtgaggctttagaaagaggagacaggcaggctaatggatggtcttcatgggtgtgggaaaggaggagtggtcactgggcgcaggcagttggtctgtgggaccagtgaggcatgggctgtggctggcagtaggaaagcgggagaggctgagtgcagtggctcatgcctataatcccagcactttgggaagccaaggcaagaggcttgagcctgggaggtccaggctgcagtaagccataatcatgccactgcattctaggctgggcaacagaacaagaccttgtctcaaagacaacaaaacaaaacaaaaacggggagaggaaaggacccaagagatgttccaaaaaagaatttcaggaaacagtgaaaagttgcaaatggggcatcaggagccaggagcagagattaggtggcaggcagggggtgcagaaatgacaagttctgtctggaacagatgaaatttgaggtgcttgtgggacctttgagtgggcagaagcgggggctggagacaagggtgtgggaaaactgtgatgggggttgagggtggaaatcgggccggcagagcctccggggcagagaaagtcctatggggtgaccagatgagttgagaactgggtgggtgggtgcaggctcaatggaagcagaaactcatggatattgacttacatgggagaaggggaatggatgggggtcgcagtggggtggcagggctctcttttccttgtttttgtttttttgcccttccctcttctcttacttttccgtgagggctccccaggctcaggagagatcagggtggaagggtgacggccaaaccagggaaggctccaggtggctgaagcctggtctgtgcccagcagggccctggcgggctgttcctcactccaccgggcaggtgataactggtcagagctgcctccccacaggtgctggaggtaggctgggagggccggtgctccctgatgtggacagggggaggggtattgataagaggcgtggagagatccctagagatgcagtctgtggccctgggttccaacccagtgtgccaccacctggctgtgtgaccttcagcaagtgccattatttctctgagcctgtttgtttataaaatgaggaagagttggcacaagtttgaaaagatttctcaggctccacccggttctgaaattcggtaatttcccaactagggtgcactccccctgtaaggggctggggaggggacggtgcgaaaccaagttcagcttgtggagcggagccagagctgttggccgagcttgggcctggccaacgcctgccctcgggaaggtcctgtgtagggagactgcctggagggactaagcgagggctctaactgacgtctcaggggcagcctctcagcctgagaccctgctggggaagccgcgtcctgtgcactagctgcgcctagggctgaggtgagggcgcaggctccccagggtgtgtccgaattgcccgcctcagcccgcggcctgtcctgaccgcccagcagcggcagcagcgacaccctagggctccaggaagggcttgggaaggtgtaaaggcggggctaggctcggagggagccggagggaccgggcgcggttggctcccgggagcaactggagagtgaggagatcctcatccggggaagccccgcggccgcgtctctacagcgccccttctcgggctctggccctcccgctggttattctggacctgggggcccccagctgggacccgagtccggtgcggggagcctagtgggcctgggagctgctatttttagcgggcgcggcgggcgcgaggagcctatttatagatcaaacaatccgcgctccctgcgtcaatggaaccccgcgtgcgtcacgcgcgcagacattccaggccccccctcctcgccccgccccctcgggctccccgggccgcacctccccctggccgcctcccgccggaaccgcaccgccccccgcgcccttgtatggccaaagctcgacgggcggcctgcgtcagtggcgcccccgcccctccccgtgcgtcacggagcgcttaagaggagggtcgggctcggccggggagtcccagtggcggaggctacgaaacttgggggagtgcacagaagaacttcgggagcgcacgcgggaccagggaccaggctgagactcggggcgccagtccgggcaggggcagcgggagccggccgggtaggttcccttcggggaacgtgcatctgtttttaggagcggtgcatgaaggagatgggtgtacgcgcgggcagagaggatgttgtagggccggcatgcaagagggtaggtgtagtgtgcagctgtagcacaacgggatgagaacccaggtcagactggaaactactgggtgcggggtaggaggtaggggaggttgactacctgcaaagtggaagctgtagggggttggggttggcgccgggagtagggacttgtccagcaggcggctggccttagttcagtctcctagggtgcccaactgggcgcacggtgctctgaacttgggtgggtgtggatgggggtcacagcaccgtgggggaacaggtacacagagctttggcgctgctgggatccgtacgattctaactgggattggatttccaaaaggccctccttcctcccagcctgtcagctccctcccagtgtcccggttgttttcttaacactttagaggctgtggctgagttggcaggggttccccaccctgaactttctgtctgaggtgcgttaggaagcctccggatcattgaaggaagtgactggcttggtggctgacctgtggagggctgcttgctgtgtattgaataaaggaggcttcttggggtcggggcagggtctctgtaagcacagggagaattgatttcgctggggcttggatcacgtgtgtgtgtgtgtgtgtgtgtgtgtgtgtgtgtgtgagagagagagagagagagagagaaagagagacagaggtggaaacccttgtccttggggatcctggatagaagttgccagtgttggagtcttggggcggtgctgcctagaggatacctcccaaccattccagctccagatgctgatcatccctatgccccctcccccagtagtctctgtt

SEQ ID NO: 6131 - DNA, 6000 bp, Homo sapiens
gagcagaattgctccttctctccattgagagctactggtctaaggagttggcaaattaaggtcagtgggcaaaatttggcccgtggatgtttatatacagccctcaagctaagaagttctgcatttttagaggattgtaaaacataacagagactagatgtggtctgcaaagcctaagatatttactttttcgccccttaaagaaaatgtttgttgacccttagtcttagtgataaagaaactgttaacaaagcagattaaacttaaaagagcttcatgttagtagctgttacattgtgaagaacacacacaatactgaagaaatgttcttcggtatatgaaagaacagtttccagtatatgaaaactattatttgattcagcaaagaagctactcacgtcaccaacgaacaagtgaatttccaacatacgtaaaggtggaactcaaagagggttcagtttaacaaaaataatttgtgtgaaaatcatagtttaacagtagatcacatataacatttcagtacgatatttatattggagaaaggattagtggtctggaatgcgattccatttgtcaaaccatggttgaacggcaaccataagttggctatcaatacaagagttcagcaaaactcaatgaaaacatcccagttgactcactggctacatggaatttacaatatacagaaactgtatatttattattatttgtaaaacatgtgttacttacctgttctatcagtaaaatttaaaataaatgtttatatgtatatattcacccacctctctgagaactggttgttaatcacctaccagcacaccactgctcccacctcctgttctatcccgatttctttgttcctcccccacattcttccttgaaagacattgtccttctctttatttaatgggattctccaacctctctcctgtctcagagcctttgctgctgtcttttccttaccctgaaatgctcctttttttccttctcaacacctttcactcccaacacatcagagatccttccatcttagctaaaacatcactttcttagaggaagcctttctaaacccctctgacatggtgagggctccctgataaatacagtcgcagaaccctgtgcttctccttcataacatgctgtcacaagagaacttataagattgtctgtgtagtttttattaattgtctgtctctcacactaggctgtaaattgcatgactgcaggaaccatatcattttgttcactgctgatttgccagtgcttaacagactgtttggaaaatattagctgctcagtaaatgcttgttccttttccccttctttctttctgtgctagttagaattaatcccatgaatagagagcacattttctgtttgttatgattaatggagagtattttatgacaccctgaacttttccatcttatcacataacacaagtgaatgttattcattctttatatgatttactttattgttatggttattgctgttattattttgctgagtgtcccttgttcatgggatggtgagctttcagagcttgggttttgggtctctcctactcagcactagcacattgcctggggcatccagttatcagggacacagtggtgaacaagataggtgtaatcatctatttatgttccatatagtgagagagacatgaaacatgtccatgtatgctaagtggtgctcagtgcttagtgctacagggtaaaataaagcaaggtaagaatgagaagagaggccaggtgcggtggcttacgcctgtaattccagcactttgggaggctgaggcgggaagatcgcttgagcttaggagtttgagacaagcctgggcaacatagcgaaactccatctctactaaatacaaaaaattagctgggtgtggcggcacgtgcatgtagtctcagctactcgggaggccgaggcaggagaaccgcttgaacccgaaatgctgaggttgcagtgagccaagatcatgccactgctctccagcctaggtgatagagccagactgtgtctccaaaaacaaacaaacaaaaaaaggaatgagaaatgagaagtgatatcctgtactgggaagagaaatggcattgtatttggtgtgtccaggaaaggcctctctggtaaggtgagtagaaacctgtagcatgcaatggaaggtctctgggcaaaaatcaatccaggctatggaacagaaagtacaggggccctggggagagaatgtgctttatgagttcagagaacaacaaggaggcctcatgaccggcgtgagtgatagatgaagttagagctatgttgggatggggtaggattcagggtcatttagatccttggggtcactgtaagaagtttggccattactctgagagagatgaaagcctgtgggggttttgagcaaaagaacgacatgatcctttggttttggtaggatcactctggctgccatgctgggaacaaatgacagagtgcaagcatggaaataaggaggccacttaggaggccatggcacaaacccaggtgcaagaaacctggcatggaccagagagatgacagtggaggtggtgggaaggtatcagattcaatacatatattgtgaaggtaaaacttaaacattttctaatggattgattgtgtggtgtgaagagaagaaaaataattgttgaaatttttgaatgggctcttatgtcatacccagcactatgtgctacaccactggagatccaaaaggatgggaaatacatgccaccctcagggagtatccagtccagtgggcaaatacgattgtcagtgtgaaggcccagagaaaataataacagctaacccctacacagcactttctgtgtgtcaggtaccagcgctttgcatagattaattcattaaatccttgcaataacctcatgaaatacatagtaattatatctttattttacagatggggaaactgagacagatgttaaggaaaagcctaaggtctaaggtcacacagcttgtaagtggcagagctgggatttgaacccagccggtccagcgccacagtctgtgtcttcagtcattgtctccatctctgctggagagaatgaaatcacagtacaggctcttatcatccaagaagaaatgggcttggtgtcacatagaagtcacacaggagtccctcaggcagcccagagctgcagagtgcagtaagtgtcagtgcaaactctcttcaaaagaaaatgtacaggcctggggtgaccctcttccttgtgccgaaggggctggaggatgcaccatagtacattgggaacccccagaagtaggtaggaagtaggagcctgtaggacctacaaaaatgctattttataagagaagcaaaatataacatttctaacaggtttgaatgtagatcttctactagctgaccttgtgacgggaaacaaatgacacacatcacagatgggaaatgcacacatcacatacacacacacacacacacacacacacaggtgcatgtgcagccatgctgctttgggaagttgtttctcagctcactcattgattgcgttaacaaagagttacacaatgctttttctgtgagaggcactgtgctaagacaaagggtagatacaaagacaagtctgctaccatgcctggtttttgtaaaagagataaaacaagtagaaaactataatatataaggtcagaggatttaagggacagcaaggaaactacaaataaaagatcaagggagttgggtggggagaataggggcagatgaggaatggggctggcttcagggagaactctgcttctgttccacgcctggaagatgtgtgggtgtgaaaagaaagtaactgaggtagaaggaagagcttgtgcaaaagtgtggaggcgggagagcttggtacaggttggcagaggttgggatgtctgaagggacagaatgtgagaaaatcctagagacattagggctagatcttcaggtgtggaaggggttctaaatgtcaagcattttgtgttcgttttttaggcatagagagtgcattggggattttcgatgaggggagtgcctagcaagttgctgggtacatagtaggctgataatcaatcaatgatggttcaactaatgaaggagagaaataataattgccacaaattattgggtgattgctatctgccacacacttttctaaacattttcactactcatgtaattctcaccacagcccatgagatggtttctccatatccattctacagatgaggaaactgagactcagagaggctaagtgtcttgctcaaggctgtgactaaagagtgggcatctaaccagagcctgtgcttccacactgctgtgcaatttggaaaacagaagaaggggagagaagaaaaaggggttgtgggaccaatgtcatccagaaaggaagctatgataggcccaaagtaggagaagaacaatgtgggttggaaataagagacattccaaagatgcaatcaacccaaatctgttattatttgatatgggtggctgggcagagggaagggtcaaaaaggctcccagcttctagttcagtcccggggaagtgatagagctattcaaagaagttgtagtgagagagagggaagatgacagtttggttttagttgatgtgtacagaaatacgggtgcccaggagcccacaaaacggccagaggagaaatgctttcaaaggcaagctgcagggctccttggttttgtcacattcctcattctggggctttgcggttttgtcttgggaatctcgaggctctcccaaggttcctttctatgtttatatcatttagcagggaaggattgttaatgactaatctgtgtccatgaggcacagagccaaggaagagatgctgctgctagcccagaaggccgcctgtgatcatgcacagtacactggaactctctcctcctcctcacctcattgtctccccgacttatcctaatgcgaaattggattctgagcatttgtagcaaaatcgctgggatctggagaggaagactcagtccagaatcctcccagggccttgaaagtccatctctgacccaaaacaatccaagtaagtacctaattcctttgggagtgggttgtgtatctcacagcaacagagaaaaaatagtcacttaaaagtttctctttgacatctgtaatgtatgtcaataaatgaattctaagttagtagagtttgatgtaaagtcctgaaaattaaaaaagagagaaactaaaaaacaaaaagaagcagaagcaaaagttaatgagtcttaacagttgcttacctattgaaaacttatttagaaatactcttttaacattgtggtcacctgagtaaatcactggagatagtgcatttcagaaatgtctccgttctgattccataaacaatttgacttgtatagtgtgctatattttggtgatttatcaaatcttgatgtgagtttgggagtattgctaatgtcagatgacttgggaactaagaataagacatttaacctatgcttaattgaaatgaaatttttccctagaagaagagtaggtggaaaaagtcttctttcttgacttcagttgtaaactcttctattgctttccattttgaatattaatatgacaggaaatatcagatggaaatatttttaaaagatagaaatgtgagtatgacgaagaactttagtaataaaattgtccaaggactaaatttatagataagatacctctttgtctccttattgacagagtgaatggggcaactgtggagcctgacttacttcttttaattgggtttttattcagaagggaggggcaggagggaatgacaagtgactcaccttgaattcttcctctaagaaactcacacctgagctttgagctataaagaaatctgatgctgtttctggtgctgtcttagaatcacttcaggagtattgacaagaggggtaggaacccttagaaataatattagtgataaataagaaggcaggaagaa

SEQ ID NO: 6132 - DNA, 6000 bp, Homo sapiens
cccgggcctggatggggaaataggatgcattttggtctggggagtgtctttatttaggggcagaggtgatggcctgtgtctggcctccccatccaggaggcaggcccctttcctcaagctgcccacgagtggctggctcatggatgcctgccacagggaaggggatttgggttccttggggccagtttttagcaggctcaggccggagagggtggctgtgggatctctcaggtctgtttccagctctgtcggctataggggggccctggggccatcccggagatccctggagctctcctctgcagcttccagccagttttctggaactagcgggaaaggaaaggggcaccaaaggtgtttccgggcatgcgactgctgccactttgaggtcttggctttggtagtgggttgagtcatggcccatgaaacataggtacacttggaaactgtgaatatgaccttggccttatttggaccacaggtcttcgcagatgtcactaaggtaagggtctcaagatgggatcatcctggaataggatgggccctaaatccaatgacaagtgttctaagagaagacacacagcagagaagtccacgtgaagacggaaggaacgccaggagccactgggaactggaagacacagagaaggctccccctgcagagtctttggagggtgtgtggccctggtgacaccttgagcttggatttctggcctccagaactgtgagaggataggtcgctggtttcagccacccaatttgtaataatttgttatagcagccacaggaaacgaatacagttgtgaactttattttaatcactcatgtattttaaaattaaaatgtaaaatgtaattttgtcttgttcactgccatatttccagtgctcagcacatacagtaggggctcagcagatgcttctcgaatgtctgatagctccaggcctgggtgaggaactcctacctgctgggagttggacccagctttcaggaagtcggtaaactgggctggagtggtgtgcattcagcaacaccatctttttgtttatttatttgtttatttgagatgcggccttgctctgttgcccaggctggagtgcagtggcatgatcttggctcactgcagcctctgcctcctggttcaagcaattctcttacctcagcctcctgagtagctggaattacgggtatgcgccaccacacctgactgaattttgtatttttagtagagatggggttttgccatgatagccaggctggtcttgagctcctggcctcaagcgatccactgcgcccggcctatttattttcagttgaggtgaaattcacatcacatataatttaccattttaacatgaacagttcatgagttcttagtacaatcacaatgttgagcacccaccccttctatccaaaaaatgtcctcatcaccccaaaaggaaccctgtaccggtggggtcacttcacgttgccgcctcccgcagcccctggcagctaccaatctgccttctgcctctgtggacttacctattttgggtatttctcctggacggaatcatgcactgtgggttttggcttctttcactccgcacaatgtgtttgaggttgatccgtgttgaatggtgtgagtccttcattcctttatatggcggaattccattgtgtggcatacatcaatagaaccatttgatatctaagtggcttttcagatgaggaaactgaggctgcccaggtcacggagccctggggcccgggattgaggaggtgcagatagccagacgtgtctggctcacggtgctgtctctttctcctgcccccaccctgctccactcgtatctgtgcctggccaggaagcagcagtgtgtggggaggaagtgagtgggggtctcttccagctggagccggatgctgaagcgtagctgcggctgtgggtctggatctggtcctcagagttctggcccccacctcccccctgggccccacacatgtagtttctgttgacctgggttgcgagagaggcagcaggcaggagctcccccattcgccagctgagccttctgatgcctcgagaggctgggggccttgcctggggccactcagcttaaggtccccctgcccctttccagaccccctttggcccactgtcctggcccctgtggcctgcggtgaatcatattctggggggtcttcaccgatctttcccaccgtcaaagctctgctcagcagacgggctccaggaagcggcctgtcggcagattttggccaggggatgctttttcgaagtatggaggggtggtcgccgtcgaaggcttgcgtgatggggagttcttttgctgagcagataaccagacactggcttattctgaatatgagtttggttttggccacaggctctgtctgggggctgctgcctgtggctgtttctggtgtttgatgatttgtggtcttcattaagtcactcaacaaacaatttgctgcggagtgtctggcggggaagacacaggaagcagaacgagtggccgtgaagagacatgcccagtgtcaaacctgcccatagcacacagtcgctctgagggggtgggaggagttaccgtggattccagggccagcctttggcgaaggtctggatgcaggtctgtgtccaaaacaaacaaaaatgaacagaaggaggtggtgaggcctgactcggccgctctcaggcaccgcttcctggtggtgtttgcatggggccagtttggcctgggtgtcatggtcccgcctggtcttggcgacggtctgggcgggaagatggtgctggatctttgggctaaaaatatgcccgtgccttcctgtgcctcagtttccctacctataaaagaaggcgtaagagtagcagaatcccacctttggctttggggcaggtctacggaaaccccccaggggtgtttcctggggaaggctagagggccagctgttcacaggagacatctggcttccaggggcctccgcagccactatgctcatcccctcgtggccagtctgggccccctgccagtccagtggccacgggcccctgtcacaggcaaatctggtcttagtcctgaaaccctcctgtgactccttgtggctgaattaccacgtggatagcggagacaagccaggcttgcccagttcaagtcccagctcagccactagctgttgaccttgggcaagtcacctaccctctctgggccagcctcctgctctgtctgtgtgtggcggctcaggggcatacctgcctatgccgcggtggtgtgaggccagctggtgaaccaggggacccgcttagcacagtgctgggcacacagtccgagctgctgggctcggtgtgtgtggccactgttattgttattaatattattactctcaagatgctcctgagagtaaaaaggatgacaatgttattgctggagttgaaggccaggcccagagtccatctgaccacttcccctccactcctattagctccctgacctcatcgtcaaactctccccgcctcgcccctgcgccccggccacaccagccttctctctgctttgacaacacacccgcgtggtccagcctccagaccttcacatctgccatgcttctgccaggggtgccttcctcacatctgcacccccagacccttgtcatcatgtgggctgctgtccagggacacattcttaggcccaactcttggctgctaggggcagggaagtgaatctggagaccctggtggagcctcctctgcctcctgggagctccagcagcttcctctggcgcctcatctctgctttccagagcacttggagaagcagagctcagcctgccccttctacggatggaaagttgacacccagagaagctcagacttgtctctgagtcacacagctaattgcagccaaggttcagactcctggctgactaccaagccatcattgttggcctgtgtgtgtgtgtgtgtgtgtgtgtgtgtgtgtgtgtgtgtgtattatttggccacgtcttcttttctaggcctgtcaccgagatgaccccagatcagaatgccagtgtgagggggtcacgctttcttttcctaggattaaaaggaggacagaaatatttgcaagggagagcctgctcctctggccatctggccctcgggacagaggacgggggagggatgggccgaggcctgggttcggaaccaggccggagccaaggcgccagagctacgctcaggttggaggtgcaggtgcggctcgaagctggacagtccgggctgggaggaagcgggttaaagtgggagaagcggggctggagctctctttcgcctgccagcgagcgaagagccgagctataaaaaggcctcacagtgtttcagctcccgagtgtcggctggaagcccgccagggttaccatggcgatgaggaattattacttactgccaaggctgggagaaaaagctcgtacttttggcttccaaacaagaggagtggacttatgtaattccctgtgtttataggcccagagtggcagaggcgagaacggatcgctggaggcccgacgtctcgttcacggcccagccgtggggtcaggcggccccgcacttgtcgccggtgggccttggcctgcccgggtttggggggcatcgggctgggagcctggggggcctggcctggccctgcagggcctccagggccgggatgggagtcgtagtctcgcgggaaggtgaggccgccctctggggccgcccctctgcgggtgtcatcctggaggaaggatgggtctgatgttggctgtggtgtgcctcctggaagccggcagcacagcctgtgtgtgtggactctgctggcccgctggctggcactttttttctttttctttttttttcttgtgagagagttacttcaagttgtgtttggagctgacgtgagcgaggttggtcatgtgctcgggtaagagaagtcgccgggcttggagtgggcagggaggtgcagtgtggctgggtcaccccggccgggggaggtgggcgcagactggggtggggggctgtggcctgcaggctctatgcaggggcgctgattgggggccgaggaattcatctggaaagagccccagttctgtcgctggaggtggtggccagggctgggggctgagtggccggccgcaggtcagccaatgggggcagctggaccctcccctggcagcgcagtgttgtcggccctgagctcagcgggatggtgggcagggctgtctcatcggacgaagttgctgcagtcacggaaaagagcgctcggaggcgctggccgggcaggccggggtgaggcttcttggccggcccgcgtgggaggggacccgggtgggcactgtgctcctctccttggtgcacatccggcgtccctgggggggagcatggcgagccttgggggctcagggggcttctgttcccggagttgacttcaggagggcatgtgatcgtgggcgctcccgaggctctgccctggggctccgcggtgggctcaggcaggggagagccaggtgcaggcagcgctgcagcccggccccggcgcccggctccccaccgaggtggcgcttggctcggtgcccatgtctggtttgaaatcagcgccaccggcccaggcttgcccagggacttggcagcgaggagccgggataaacactggaaagttggaagggcttcccgagctcacaaggagcctttagttgcaaaccggggggatgagggagtgatttgtcctgaggtctgggtgcgccgcggccatagggaggtggcgggaatggctcctggggacctctgagcccaggctggggaagggagggggctgggcttccaggcaatgttgctcctttgccacagacctgggtttgagtcctggctccgtcctctctatgctgtgtgaccttgggcgtgttgcctcccctttgcagacctcagtttcctcgtctgtaaaatggggcacagtggggtctacacaagcatgggactgacgggaga

SEQ ID NO: 6133 - DNA, 6000 bp, Homo sapiens
agtataaaatcaagattctaattgaaggtaactgggcagaaggatgggccgagattaacggtgtgaatgtgactgacgattcctgtgctgaggcctctgctggacttaagaaagtcagctgaggagttcaggccctgtgcctggctcaaaggcccagggacccaggcccttagcttctgccctgctctctggatggaggctgtgggactgctctgtgcagtgtgaagcctccatccgctacacaggtccaagtgggtggcagggggagcgagaatgcctgattctggactccttggttaggctccctgggttctaatcccagttttgccaattcctagctgtgtgaccttgggcaagttgcttaacatttctttctgggccttagtttcctcattggtaaaatgtgcataataataatcccttcctcataacattgtgaggctgaaatgagaaaatgcatgtaaagtgcttaatgtatctggcacatgttgtttaacaaatattagctgctgttgttattgctaataatagtaatatgcccacttctgggtagggatattggccaatgcagagcttgtactcaggaggccaccaggacctgtcacgcagagggcctgtcagcggtgtcctgttgcaaggggcagtttattaagaaaagactaaaatacttgctaggaaggactagaatgaggcttcctgtgggccagtgcaggggacagagctgggatccagggctggggacttttagagtcagggatgtgattcaacataaggaagaacctctgctctggctcttggatctgccgccaaatggaagggacagctcctgagctggaatgctctccccacctagctgaccttcctcccagcacagctccaatgcaggcatgtgcatccaccacccttccacgcacacttactgagcacctgccagtgctgagcagggtttagagactgcagactctgcagtgattgagatggacagcgtccttagattctggttgggtagacaggtgataaaccagtgaacagatgtgaacattagacctatgatgaataaaatcaggctagtgtggtggggtggggatgcaagctgttcagggaagtgacatgggaatggaaacctggttgatgagaaagagccagttctgggcagagggaatggcagatgcagaggccctgagtggggagagaaggcccacgtgatgggaccatagtgagtggctgggaaatgaggttggtggggagcaggagctggggactgaagtctggcctgatggtccaccccattttgggggccactttctcctcctccaagcccactcagcctttggtttgctctctgcacagtgcagactgtacttgaccttggttcatcccttatcagctcctggggctctgggatcttggtgtgctcattcttgcctctcctgttgttcggggcacactgcctggctcccgggggtcctcagtaaatgcttgtgatgtgactattgaggggggcattttgatctggaacaagtggggaaacagatacctgtttgaagatgctatgaatcatttgtgggcaccacctggtgccaaactctggcccccgttctgagaaccagatggggaagacctgggcactcaggttgggcctgactatggtaggtggtatttggccctccctacccttcctcctcagcagtggggtggtagggagaaaagacaaagctgggggaaactacagaccagtttcggggggatgggaggatgacactgtcatcctggaaagcaggtgtagtccatgggccggggcaggttggaaaccttgtcttgctttctgtttggggttaaaggtgctccagatgttccagtctgccctcccttccctccttgtctcctgtggccttttcctgcttcccatcatacccacaggatcgggagggaggggtgctgacaatgttgtaaggggagagcctgggtactgtgggccagaggatcttcccttggcctgtagaccttgggcaaaggtcaggtgggtgaggaagcccattgcccaccctctggggtcctcctcctctttgcccctcctagctcccatcatctccttctcttttcccagacctcatctcagtctgaagggcagtccaatagccagtgaaggcctggtcctgccctcactctggtgcgtagtcgagaggagagagcactggaggggatggaagaagagaaggggagatgtgggtcaaggtgccgtggctgaatggggttgggggagagctgaagaggctggggtgtggggtgaggcacacagttggcttccaccctggaaggagaggccaggtgcccagggtaccttggactaggaaccaggggttggggctagcttttatgtgtgtgtcctcattgaacttctcctaatattgatatgtagtagatatgtgtatccagcactgtccttaagtcttttacacattaacttttttttaagcctgctgataagcctgtgattgttaattttacagatgtcatcatttttacagatgaggagcatgaggtacaaagagattatgtaatttgcccaaggtgataagcagtggagctaggattcgaacccagacggtctgggatcccacatccactctactctaagttgagtggagcccctgtctcttgggggcctccgaggctttaggggccaaactggagccccttaaggagagtggggtattccgctctgtcctcacaatagctccctttctgtgcccgcagcatgcccttttgtgcatgtcaaaggccgagagccaggaagggtatgaggtggagttgctagatgctgatgtgtctatatggctctgaaatgccccagatgctatcagcagctcctggccacaccctacacccctggaagcagattgcctggggcctcggcccccaggctccaatgcctaacccggggaggtccttgggcgctggcttgtccccctcttgtggcctaggtcctgccactgctcccattcctgcgtgtcctgggcatgctgtctccagggaatgtgcctgctggctggtttctcttcactcacatcgactctccctctgtaggcctccaccatggacagaggccaggccctgcccctcccaggcagcctggctccttctgctgggccctgaaggcagacgggataatgtggttggccaaggcctgttggtccatccagagtggtaagtgctctgctattgtcctttgtacacccctccagcaggtggggttggggggcagaggtgggggtggagctgcccaaagcggatgtggttagggggatggaggggaagccctggggaggtggcagccgaggtgctgttcagtgtgcgggatctgatttctttagaggttggggtagtgtgagtgtggggactggggaagccttattttcttggcaggataggctggagggctctctgggcctaggtgacacgggctggtgggagtaggggatgacagctgctcccaaggcagcatgtgcctgattccaggaagcagatagggtagaatagggtgtctgggggctgggctgggagcatcatggggcagacgtggcagcggggaactggcctgtctcccaggtgtagacacttctccaggtgagtgcatgaagggaaggctgggacctccccttcctcgtggaaagcatggtgcctgcccctcctcactgtggcaggccagagggcctatggagtctgtggtgtcgggggtggcctctgtgaatgggaaggcagggacagcccttccactactggtgttctagcacatctccttcacttacagaagaggagacttaggtacagaggggagaaatgacttttccaggggtcctgcagtgaggatgtgtagagccaagcccagaaccatgcctcctgggtggctggcaagcacaggcacctggtctgactgtggaagacataccttccttgactgagggtgcttccggagaaggcccacactgatctggggctgagaggtggaggacgggaatgggattttcagcaggcctttcctggggacatgagatggggccaagggcactgtagtcctggttctgtgcctaaaggagctggagctctgccttgcaccccagacaggggtcatgagattcccttcctccttccctggaagagggccatctttgggcagcagccctcccaggccttgagaaatcccggatgaagcacgcactggctcagtatctccctcagcttcccaaacactgttgcctcatggggggtcagcgttcagggtgcagagagccccagagaggtggctggggtggggaggatggggtgtctggtcccagcctggagggaagggggaagccctgggaagcagggcctcctgttctgggggcagggctgggtgtgtgcctggcctcctgatggcagcaggtgctgtaccaccaacctcgggctgaagacagggagaggaattactgtaagggggagaggcaggtgttctctggtcagctggagatctggacttgggaagcacgtgagtgaggatgacagcagtggccaggtgtccctccctcaactcggcccctacatccgcccccagtccagacccagcttcctgagcactcagccctccctctgggtacacagcagccctggtgggcagaattccttgtgtttacctcgttgtctgggtgatggtggtgattgggtggaactcccatgccagatatactgccaaggccaccctgaggggctgccaaccggggccccatgagtgctagagctgctggtcttgtgacgtgggcacctgtctgccaggcctgggcacgggcccagggtcacgctcatgctggggctcccgtcagctgactattttgggctcttgctgacctgggccaaagtcaggtccagtcaagagggcccaaagtggctccccccatccccagaggccggctctggtttctgctatataaacagaggaggacacgccggcttggaggcagcaccacatccagagctcgctcagctgctgcccagcctcggctgtgaggataggctggctgggcagcacgtctctccccacagggctccctgagaccaccaggaagagcccccaaccaatcttgggattctcccttcgtgcggttgtctgggacctttttccagggtcaaagcagatcgtgaggaggaagctggtgagtcttgggacagggacattgaggaatgggagctgggctgtttggattttttcccattgtgactgtcatgccaaaccctttggccttgggctgcggggaggaagcaagggtggccgacaactggaggcatgagtgtgcagcttgaccacagctggatgacggtagttggacttgtgaacgctgtgactgagaactaggagaggtgtacagagacagctaatgcagtctagctcctttctcagagcttccccacagggtgtccgtcctcctctcctctccaccccgcctggatgaggcactggtcactgcggcgagtttggtgtccattggggtatctcaggattggcttctgagtggggcccctgagcccccactagttgggactgagtggctgggccaggggcttggcgttctgctgagccctcagtccctggcctgccccgcttgccgggcccttgcccggcctcccagctgctttgggtgcctgagaagcagagctggagagaggtctggcaagtccgccaaccagcttgccacaaacacgctccgggacctgggccagggactctggcccggcatggaacaggcagcagctccttacgtgggaggctcctgtgctctccttcccagttctcaaaaaaaaattttcccctttctgaacgtgagtctctaaacgaatccagagcctgtgactaaaaatactttaacaataggaaagtgcatcagtctttccggctgggactcgttatcagagagtttttattttggaatttgaaattttgcccacgtaggctgggtggagaccttg

SEQ ID NO: 6134 - DNA, 6000 bp, Homo sapiens
ccagaggtcaggagtttgagaccagactggctaacgtggtgaaacctcgtctctactaaatatacaaaattagctgggcgtggtggcacgtgcctgtaatcccagctactcgggaggctgaggcaggagaatcgcttgaacccaggaggcggaggttacaatgagatgggcgacagagtgagcctcagtctccaaaaaaaaaaccaaacaaacaaaacaagaaaaaaacaccaaaaaacaaaaacaaacaatatgtaaataaatttctggttacctcacctttgcattattacattgctaacaacagctttggaatccacgtcttgtattgcttttattattgtatctaacagtctttccggagccccattctgattgaggcctagcaagtgtcaggaggtagatcctatacaatcccattcacttatctttcatttcctttggctatttctcattgccttatgcttcacttagctgtgtatgcccattttcttagggtgcgctttatttctttatttttatttttatagagaaagggccttgctctgtcacccaggctggagtgcagtggcacaatcagagctcactgcagccttgaactactgggcccaagcaatcctccctcctcagcctcttcatgctttatttgtatcagaatacactcactttgaaatctgcttcttccctatgacttatgcttaaattgaacgaatcttccagatgttacagagtcagtcagatgttttaaaatgcaattaaaggttttgagatgcagtttgtagaatatttctgacatttgatttcaggtatttttccatctcactgagttcaactcaagtgaacgtagttctgacttcttgggtgaattaaagttcaaagtttccaaaagatagagagataccattgtctcagataaaatgaagctttgtttcagcatacttgaaatattttgtcactgctatttcttctccacagctcttccatagctgtaagcagtctctaaggcatttaatttactgttactttggttttttctttctcaaggaatctcagttctggttctcttgatagtggagtaaagaaatgggagaaggaaagaaatattgaatgagcctcttcttattacaaaatagattactgattctttcagcaggggcttgcagagtttggaaaaggtgtgcaatgagtcagagagttggccagctggtaggcgattccactgcagtctaggccttagctctcaaccctgcaggctaagaaacagattcttagggatgccaagttaaaaaagattgactataaaatcatattgcaaatatattaacttacaacaataaaaataattgtaatgataacagctagtatttcttgagtgctttatagaaattaatgtgtcagatatcaagctaagtacattttagatttgttaacagatttcctgggttggttccaatctctgccatctactaccctgtggtcttggacaaattccttaactttgcacaagttacttgccttatttaaataaggtgataagaagaatgcctggcacatcacaagtactctatttgccactaaaattcactctcacaacacacctataaggtaggtaccattactgttccccttttatggtgagaaaaggaatatttagtgatgttaaataatctgctaaacattccataattagtaagtaggcaactgaaatataatcaggacaaggaaacaaaatccaatgtttaagtctccaggcttagagaatacttctattaaccttgtcaactgggaaggtctttcaataagattatctacctttaaagtctgctgaccatgtctgttctgaaggatagttctcagaaaaaaaacattgccaacatttactctaggacctcccttttttcatgccttcatagctgatgccccactcagcgtgagaggtacaacattcacagtgctcccaaatactctgccgaacagtgccatcagatagaactttctgtgacgaaggaaatgttctagctctacttcgtccaatacagtagccactattcgcatgtggttattgaacacttaaaatgtgactggtgtgactgaggaactgactctaatttaatttaaatcaatttaatttaaatagcctgatatggttgggctctgtgtccccacccaaatctcatctcaaattataatccccacatgttgagggagagacttggtgacaggtgattggatcatgggggtggtttccccatgctgttctcatgatagtgagtgagttctcatgagatcttgttgtttgataagtatctggtgcttctcccttcctactctctctcctgctgccttttgaggacatgctttgctgccctttcaccttctaccacgattataagtttcctgagacttccccagccatgcagaactgtgagtcaattaaaccttttttcttcataaattgcccagtcttggatagttcttcatagcagtgtgaaaagagactaataaatagccatacatagctagtggctactgttttagacagcagagatattcaggaaaaaatatttttttagggaaaaaataatatgagacagttgatcatctctaagagaaattcaaagggatccaatcagtcttgttatgagaacattctgtgtgaatttcactcagcaacaagggtttcctgggtcagctaaataatcctgctcatttcttatctagtatagatgtttctgagggcaaccgacaggtccatttattttggccagtgaaaaacttagtggagaattcttgaaatggaaaattctgaatcattcgtctagcttcatatcctttgggtagctttttcacctatgaccctctcagggaaaggatagctctgggattgtgaggaagggagaacgaggtcagaagtaaactgaggactgaaaatggctttgcagatggtgaccccgatcaagcaattcaaactgaaatatacccatagaccaccactcttttcctctttcttggcaattagggcaagtgtaccttagtttttccaccacgggattttgagtcagaagacctgggttaaagtcccagcttcattccttactaatgggatgactatagacaaatcactgaaactcactgagtttaaaaataggcttaaagatagtggaagttagaaataatacctccctccaagggtgcaagtgaagatctgatgagataatgcatatggaaccgctttggaaacttgtgaaggctatagaaatgtcttagcaatgattattccacttgtatagctcacctttgcctttcaaaattgctttcatatttactatctcattttatcttcagaacaggcctaaatagggcatgaattattatctatgttttaccatctattgatgtggacaaatggggcccacagaagctgagagactcatctaaggttacacagtgcatctcgctacattatgcctgggctccaccctggatcaactgagtccccttctaaagccctcatttctaaaaaacaaccaatagacttaagcttgatgtacaaaagttatgctgaaggataaaatatagaattattcctattcaataagcaacccaaggtacaacatgagtccaaagctgagcaatcataacatcaatgtagtgatgatgggtagccacctgttgtgctaagcattttataaatactattttagttaataatcacgtataattctttgaggttgtatagttatcaaccccattttacaaccaaggaaataaaggcagaaaatggttcaggaatttgtccattgtccacagagctaataagtgccaagacagcctggatgtattagtttgctgggtctgctgtaacaaagtaacatagactgggtagcttaaaccacagaaattatcccatagttctggaggctggaagtccaaaatcaaggtgtcagcagggttagctcttcctgaaggctgtgggtggaggatgtgctccagggctctctccttggcccacagatggccatctccgtctcctctctgtgtgttcacatcaacttccctctctgtgtttctgtctctgtaaccaaatttccagtttttataaggatacaagtcatattggatcttcattttaatttgattttctctgtaatgaccctatcaacaattaaggtcacattctgaggtactggggtttaaggcttcaacatatatacatcctcatcttacaatggttcaacctactatgtttagactttacaatggtgtgaaatagacacttttagcatagttttcaataaattgcatgagatattcagttctttattacaaaaaaggctttgtgctagatgattttgtcttacatggtggtaggcatgtcttacatggtggtagggaagacagaatgagagccaagcaaaaggggaaaccccttataaaaccatcagatcttgtgagacttactcactaccacgagaacagtgtgggggaaaccaaccccatgattcaattatctcctacaggatccgtcccacaacacgtggggattatgggagctacaattcaagatgagatttgggttgggacacagccaaaccatatcaagcattatgctttaaattcttccattttaaatcataccattccattttaaatcataccattctgccaccttttgatggggacaaatgtcaggacccggagcatggcacttgacctccaagtccagttttagagccagtgaacagaaacccaccctctaaaagttcttaaactggaaaagtactcccccaaaatgtttatctaagagactggtttccagcttactaggcaatttggcattaagaactttcctcataaacatttacaaatattctgctccgtaatgaagttaatcagtaaaccacacaacctctgtcctctctcactccttacctagtctcattttcagtggctgtgaataagctaagaatggtaatgcagtttcaggggttagaaaatccaattcaaattagtcctcactgcagctgtacgccgtcaggatttttcatggaaatgatgagtatgaagcccgcgaaaggtaggacactgttcacaggtgctttcaggtcgagctcttgcaactggactgaggaaatctggggactttggttggagatgacagtaacagatgtctgtcaaagatagtggctcagtcagacccagaagactggaatgagagtttgggttggggtgatttttatagggttctaaacagacgaatatcttatggggatgaaatccaaggatgtttcccctaatattcttcatagactcttatgtcaaattatcactattcttccaaaccaaacattagacaattctaatattaatatcaatggacacttgaaaaaacattttaacagacattatttaatgcagtgctcctaaaatggcaagtctcagttcccaggggatcacaaaatttatttagtgtctcgtgaccagcattaaaaactggattagaatataatagaatagaaatattagtgtccctcaaggagtaaagacaagtggtatttcatgaaattttgtttcagttacatgtgtataagtatgtacgagggatatgagataaaatgtatctaaaaccgtaggttgtggtaaaaaaaaaaatgaaaagagtttgggaaacacgaattaatgaagtagtttcacagcaggtttctcccaatagtccatgaaaaatcagataagcacagagttgagctttaggcccaggctcttggttttctctgaattaaaacatcgattataattaaaacacagtataatgtaaatcatattttaatattttttaaaacagaaattcatcttttaaatttccagcaagaaaaaactcgagtcatttttataataatgataattgtgaacatgtttttggtcatagacttggtagcataccattttgtttaaatgcgatgtttaaaagtgaccgacactgtatttagaaatggaaatgag

SEQ ID NO: 6135 - DNA, 6000 bp, Homo sapiens
accgaggctgggctttctgaggctccatctggaggtagcgcagggaccttcccgtgctgggtcctactccaccatcatcgtggggatgaccactggcggctgtaaacactgacccctgtcactgcccagtgtcggctcagggagccacggaatgatggcctcaccctctcctacccaggtctcatgggccgtgccatcccgccggagcgacacagcccccaccacctcaaagagcagcaccacatccgcgggtccatcacacaaggtactgccctgttccctgctccctcgttgcccccaacgggtgtacagtcacgcagggcgcgggagggagagacacagccagagtgtggtgggaactcaggacaagtatgcagaaaggcctgcagcacacatgtacatgatcagtacgtgagctacggagcaagggtgtctcttacttatttcaaaacaaaaacaaaaagcaaaataccaccgatcacccctgtgcttttaggtgtcacatagcaactgtcctgtgcttggcactaacccaggtgccacctgcgtatcgttttacagaacatcctggtgaggcacatgcgattgggagaggcttggagagctccgagaactctttcaggttctcgcggctggtccatggcacagccagctactgtgaacttggcagctttgtgggttttattttttatttttttattttgttgttgttgttgctgtttgagacagggtctcattctgttgcccaggctggagtgcagtggcacgatctcagctcactgcagcctccgcctttcaggcttaaacaatcctcccacttcagcctcccaagtagctgggaccacagatgcacaccaccacatctagctaatttttgtatttttgtagaggtggggtttcaccatgttgcccaggctggtctcgaactcctgagctcaagctgtctgcctgccgcagccccccagagtgttgggattacaggcgtgagctactgcacccagcctgtggttttagcttcatgatttcatagtgttcccgacttgctgaggtggttcagttaatattcttgttttatgtgtgaagaagctgaggcccagagaggtcagatttcctggtcaaggtcacacagcaagtggggatttgaactcaggcagactagctccagaacccactggtgtggaggctcttgatgggtctgggtggggcggggcgtgagggtcagtgctgtcggcccggcagggatccctcggtcctacgtggaggcacaggaggactacctgcgtcgggaggccaagctcctaaagcgggagggcacgcctccgcccccaccgccctcacgggacctgaccgaggcctacaagacgcaggccctgggccccctgaagctgaagccggcccatgagggcctggtggccacggtgaaggaggcgggccgctccatccatgagatcccgcgcgaggagctgcggcacacgcccgagctgcccctggccccgcggccgctcaaggagggctccatcacgcaggtatggcccagggccaggcacacgggcccagttctaggaggggtggcggtggctgtggggcactgccctgggcctctccacatggggaaaccgaggctgagagccctcgcgtaccttacagtcacccagctgctcatcaccgggcctcagctgtgcgtgttccagggctgcgcagggggcaccaggctcctgacctgattctactgaactcacattgttcccattcttcagggagggaaactgagtcccagagaggccaggcaggcttccaaggccacaggactaaacatagtgacgagtaactgcctccgttgaatctttgtgagggtccaggtgcggcctgaggatgttgcatgcgttcattgtttcaccccctagcaatgctctgaggtcgttttcttaatgaccttattttattgctgagtaaattgaggttcagagaggttcaacgactcacccagagtcacgcagcaaatgcagttgtgaaacccaaattcagatgttcctacagccgcagcatccactgcacccaccagcaggttgcaccacaagaggccccagtccccccaggcggccccagctcagtaggggaagttccgtgccgatggtacgaggacgaggagctgttcggtggaaagcccctgaaggccactgtccttccacatgggcagaggtggcctcttgtgaaggggaaggagaatgggagccaccacggggctgtggggctgtgaggcggaaggactggggtgggtgtcccgggaggggttccagcttgtaggaaggttttgaagccagggagaaggcagaagcagtaagatccctgattgccaggggaagggtttggctctcagcccctaggcaattatggagtccttggaagcatccaccgcatgaccaagacagggtccagattctagaatattcttttgaaaaacaagggcagttccccttcttacgacagtaatgaagacatccctaaatagagttttgttgcttgcaaagccctaaagtcccaccatatcaagtgtctccgaagcctgctgaaaagaggcaggggacctggtggcctggctacgaaggtcccagtctggactgtgacccccccatttcctcaccatcctttctgtctggagggcaaacacctcagccctgacctcagtgtccctggggctgaaagcctcagggcgggtagtattgggtctgggtgctgactttttctgcttggcattgggtgggccatggagggtcccaggctgaacagaggaatgttttttacccacatgagggtgttgggcttctttctcgcaaactccagggaccatcagagagcccaccactcgcggcagggagagttgactgttgaactttttacccctttctgcagtccccccagggagcgtggggaccagggtcaggcccagggtgcgcagggcagtaagtaacaagtgtgccatctcagggttagcaaagccctctgtctccctgcctctggaggcatcagatgtcacttccatcttatagatgacaaactttttgaggctcagaagggggatgcagctggtctgggctatggctgtggccagggctagagcttacatcccctctgccccagggcaccccgctcaagtacgacaccggcgcgtccaccactggctccaaaaagcacgacgtacgctccctcatcggcagccccggccggacgttcccacccgtgcacccgctggatgtgatggccgacgcccgggcactggaacgtgcctgctacgaggagagcctgaagagccggccagggaccgccagcagctcggggggctccattgcgcgcggcgccccggtcattgtgcctgagctgggtaagccgcggcagagccccctgacctatgaggaccacggggcaccctttgccggccacctcccacgaggttcgcccgtgaccacgcgggagcccacgccgcgcctgcaggagggtgagtggggtgtgcatgggcgtgagtggggtgggcgcctgtctggagaagctgtgcctccccatccaccattagcttagtttgcacctgggatatcctcgccacccgctttccaccacatccaaaccacctgcaggcccgtgggctctgcctccgattccaaaccctgtccaactccttgccacctcccagaccaccgtggtgtctcacctagcttcccccacgcccctccctcttcctgctgtaatccactctgcaaacagctacccggatactttctaaaaatgcaaatcatattattccacttccctgcttccatccttctagcaacttcacacattttgctatggccttggggcgcctgcctgttggggccctgcctgcctctcattcagccggattccttcgtcctccccagccccagcccctgggccctctttctctttgttccctggccatgcttagctcggtcaattcagtatttgctgggggcctttgcgtggctcctcctctctgcctgccatgtccccgccttccagatctttacttagtgggtttctttccatccctcaggtctttgtttacatattacatccttggggaggcttctaaccagaccccctatctccagttcatatcacatgctgtgacattttaaaattgtcttccggccaggcatggtggctcacacctgtaatcccagcagtttgggaggtcaaggcaggcagatcacctgaggtcaggagttcaagaccagcctggtcaacatggtgaaaccctgtctctactaaaaatacaaaaaaataaccgggtgtggtggtacgcacctgtattcccagctactcgggaggctgaggcaggagaatcacttgagcctgggaggcagaggttacagtgaacggagatcgtgccattgcactccagcctgggcaacaagagtgaaactcttatctcaaaaaaaaaaaaaaatgaaagaaaattttcttctgagcgtgtttcactctgtaattctcatttgtttgctagtttatcacctgtctctcgcattgaatgtcagcttgtgagggctgggatttctgtttcgttcactggggtgaccccagttctcacaacaatgcttgccacgtagtagaggctgcatcaatattttttaattgattgagtgagtgaatggatgaaagaatgaattttttaaaaactataacacaaaagcaaatgagtcagtgagcaaaaagtgaactaaggcaatgaagaaatgaaggagtgaatgaagagacctggtccttgggatcccgaggtccctatcctcaaacaactccccgtaaatgccagccccagaggcccgatgcatccaccttgcccgtccacaggcagcctttcgtccagcaaggcatcccaggaccgaaagctgacgtcgacgcctcgtgagatcgccaagtccccgcacagcaccgtgcccgagcaccacccacaccccatctcgccctatgagcacctgcttcggggcgtgagtggcgtggacctgtatcgcagccacatccccctggccttcgaccccacctccataccccgcggcatccctctggacgcaggtgattgccctggggctcccagaaccctgcagtggtgctgaacagggccacggacctcatcagtgttcgctcagggactccttaggcatcaactgtcaggttcccctggatggcgaaactgaggcctcgggattggaagacccaacagtgtaatcatgagcttaggttggagcagaatttctcttagtagtttgcaggacatgtggggttaaacatttcagtggttttcttttccggcaggacttatcagtgcctttagcaatgcaaaggtatagaatgaggacttgagtatatgcatttttcaaatagacatgatctgaaagtcttttttaaaagttgccgggcacggtggctcacacctgtaatcccagcactttgggaggccgaggcaggcggatcacaaggtcaggagatagagaccatcctggctaacacggtgaaaccccgtccctactaaaaatacaaaaactagccgggtgtggtggcgggcgcctgtagtcccagctactcgggaggctgaggcaggagaatggcgtgaacccgggaggcggagcttgcagtgagccaagatcgcgccactgcactccagcctgggcgacagagcgagactccttctctaaaaataaaagaaattaaaaaaaaagaaataaaaaaagttgcatccctttggagtgttaatctgcattgggatgtcctatgtttgggacaactttgatgcaaaaagcatccttcgtagaagtcaccctcttgtgtcctggcgtgatgttttcctgctgtccgacgctcagttctggtttgtgctttgggcagccacacatgtaggtgggagaagctgtccgggtgcagaagtagggggcatccagacaggtggagcgacaccatcaggcctaggtatggctggcctcacatgagctc

SEQ ID NO: 6136 - DNA, 6000 bp, Homo sapiens
ttccttcccctgctctccaagttgacctaaatagtttttgcaccttttcttaggttcactgaatctccaagcagcgaggtgtatctggaaagacagctcaagaattaagggtgctcacccttaattacactccattttcctcaggacaggctggaacagatttgggatggcgagcccccaaaccagcactctacagatttcgggacccctcttaactcatttcccccatcctcccaatgacgtctattcgcctgcagcagacccgaaggaagcttcggctcaatggttcatttgcatgcgcccgtgctattggtcggaggggcggcaccgtagccaatggtgtgcaggggtgttgaccgagccgcagctctgcgccgccgggtgaggtaatggaatcctggctggacctgctgcggctccctccggactggctagtgacgtagcggcttccccggccccaccccgcccagcccggccgcccccgggagcgcagctggggctcggccctgttccttccggcccggcgttccggtcgcgggcccctcagggaggacccgccgggccagatcccatctctggcgacgcggagaaaaatctggaagccgtcgtcggaggatgaccaaatcctcgctcctctgggagtgcgattacgggcctctcacttcgtaaatcacgcaggcctgaaacgctcacatttgtttaccacgagcatgtttgattttgtaatttaacaaataaaattgcagaggatttttaagagccctggcctggatttaggggaaatctcgcattaattccagctctgccatttccggtctggagaccttggccactttctcttggggccctgacgccttccatggcaactaagtagagcaaacgtggaagtgcttcgaaaacaccaagtggggtctcctcatccttatgcaatctggagagtgtaaccccatctgggcggtgtctctggacagcccctgagccctgagacagccccaggaagacccgtctttgtgtctctattttttcggcccttaaattgctcttaagcctggggagaggtcgggggaccccggccaggtagttcttgatcctcaagaagaggaaggaaaccatgaagggaatcccttccacagcccctctccttattcagggccagggcctgagcaggggagccccttctctgcccaaatgccctagggaacccccttgacatccttttacccccgcccccgagggccaggatggaggtggagtggaagggtgtctcctaggtggggtggagtttcagatgctgtgagatggaagggcacctggggagggccactgagagtctggcttatggtcctgggtcctgtggcttaccttggcccactacttcccaccctcaggatctcagccctgccctgccgcatacctaaggtttgggggcagcctctctcctccatggagtgccttttctctataccctgcctggtcctgtctcttctttcacactgggccctacattctcttcctccagggaggcctcttgagactagtcctctagattctaccccaatgccagctcaaggcttcttggaggccacttcttggatgtcctggcaatgtttccatacctattcttgtgtcctgcctccccatcagactaggagccagctttctgtgtaggagcttgtcctctaggaacctcccacaatgtggggcgtcactggccatggtggcctgtctcccctctgctccgactccctgggccatgcacgttgttcaccttttctctcctcacctttcctatctgcaataggggctgtgaagcagtgcctgtagaaaggagaggaattagatatgaaggaacaagaggctgggtagaaagagcactggcctgggagtcagaagaccagggctatggagacagaagaccagggctatggttctggctgggcaactcactagctgagtgacctggatcagggagacaacaacagggcagacgtttactggacatttgtaatgactaagaagcgacattgctcctatctgtgcagcccccacggcccccagtattcccaataaacatactggctgggcaaagctagggtaagcaccttggatgtacagcttcaagacaaggtcccaagtcctccaagtcctcctgtatggaaatggcagatctgccatgatgtgccagactccgcttcatgctttatgtctgctctcaaagaggcactctcatggcaaccctgtgagataggtttcttatcatctttgtgtttgaggtgaggaaactgaagcccagagagggcaagtaacttccctggagtcatgcagctggtaagaggtagagcctcttgtgggttagggaaatgagactcctagggcagagcagggaggagaactaactctgagtgcctgctgtgtacaaggtacctccacatctgttcagtcctccgacaaccagtgtccatcccagacctctagagactgcttcttccaccatctcacgccgcctccacatgccacccaaagcgtgcgtgttctggcattccacattttagaatatgttttatttgattataaataggagaatatataataaagacaagttatgctaaaagtatttatggaaaggagagacctctgtgggctggaagccttcatggaaaaactggtaactgagccctttttttcccttcctgtctaaataaatgtatttctcccacacaggcaaatattttaaaatgtatttcaaaagttagacttctggaaaaagaaaggaaaagagggggtggggtagctgctcctctaagaagcccatgtgaaagaagctgctggggtaggaaacaggagggcacagggtgagtgaggaaaagtcagtccctttcccccaccccaacgccttgtcatttttgaagcctcagtttctttatctgcaaattgacctaatacttgaacctgggagagaaatgtacaggttcttgggatgtgattttgagagacaaactctgcagaggttcttggaatcattatgaagaatgagagaaagggaattctgagttgcgccaagagtttaggatttgtccagcaaaggatttctgggggtgggcagtggggtggagagaggaatgcagcccctggaatgagggctgagtggaggtgtggggcctcttttggagaattttgagcacagaagagattctttgctgcgtggggcctgggctgggtgctggagattgtatagcatgctcataatttaaggtggctccaaaaaggatcaggggctagtggctggcacagcagagcacatgactggatcctccctaatgggtgttccccaatgaccttgcctgtacgggggtataggagcagagatggtaacccccaaccccacccagccagccccaatcccattgctccaactttggccgggccttcctgaccagcctctcctgagtgggcagctgctgggggagaaggatttgctcaggacaggatggttcttccatttccaaagagggctccagtcacatgggagagagaaaccttccaagtgcctgcacccccaggaaaattcttaccatggaagcctgggcctgaagactctggtcagaggagggtgggcttcccagggcttcctggtcacggtggtgggcctctgagtgcatgaagcactcctttggattggggagagcagggagaactaactcagtatctactgtgtacaaggcacctccacagctgttatcatcctgacagccagatatggtggataatctgatcatatcatgttttagagacgaggaagctgaggctcaggaggtcaagtgactgtcctaagtcacacagtggtatgggagcagccagatcagtgaatccatcacctgggctttgccggggcctgcacccccgcctcgggaagtgccctcttcaggagaaagtcctatttctctgtaagctgccttctcgtgtggaagctgggtgccctgctacctgggttccttgcccttggggtggcatgaatgccaagcgatgcaggcagggcgcccgcagactcaaaggccaggccctgtcctcgccagcagccgaatcgctgtgactttggaccgccaccgagtctctctgggcctcgctctttccacctcttcctggggaagccccggctaagtttctttataacctagccccaggtgcccagcctcggaaggtgtgagcgagacctcggcaccctcacctgagaaccagctccccggctctggccgcgggttatgtaaccgggtgtgcggcgtggggggagccgcggggcggggcgctcgcggctattccgggcgccgctatttttagccccattgatgaggctgcgtcggccgccgccgccgggattccggagacgtcaatgggcacgcgtcacggtccccgccccgcccgccgggggaggcgcgccggggctgggacagcgcgcgggcggccgcgggcgcgggggcggggggcgccgcgcggccggaactgcgggcggggggcttcccgggggcggggggcgctgagcggctgcggcgcggctgcaggagcgcgaggaggaggtggcggcggcggcggaactggcgggggtcccctcgcggcgcccgggacccccggcctccaggcatgggcgcccctgcggtgcagagcagctcagggccggctggtgcgcgaccccggaaagcgggggtggagaggcgagcggagcccgcggggccaggtgaggggctgccggggtggcgggaggtgggccccggagaggccgggcaatctcgggtcttcggtggatgcctttgggcgggctcggggccacgccggagtcccgcttggaaactggggagtcgggggggggactggattcccagcggaaccgctggctccgagtcagcccccaagggcgacggccaaggctttctctccccagtccgccaagggtggggtttggcccacgaggggcgctggaggtggccaggccagagaaattccttccatttctccgccggctgcgggaaccggttccaggagcgcgggagctcgtctgccaggagacccagccgggagggaccgatgctgcgtgatgcaaccccttcgagggactgagtcaagaaaccaaggctgggggtctcgtggagtcaggcggagctggggattaggactcggggcttgtgtctcccaggcgtgtttttttgttgttgttttgtttttttgccgcaacatcttccttatactgggtggggtgggggcgggggtggtctgtatttccagacctcctccatggtggtctggctgtgtggagggcagggcacagttccttgacttggctcattcccccccaacgccccccctttcttttttttttgagatggagtctcgctctgttgcccaggctggagtgcagtagcgtgatctcggctcactgcaatctccgtctcccgggttcaagcgaatctcctgcctcagcctccagagtagctgggactacaggcacccaccaccacgcccggctaatttttgtatttttagtagagacagggtttcaccatattggccaggctggtctggaactcctgaccttgtgatccgcctgcctcggcctcctaaagtgctgggattacaggcgtgagccaccgcgcctggcaggctcattccctttttatgccttcgtttttgatagatgacctggggatgggagaaatgctgcagaggtggtttatttacagtgaattgttaatttggttgtggggctagtattaggggcacattgggaaaacacaggctgggcagaggttggtaggttcacaacagttatgcccactgggtgctgatggatttgggggctgtcgtcggcctggcttggggccctagtggtggggctacaaggcttgctcctagatctactccaagtgaacatttaagatcagtgacttggatggagacttaaaaaggaagtcagctgactccgtgtagtcatccagagctgtgaggaatgac

SEQ ID NO: 6137 - DNA, 6000 bp, Homo sapiens
gaaagacagataatacataccataaataaaaatttcaaaagcaaattgtaattaatacccttaggagaagatatatgcccattaagaacacagagttgatgactcaaggggcatttacaaaacacaaagaacacaaagctatgaaaaaggaacagtaggccaggcgcagtggctcacgcctgtaatcccagcactttgggaggccgaggcgggtggatcacgaggtcaggagatcgagaccatcctggctaacatggtgaaaccccgtctccactaaaaatacaaaaaattagccgggtgtgatcgcaggcgcctgtagtcccagctactagggaggctgaggcaggagaatggcgcgaacccgggagatggagcttgcagtgagccgagatcatgccactgcactccagcctgggcgacagagtgagagttcatctcaaaaaaaaaaagtaaaaaaaaaaagaaaaacttttagaaattaaaaatataagagaaaaccaagtaataagaaccagaattcaaggtcaaggaaattagagggtataacaaaataaatagaaaacaggagagaaaagaaaacaggatcaatccaaaagaatcaagagtggatgtgggcatctggtatctagaacatataaagaactcttaacaacccgataataaaaagacaaacaacgtaattgaaaaacgaggcaaaagacttgagtagacctttctccaaaaagataatacaaatggtcaatcagcatatgaaaaaatgttcagccgggtgtggtggctcacacctgtaatcccagcactttgggaggctgaggcaggtggatcacttgaggtcaggagttcaagaccagcctggccaacatggtgaaaccccaaccctactaaaaatgcaaaattcagctgggcatggtggcacacgcctgtattcccagctacttgggagtctgaggcaggagaattgcttgaacctgggaggcagaggttgtggtgagccgagatcatgccactgcactccagcctgggcaacagtaagactccatctcaaaaaaaaaaaacaaaaaacaaacaaacaaaaaccaaaaaacacttcattcaatgtcattagtcattaggaaacttcaaatcaaaattacaatgagaatctatttcataccctcgaagatggctataatccgaaaatggaaaacaagtattagtgaggatgtgaagaaactcaaatactcaaacactgcaggtgggaatgtaaaatagtgtggctgatgtggagaacattaaaaagaattaccatatgacccagcaattccacttatcaaacaaaaccttgtgcacctgaatgttcacagcagcactattcacaacacccataaggggaaagaaatccaaatgcccagcaaccgttgaatggatatgaaacgtggtacatgcaatggactattatttagccttaaaaagaaaggaagtactgatatatgctacaatgtgcgtgaccttcaaaagcaccatgctaagggaaataagccaggcacaaaggtctcattatatatgattccatttataagaaatattcaaaacaggtaaattcacacatgaaaagagcatattagtggttgccagaggctgggggtaggaggaggagagacagacttcttaatgggtattaagtttccttttagggtgaggaaagtgttttggaactagaggtgatggttgcacaacatgaatgtactaaataccactgaactgtacactttaaaatggttaattttatgttatgtggattttgccttaacaacaacaaaaaagaaccaatagggaggggtgatgtgtgtgtgaggaaatgaaaacagcaagtgaaggcaagtgtttcaaaaagtttcaaggacagctgaaataaagcagcagattgagagaacttgagatcaagggagaaatttttctttctttcttttgacattgaacatcccagaacacatctatgctgttggcaatgacccagtggaggagactgataaggcagatgcatgagtacaacccctgagaatgttaacggtggagaggattcagaacacaagtggagaaactggccttggagagaacattaataaaaaagggaaaacagactatacaacatttgaattcttatagacttgggtagtggaaagatgaggatatttcttggttggcccctttttctcacagaagttgaagtaaaatgctttttgtaatttttattcatacagagtgggagaaggatgaaatgggaagaagaaaaagttaaaaacagccatttttaaagggaaaaaaccccctaaggttgggagattgagaaatactgctcttttccttgggcataagacatcaaatacatgtatttctattttaaagtctgggtattgcaaatacttaatttagtttgctgccaaattggtgcattaaatgtgcaaaaagcagcattatatatatatcctccaacttcatgattaagacacaaaggttcctagaatctgtcaaaatgaaatagtgaaaccctgtgattttcaggataatagtataagggcataggactcatagaatgggaattagatcttacaaagagtaaaatgaagacctatgctgcctaggccctgagtgaactgtgtacccttccaaccagagtatgcctagatttgtctactcctgtagaactgtttattcctgagacatggaggctattgtataagcaccaaagacccactctaaataatccaaaacatatgtatatacatgaacaggcttgacagaattttttttgtttttaaatgaagcgcagaggggctgggcactgtggttcatgcctgtaacccagtgctttggaaggctgaggtgggaagaatccgcttcagctcaggaattcaaggctgcaggaagctataatcacaccactgcactctagcctaggtgacagaggaaggagaccctgcctcaaaaaaaaaaaaaaaaaaagagaaagaaaaaggagaagcacactcacctttttcatcttttacctcacattgcattttctcttggcaatgtttgggtttgggtaccaccacagttgctatctcttgaacatctttcattaaaacatcaccgtctagtttgagaatacttttaagcctgctggcctcctttggggcattcttttttctcttttcagcacgcatctttcttttccacttactccgtaagcttttagccatgttttacctgaagttaacaaaaacacacattcaaaagcaaatctttaatataaaaaagaaaacaggcaaatccttagaaaaccaggccaacaggtatctctacaaaacaagtgaaaagtaaaactcttcaatctgttcactttttaggacttaacatgcaacttatatgaagatcaacatggtacatacacagtcactaaataacaagatatcaaatcaaacttgtggtcataagcaaactacaaatcaaaccaattctgaaagcaccttgcatgtcttttttctttttttttttttgagacagagtcttgttctgtgtcccaggctggagtgcagtggcgcgatctcagctcactgcaacctccacctctcaggttcacgccattctcctgcctcagcctcccgagcagctgggactacaggcgcccgccaccacgcctggctaattttttgtatttttagtagagacgggttttcaccgtgttagccaggatagtctcgatctcctgacattgtgatccgcccgcctcggcctcccaaagtgctgggattacaggcttgagccaccgcgcccggctgaatttctttacaaaatacagaaatttaatttccccagaatgcaacagcgtcatcaccttacatttatgcaacagcttacaaattacaaatgatttttataaacacttcacctcatcttcattatccatcctctcaagccaacttaacgactgtaaacttatctattcctactcttgttttctttccactcagttccgccctaaatcctccacaaggtgctcagtgtgatcttttaaaaaagcattcactgcctttcttcgagttctttaaagacctcctccctcatatatattcaagatctacaaggtcatttgtgatctgtcccctgcctccttcaactctatttcatttcattctccatccccatccccgcaggcaccaactacgtctgtaaagagtccaaactatctctacgtcagtgccttcatatttgctgtccctatgcctggcaactgctcttctcaaggcttgctccttcattcgctacctcagaaaggactcctctgacctccgtaagctcccttccctgcttattaagtgttacaacctgaaaccattgttttctgtcacgccccccgaccctctccccagactgtagactccacgaaggtagagggaaaggtcttgttcactgctgaatcgcacactttttgcatacttgttgaacgaaccactaacattttttgaacgccggcaatcacagtcattccgctcccttgtctacataactcaacccttgcgaggggctaggaaagcgggcggcaaacaaccttgagggccgaagttaacttcagcgggagtgaacgacaggggtgggctccactttatccagtgcactcggaagccggagggcccccaccaaaaagagcaaggggaaccctcgccctcaacaaggcctgcatctccggactggagctcaagtatagcccagcgagtgtcaagaaacgaaattctccaagggtggcggaatcaagccccaagtcccatgtgtcactggaccggtgaggaaccgaactcacctgagaaacgaacacccacacctcacgctcacgccgaccggaagtctttgcacttccgtcttccgggcggaggccacccggggcggacgcattgcacgccgggagacaaaatgtctcaagaagccttgagaggcgggattttggaacccgggcgctgacgagcttccgccattggtgtgatcgcggacctagaaacttggtccgtcccatacaggtgtagaagtcggatttggagaatgctgacgggtgtccggtcaaggttaggccccaggtaggtccgctttccggacgtgggcagggtagccccgagactaacctatggagtgaacctggccaggggaccctacttgtcagatagggagctccgagccgacctttagatctgacctcagcgtttacatgatactcatgtatttccttagatcaagtcagcctagatcaggtgttcttccagaggccgtattgagatcatttttatttgcagcctgtgcattttctcatctcgggtgatggcctcacagatgtacacatatgtaaaaccgtatcaaactgcacactttaaatatgtgcaacttattgcatgtcagttatactcaaagcggttaccaaaaacagaaaacaagcttttcctaccccagagaagaatttaaagggtaaaatgatcaaaggatttcagttctatcaatgtttacctgtctgatcacttacgtatcagacacaatgctaagcctaggacgattgtcttagctcacgaataacacttactgtacaactatttctactggcataggctttggaaccatataggtctgtgttgtactcttgcttccaacacttgtgaacgatatgggtgagtaattaatgtcataagggcctgaatttccttgtccctaaagtgaacataatacaacctaattgatgctgtaagagttcaacaaatggtaccctttttacattatagtttcaaaagtatagctacacagtactatttgtaagcaatgtttctagagatttacgacatatacccaaaaaacatgtctttaatgatggcctggtaaactcctgctggttgccagaaaaaggggttctgaggcaatctatgggtaccttttttctttaaatttgtgtcctttatgaaaccatgcatagtatggaaattactgaattcagaatatagcaag

SEQ ID NO: 6138 - DNA, 6000 bp, Homo sapiens
ttataggcacatgccaccacgcccagctaatttttgtatttttagtagagacggggtttcaccatgttggccaggctggtctcgaactcctgacctcaagtgatccacctgcctcggcctcccaaagtgctgagattacaggcatgagccaccatgcccagcctattttatttttttgttttgttttctgagatggagtatcactctgtcgcccatgttggagtgcagtggcgccatcctgactcactgcaacctccgcctcctgggttcaaacaattctcctgctgagggattacaggtgcacaccaccacgcctggctaatttttttttttttgtatatttagtagagacgggatttcaccatgttggccaggctggtcttgaactcctgacctcaggtgatccacacgcctcggcctcccaaagtgctgggattacaggcgtcagccaccgcgtccggcctattttattattattatttggtagagatggggtctcactagtcttccaggctggtctcaaactcctgggctcaagctcctgcttcagcctctcaaagtggtgggattacaggaatgagccactgcacccagcctactaagggatttccaagggtaactttaactatgtgacataattgtaatttacttctcctcattttctattccttcaaaatgtaaagcttgtgacagtccagccccttcagcctggagttccacctaccagtccccacatgtgctgtctctcaccaaggttgccagtgacctctgaccaaaacaatcttgtaagtaatcaaaactgaattttctaccttgttctattctccttgacccttctgttgctccacactctctttgtccccatcgcccatatttcactcactcattctcatagttcaactcctgactaaagactgacacacctcccaaatccctgtctccagcccaggcctctcattctgcctccagacctgccattttcttgtgtgttctggatggttccatttgcttgtggctcagacacctcaaaaacatatcctaaactgaactcaccatctccctctcccaccctcctgcccctgccctcaattactcctctttctgtcatctccatcttgattggtggcaccaccttccaatcaatttttccaggctagaaacttccctttctcttttttttttttttttttttttgagatggagtcttgctctgtcgcccaggctggagtgcggtagcgccatctcggctcactgcagcctccacctccctggttcaagcaattctcctgcttcaccctccgaagtagctgggattacaggtgcccaccaccacacacagctaatttttgtatttttagtagagacagggtttcaccatgttggccaggctggtctcaaactcccaacctcaggtgatccgcctgcctcggcctcccaaagtgctgggattacaggcgtgagccactgtgcccagcctcaactccatatctaatcagtcaccaaatcttgccgtttcatcagtgtttcttgaattattttcatccttatttctactgtcctatttcaggctgttgacacttgtcacctgggctgctggaaatggtgtctttgcttccagtccttttttttttttttttttgagacagagtttcactcttgttgcccaggctggagtgcaatggcgtgatctcggctcaccgcaacctccacctcccaggttcaagcaattctcctgcctcaacctcctgagtagctgggattacaggcatgctccaccatgcccggctaattttgtatttttagtagagacagggtttctccatgttggccaggctggtctcgaactccaaacctcaggtgattcgcccatctcagccttccaaagtgctgggattacaggtgtgagccatcgcgcccagccaacttccagttctatttcccttgaagctcctctatgttgctgccagggtggtttttctaaaatgcagatctggccaggcacagtggctcacgcctgtaatcccagtactttgggatgctgaggcaggaggatcgcttgactcaggagttcgagaccagcctgggcaacagactgagactctgtctctattttaaaaattaagaaataataatttgtaaattaaaaaaataaaaataaattagctcggcatggcggtatgcacctgtagtcccagctactcaggaggctgaggtaggaggatcagcggagctcaggaggttgtggctgccatgagtcgtgatcacgctactccactccagcctgggtgacaaagtgagaccctggctcaaaatatataaataaatcaaatgcctatctgaccatgttcctctcttcttctatcctacagtggctccccatcactggcctgtcctatgggaaaacatttgcattccttaactcagcctagaaggcctctgtgacttgctgtctacttatctggcccttctcatgcttcctttctggctgtagcaaccttgaagatatcgtacttccccaaacccacctgctgcttcttgctttttttcatgcggactcttctgtctggaatatcttctacatgcagcaaccgtaacccaacctccatactgcagagaagtggctcgtctcaggccaattcctggtcatccttttagattcagcccaggctgggcgcggtggctcatgccggtaaccccagcactttgggaggccgaggcgggcagatcacgaggtcaggagttcgaggccagcctgggcaacatagtgaaaccctgtctctactaaaaatacaaaaattagccaggcatggtggtgcacgcttgtagtcccagctacttgggaggctgaggcaggagaatcacttgaccccaggaggcagaggtgagctgagatcacgccactgcactccagcctaggcatcagagcttagactccgtctcaaaaaaaaaaagagaaagattcagcccagtgtgaaggtgtgaacctcttctaggacatgaaaagattcagcccaggtgtgaacctcttttggagatgctcctttcctaactgcttgaaccccggataggagtcctattctttttactcctatagtactttctttatatctccataattttatttactattactacatgatacattattttataaaagtctttgtaacctccttaaggattcactgcttaatctccagtgcttagcacaaatcattaaatgcgaaccagaaactcttccaaatgtgttacatctataacctcattggattctcactaccaaccccatgcaatagatactaatgtgatctctgtcttacagaggaagaaacaggcacagggaggttcagtaatttgcccaaggtcatacacacactggccttcaggtattcatgcccggggagtctggtcccacagctggcatgtttgccattatattatattgcctccttatagtgtcggcactcattaagcacattgacagctatgcttggtgagtgactactatgtacccagctctgtgctacatgctttacctggattatttcaactgcacaacaaccctgtgaggtaactaccatcattgctcctattttacataacagaaaactacagaaatctggggctgggcgtagtggctcatgcctgaaatcccagcactttgggagaccctgtctctaaaaaaaatttttttttggccggacgtggtggctcacacctgtaatctcagcactttgggaggctaaggcaggcagatcacaaggtcaggagttctagaccagcctggccaacatggcaaaaccctgtgtctactaaaaatacaaaaaatagctaggcgtggtggcaggtgcctgtaatcccagctactcaggaggctgaggcaggagaatcccctgaacctgggagatggaggttacagagagccgagatcgtgccgctgcactccagcctgggcaacaagagcaagactctgtctcgaaaaaaataaaaataaaaataaaaatatttttttaaaaattagctgggtgtggtagcacatgcctgtagtcccagctacttgggaggctgaggtaggaggatcacttgagcccaggaggtcaaggctgcagtgggctgtgatggcgccactgcactctagccttggtgacagcaagaccctgtctcaaaaaaaaaaaaaagagaaatcgggcaacttccccaagatcgcgcagttaactagtggcatagcttcactcaaactcgaagtcttaatcaggacactctaccaaatgagatcaacggctcagtaatggattggcatccagtatgaagactggaccagcagggagaactatgatgcgtacagcctagagcctgaagcagatttcacagcctcagaggtggcacaggctgactcacaacccggggcagaaagggaccagcccagaaacagtgacccagaatcacagggaagtagaaatgggattcggcacaatgaagcccctccttgaccccatgctccttaccctcaggggcgcaggagttagtcgctcaggcggctcaaaggtcttgacggtggagaacaccatccccagggattcccgacgcggtgatgccatcaaagcgttaattctgagatgggcctgcccgggtgcggactctgccgcagcaagagaagggttaactgccccgggccttcgccgtgggggcggggcctcggggagggtcacagcccgggactgagacccgaggttaaccgcccggggtgggctccacgggggcggggcatgctctccgcggctgctgccggtatagagcggtaactgcccaggagggggcggggccccacaggggcgtggcctcggagctgcacggccgtgggcggcgatgagagggttaagccccagagggccctggaggggcggggccgcgggacgggctcggcccaagggaggagctgggggcggaagcggccggcggtctgcgccctgcgcgcctcggcttctttccgcccggctccttcagaggcccggcgacctccagggctgggaagtcaaccgaggttcgggggcagcggcgagggctccgggcgagtaagggggatggtccatgctgaggcccaaatggggcgaactcgcgagagtctctggcgacctggatcagatggggcgagggcagatgaagggcccaggagctttggggcagcgaggagggaggagcgggcccgttggcaaacttgggtgaaaggatggggtacctgggtgacgagcccccgccaggattctgctcttcacgccccttttctcccagctcccttccaggtcaatccaaactggagctcaactttcagaagagaaagacgccccagcaagcctctttcggggagtcctctagctcctcacctccatgggccagacagctctggcagggggcagcagcagcacccccacgccacaggccctgtaccctgacctctcctgtcccgagggcttggaagagctgctgtctgcaccccctcctgacctgggggcccagcggcgccacggttggaaccccaaagactgttcagagaacatcgaggtcaaggaaggagggttgtactttgagcggcggcccgtggcccagagcactgatggggcccggggtaagaggggctattcaaggggcctgcacgcctgggagatcagctggcccctagagcagaggggcacgcatgccgtggtgggcgtggccacggccctcgccccgctgcagactgaccactacgcggcgctgctgggcagcaacagcgagtcgtggggctgggacatcgggcgggggaagctgtaccatcagagcaaggggcccggagccccccagtatccagcgggaactcagggtgagcagctggaggtgccagagagactgctggtggttctggacatggaggagggaactctgggctacgctattgggggcacctacctggggccagcattccgcggactgaagggcaggaccctctatccggcagtaagcgctgtc

SEQ ID NO: 6139 - DNA, 6000 bp, Homo sapiens
attactgcctaccccacctgcttcagcaattttgttttgttttgttttcattttggaccctgagagattccctttactgtctcagagtcctacaatgcatatcaaagtatattttatgcgggatccaggtgatgtgtagctggagaacttttcaaataatctaatttacctttctgtgtgaagcttaaaaaaaatacatgccaactctctacatgcatataagtatagtgtataagatggggagttctttgcctgaaggagctcccaatgtcctctacattttgtttggtttcctcttttttcttagagtttcattaccttttccatgtgtttcatttggtctctttcccctttttccttctttcaaaggtctctcttgatttaccctcttacctcagctacactattggattcaactacattattatttcaaattataattattagttgagtccaaaagtatttgttgaatgaatgaccatttcacactcattaaattcttcaaaagactcaagttcttttcagatgctttttactcaagtaacactggttggattttcttccctttgtggaaaactaattcttgattattaaaaaagatggaaaagcaaaagatttcatccatgggtaagcaaagttgtatattcatttatttatttttaactaatatagtttatttttggtgaaaatagaggttatatttggaaaaaatttccatgttaagaatacttcctatcatgcttcaaaatttccatacatttctaattacatattacaaaagaaattagggcattttgacatttgaaggctaaagcaaattgagtttgttaatccaaatgggtgtaaagaaacataactaacaagaaatataaacatcagttacaaagtaagaagcaagcccaagcacctcctaaagtgagaacaaatataataatccaagcaatttggtttgttctttcaacagtgtgaaataataacaagggtgatagccaacctgaaattacttgtctaccaagttacacttagaagatttagatcatcataataataatattctaagctacagtgtaccttttctagatttactcatggatatgttttatgttatatggctttaaggctgtgagtctacagaggtatacacagcagtccctaaattatattcatacatcagattggggagtgggagtgaacagggatgtttgaagaattctgactcttgggtaatgtggagatagctcttactccccagatagaattcagtcattataatttctccacattttctgtatgtagcatttatacccagctgtagactctgctcctatattttgggacagagtattgctctgtcacccaggctggagtgcagtcaactgatcttggctcactgcaacctctgcctcctgtgttcaagtgattctcatgcctcagcctcccaagtagctgggactacaggcgtgtgccgccaagcctgctaatatttgtattttcagtagagatggggtttcgccatgttgcccaggctaatctccaactcctgtcctctggtgatcgtttggcctcggcctcctaaagtgctgggattacagatgtgagccaatgagcctggcctgcaccatattttgaatgccccattcactccaggtatctatctccattctacatcattcctacatcattttcatcccaaatgccaacatatactaatgagattttcaaaaaggaaaaacttgtgtatagtgatactctaaataggtaagtttgacatagattcttaacaaaagtataaaccagattattaacaatggttttagtgggatcactaataccagaatgggttaatctgaaaacagatcttatttaactagcttcctttttttttttgaaagagtttcttggaccagtagatttggggatgctagaaacagtaaatctttatttcagcaaagcatctagaaaaccttcatgaactccatgttggttatggtatgggtgcatggactaaagtgcttgaaaagtgttggttcataaatgactgttaccttggagatctattttggcagtgggctgtctgaagatacaggggaaaagaaaccccaaacctaagtgtttttttctgttctcttattcaacaatcaacatagaagacttctgtaagctctggttaccaagaagtgtgtaagaatttcccctaccagcaatcaaccaatcaatcctgcagcagacacaagctgggtgtcttcaattcaattctgaaactatctacctggagataatgtcagatcctacaggttgagggctcagtcccacaagactaccctgacttcagatgccaaacaaaaaagccccaggtggctttacttgtgcttctggctgaacaactagaaattagggttcccgtgactccctccttgagtttggttattttgctagacctgctcacagaactcagggaaacatgtttaccattttcttataaaggatattacagaggatacagttgaagagatgcatagggtgatttatgccctctctgggagcaccgccatccaggaatctccgtttagttattcatgttcccctctctggaagtgcatgtaacccattctttttttttttttttttgtggaggctttattgcgtaggcatgattgatcaagtcatgggccattggtgatcagcttaaccagccccggaagttagagggtggggctgaaggttccaacacactaatcatgccttggtccttcctatgaccagtccccatcctgaagctatgctggagcccccagccatcagccaattcattcaaatacaaaaagatgttcatcactttggagatttcaaggattttaggagctatatgtctggaaatgggatgaagaccaaatatatattttataatatcacaggcctttttaaagcccgttctgtgttactgtttcttactagacgtaaatggagccaaacaaggcatacttattaaatttacaaatgttaaaagtgatcactagtatttatctgaaattgtgtcctaaaacaaacacgataaaatttaataagaataaaacaaaaatcaagatttaaatacatagaagtatagactatgaaaggtggaagatacggtttaatttagttgatgtgaaatagacttgggtgttctgtttgaatctaggtagtgtgtgcttgcatcaaaggggtggctgatcagcagctggagaactggaactcagttcttggcccactgtatttgaatattgtattctcagtgcacaatttagagaggagaatgaaaatcaaaacacattcaaagcaaggtgaatagtgtgattatggcagctcactgctatttgaaaaacacttaaaagagaatttttgaagaaatgtattagatctgttggttacttaatagttgcccctactatttcaaggcttgcagtgtctataaagaatgagattcatattgtgttgttcctaggggcagaaccaagaccagtagtatcagggaagttgatttgatgttcataaatgatacaggctatagtgttaagcagacctggttgttaattctggcgtcagcattggctttggcaaaaagaaggaaacttctgggtttcattttcctaatgtgtttaataggtataataaggcccatctcattttaaggactaggaataatgtgtgtaagttgctcagttcctggcataggtaaatattcaacaaataatcatggttatatgtaatgataaaaatagaaatttacaacattggaaatgttcaagtggatagtggtctggtggaaatattggagagagtattcccacttaaaataggggactggacttagccgttatatcgattccaacttttagaatggtttgaatgtccaccttggcatgttacgtcgtttctccctgactgtgcttttatttgcttcacaaagcaagcaagtccaatctcttttaaccaagtttaatttataggctttcgtggacttctggaagtcaactgacttcgaagttaggacagcatggggggattgggggagtagctatgacaatgaggagttttaagagtgagaaaacacaatgtctatgagaacatggacttctcttttagaggctccatgagctactcagagaggaggttatgagggttggttaaggtacgagaggcacaaagtgaaagaagcctccactacttcaaaccacatcagggcttttggcaagagctacatgaaaaataggctcacaggcagcctggcgaggcgggtctgggcttgcaggctggcgctaaggaccggcagttgggagactctcagggacccgatggagggccttgggcaccaccagtttaccgcatgggttggagagacaaaaaaagaggagagcgacaaaagggggaaaataggtccgatgatcagaggaggaagacgaaggctggctggtcattagatgcgtcttgtttgccgccaaagggcaggggttacgagctgtgcagccagactgggtgttgcaacccgagcgctccctccgcccggggcgtccatcctcgccgggggcgaagctctccacacgctctttgccccttcctgcgcctcctggctgctagtcagtcctgttagggcacttctggaaacctgctgtcgactcgctgccttggtccgactttgatcgcggccttgataacttggcgcagcgccccgtctcctttcctccggtccctctcccgcccacccggcctcaccggccacttcgcctcaagcgctggagtcgaccagaactctgcggctcggctgccggcaagacccggatagcggatttcgctcctggctgcggggcgcgcactcgcccgcccgcccgctcgctcgttcctcgcgcgggcactgggcatgcgcggcgcgcggttggcactggctgcgagcgggcgggcggctccagacttcacaggcagcagctagcgaggcggtctcgcccggcgcgaggccggcgctgtgctcgcctcggagatcgctgctctttagctgggtgcagaaggcggctccgcggctcgcggacgactggctgggcgcgaatcagattggggggctttctcccggtcccctcccacctcgtctgggctcgcggcgtctccggggaaagccgtggccccgagggcggatccgaggtaagagccccttggcgaaaggcgccggtcccggggtccggcggctttgactttctcgattttaaaaatccgcctttgtgtgctggaatcggagcggtgccaggagccgcgtccgcctcccttcactttgactgctttcaactggtgttggcagccaggtgcggtagggcgctgcggccggaggcgtccgctcgccgggtccgggcaagctgtggggcccgtgcagacccgcgcccagggctccgggaggctgggcagggagggttcgccgtggcccagtgatattcatggtaacctgagcttccgcagatacacctgcgctcatctggtccgtggggcgactgcagaccgagtatcccgatctcggcttattacgttagacttgggatttgtgcgctgctctgccaacccgcctcaaatggggaggggttcttttcaaaatgaccctttagggcagggtcccacccccgtttaccccctcgaattaacatagctaattgtttcggaatcgttgtcaatgcctaatggctgttgactttcttagcttgctccactttactcaccattttacttttgggaagacagacggcctttctccggttgtggtcagttcatgcatttgaaaggggtttccccacccatgtactccctgccctctccgatgttctcactcttactttccttcctaggactacctgtttgcaaaatctttgcaccgaccgttctccggcagtgtttctcaaatcctcctcctcccatagggcccgtagtactgttggaatctcgcggggggcaggacgccgtggttaggatttgaaatccgcagacatc

SEQ ID NO: 6140 - DNA, 6000 bp, Homo sapiens
gacaaataccaaaagccccgaggaagaagacatgagctgggctactgggaatggagccctggagccagatggatttggagtgaataactggtggtgccctactctttctagggcaggctgagtctgtgtgcattcacttctcatggcattgcacaggactccttggagctgttctgttctgttctggagcagtcaagatttctgagatgccataggcatcatgaggctaaaagaaccccccaaacctggaaaatacttgtgagtggtaatatatcagttgagtaaaggccacaaaagcaaacattgggtggatacattctgcctcagtgacctaaccctgaccatgcacccttggaggtagaatcaccaaaaccatcatgtatcccctgcagggttctgagggggctacttgtaagccattgatggtctcgcaaatgtatttctgtgaatctcatgttccagattctaaatgagggggtcctatggtgagagggacttgttctgtcattcagaaaggcaagattccatcaactccctggatggagtcttctgtcagttggctactcaaacaataaagtccgcctagcccatgatctagggcaggatttttttttttttttttttttgagacagggtctcactctgcctcccaggcctcaagcatagtggcatgatcatagctcactgcagccttgacctcctaggctcaagcgatcctcccacttcagcctctcaagcagcttggactacaagcgcacaccacaatgcctggataatttttaaattttttgtagagatagggtctcactatgttgtccaggctggtctcaaactcctggcctcaaagtaatccttccacctcaacttcctaaagtactgggattacaggcctgagccactgtgtagggtaggatttttaatactgtattttgggtcacaacccattaatgggctgtgaaataaatttggtggatcccaaaaggaaaggaaggaaggaaagaaggaaggaaaagaaaggaaaggaaggaaggaaggaagggaaaagcaaggaaagaaagaaaggaaggaaggcaggaaggaaggaagaaagaaagagagaaaggaagaaaaaggaatgaaagagggaaggagggagggaggaaggaaggaaaagaggatagagaaaataatagaaaacattgtagaacatcttttgtatcaggaacttatatatattcctgagtaaactaggtcacagtaaaaacttatttcttattatgggttgcagttaaaattttgaaaaatactgtcctgggaagaccccttggtttgctttcattgctacagcttcttacatttattcattctatttttaccatctggaacataaataaggagagtcatccctgatcctttttgtcttaacttgggttaggaaatataaatgaattaatctttctgaacttaacgtgtgttttttaaaaaatctctaaaacaagggaacaaactgaaaagatggcctggtcccttctgtctttctaactccacgctcatgtctctcagaatgttctctgggtgtttactgaagagaggcttctcttcagtcctaccgtgctcataaccataaaatatttaaggggggaaaatggccctaaaaaagggaaaaacaaacagtcagatgggagtgttccagagagagctcaaagggcacatttttacctgcagagcagcctttagacagctcaaaaaacctctgtccatggggacagggtctctgggagactcacagggacaaagtgacccactctagctctgacaccacagcaagaagtgcagagagcatcagccagcctcgaggacagtggccaggctgcagaaaaaggaagcccagagatgaggacaggctgcagtcctgtggcctgactgtagccacaactgcccaggccatccccaggtgcctggagcctggcagagaggtcaagagaccaggccctgcctttctttggactctgtggaatgaaatgcacaggaatgaaatgaatgaaacgaaatcctcagcctagtacctctggaatctttccatcaaagtcagatgcaccgggaagggctcttttgtttctatatagatttttgagtctatagcactatagcagagtatctagcacaccaccagacttggctaatattaaccaagcaagtgcttacgagatattccctgatgtaatttggcagagatgagtactgacaaaaaacaatctgtacatcccaataaagaccactacccatcccagggataagtgagaatatgagaaatgttaacttcagggaaaagaaaaattaatgtcttctgcagaggttctggtacctggtttatggagaagtcaagataggggaatttaaaactattaactctgtagtgcaggaatggtgcttgtcatcgaggcatcaagagaacacggtgtgggacagcaacctccctttccagttgtgtacctggctagggagaagtagggtccagagacaattagggattacaacagaacacaggagaagtgaatctcatatgatgttgcttttctactttcacaaaataaccttccttctaagaataaaacaggcaaaaaaaaatctatctttgttcaatgtaaatacaagatggttcattagcaggtgccaaaccatgcaatatagaaaatgcatgcgctacaaagaccagagaattgacagttcctttcctggagatgttggaaaagcctgatggaataggcaggacctgaaagaggagagggtctggagaggtggatgagagagaacagttcaggtattgggggaatatgggaagaacatggttacagacaaggtgacggggctgatgacggcatgtgctggggaccgtgatgacatctataatcttgcccatctgccaaacgcagaacctctgagttcttcaactctgtgaaaagtgcatgcatggaaattttttttttgttttttagaggcagcatgaaacagtgggatgtgcagagagaagatctgggtccagtagctctgacactcctcagctgtagaaaccttgacaactctgcacatcagttgtacaatggaacggtattttttactcttcatgtctgaaaaggctatgataaagatcaagtaagatattccaaagaatttttaaattataaagcagtttacacatgtgaattacaagtacctctcctccaacaaaggctgtgaaaaaagactaactctcagttactacggaatacttagtacgcatcttccaccatcttttgataaggtttatttgcaagatgtcaggccagtcaagcaccacaaaagtgacttctgagtgttcaacctctttcagaggctcatgggacttgcagagaatgtcccaaggtattggtggttggaaatttcctcttatgcttttcttcccacaagaatcaccgctagctttcccacgatgctttgggcaaggggatccttcctattactttcattacaggtagagaatccatccatcagactggcaggacctctaaaggggcacttcatctgtttctcagaataaatggtccattcccaagttcaatcaaacgctatgcctctcttctgtcttttgtttaagtcttcccagaaagttgccatgatacctccataatgaactgttgcagtgcttaacaaacttcactgttggaaggttcttccttctatttaatctcagtctatttcttttaaccctattattgagttgtgaggggctggttatgatgtagtccagcatagctgtctcagaaatggttcagagaccattgcaccagcagatttgctgggctctagcactagtccttcattgattagctgagtcatgttgggcatatcacttaaactttctatgcctcaatttcccaccctttcaccttgtccctctgagccatggtttcctcctctgtaagaggcgaatagcaatatcttccctggctaaaggaggtcatcgactgctggatgattttgtgagcatttctattccagaagattatgttgtaattactatttatttatacattctcccactgcacagtgagttctaagaagagggaaccccatctttttcacctgtcctctagcagatagagcggtgcctatcacacagtcaagggaagcagagaataactttaagccaaaatttcctgtggtgagttttccgcagccatccacaattccaggtctcaggaggtagtctttatcttttcccctcacgccgatgccacggggcggggggggaaggcggaactcgggaccagggaccagggaagctgagactcagctcccttgggtgagattcgcgacaggccgggaacgtggtcagccgcggtcgctgccaaggtgatatcgggtgggagcaatgacgcaactccggtttccacttcggccccccgggatattttaccctaatctgtgggatcaggctgagcttcctggcgttctgcagcagtaacaggttggcgagcggagcccgggatttcccattcgtgcggagctagccgccggtgccagtcggcaggcgccccccagcgtcccgcggacgacgaagtcctggcctggtcagcccaggtgggggtgacgcacctggctcaggcgtccgcagcaggctgggtagaaccacggcaggaagggtggggggctgcatccccgattaacacaggctgaagcgggtatccgcacctataatcatcgacaactctgtcccacagagggcagaagcgtgccttgccctatggacgacggtcgatgaaaatttcacgagttagagtatctaaggctacagcgtggcctatagggtggttgattccaagtcaagatggttgcagcgccaacggagctcctggcaagagaggactggacctgtgggcggggcggaggggcggggcggggccggggcggggcctgaccgagaggcggggccaggtgctgggctgtctctgcttgtcaaaaggcggcagcggagccgtgtgcgccgggagcgcggaacagcttgtccacccgccggccggaccaggtgcgaacccgggagcagcgggaaagggggtctcaggatagggactcggggtcggggcgtctgggataccggggcctgagcgcccggctgcgagcattagagtctaagtctcagcggtaaacttggctactgaggtccgggctgtcgtgccatgaggctgggacactaaggggcactgaggtttgagaaagctgaagttcgtgccaggctggcgaggggagcagcgacatcctcggcgcttaggagaaatgctccgctaacacagtgcttagcacttgggcaacaagaagtatttgtttccttcttctgtcggggcgccttggcatggagtggaggaataagaaaaggagcgattggctgtcgatggtgctcagaactgctggagtggagggtgtgtaaccttatttattgtcttacagggcccaggtatggtcacctgtgatggtggagttgggtcttttaagtaatttttttttttttttttttttttttacttttctttgaactaccaatgagtttagacctaattggccctattttttttcaggacagcctgtcaatagatgttcagaggaactcaggggcaagcatttaaatgaggaaggggctcaaggagtagtttctgtttgaaaagtgaggtgccctggatctgtgggtggtggtgaggaagattcagaagtatctaggagggaacagcctgtggtctccagggccagtgtacaactgcccctccttctcttcacccagggaccagagtctgagacctagcctgggctgggggagccttaggtctccaagcccagacccttctcacagttcctcctccttctcctcctcctcctcctcctcctcttgttcctcctcctcctctatgcgtgcggtgagtgagtcagcctcctgtctgggctcagttgcagccaaaggggccagagcccaggcaagcagttgggcaggca

SEQ ID NO: 6141 - DNA, 6000 bp, Homo sapiens
ctaaggcaggtggatcactgagcccaggagtttaagatcaggtctgaacaacatggtgaaaccctgtctctgcaaaaaatataaaaattagccagctgtggtggtgtccacctgtagtcctagctactcaggaggctgagatgagaggactgcttgagcccaggaggtggaggttgcagtgagctgagatcgcaacactacactccagtctgggcaatagaatgagaccctaaattatataattatagacttaaatgcaaacctaacacatagaacttttttttgttgtttgttttttgagagggagtcttgctctgtcacccacgctgaagtacaatgtcacgatctcggctcactgcaacctccgcctcccaggttcaagcgattctcctgtctcagcctccctaatagctgggatcacaggtgtgtgccatcacacctggctaattttttatattttagtagagacagggtttcaccatgttggtcaggctggtctcaaacctgagctcaagcaatccacccacctctgcctcccaaagtgctaggattacaggcgtgagccaccatgcccagcccgtttttttttttttttagagggaatttcactcttgttgcccaggctggagtgcaatggtgcaatctcggctcaccgcaacctcagcccccttggttcaagcgattctcctgcctcagcctcccgagtagctgggattacaggcatgcgccaccacgcctggataattttgtatttttagtagagatggggtttctccatattggtcaggttggtgtcgaactcccgaccttgacctcaggtgatctgcccacctcggcctcccaaagtactgggattacagttgtgagccactgcacccggcagaacttttttttttttttgaggtagggtctcactctgttgtccaggctggagtgcagtggcagcacaaccatggctcactgcaacctctgcctcctgggctcaagtgatcctgccatcttagcctcccaagaagctaggattacaagtgtgtgccaacagactggctaatttttaaattttctgtagagaccaggtctcactgtattgccagggctggtgttgaacccctgggtttgagcaattctccctgccttggcctcccaaagcactggaattacaggtgtgagccaccatgcccagcctgaacaactccgttaaaaacatgagaagacaagctgcagactagaagaaaatatttgtaaagcacatatctgataaagaatttgaatctagaatatataaagactttcaaaatgcaataagaaacaattttttgaaatgagcaagtgatttaatcagatacttcaccagagaagatatatggatgacaaataagcatatgaaaagatgctcaacctcgttagtcattagggaaatggaaatcaaaagtgaaatgagataccacttcacactaagtggctataatcaaaaagagataataacaagtgttgttgagtatgtagacaaattggaaccctcatacactgtgatacctacctattaggaaggctgaaagtaaaaagaataaccataccaagtgatggcaaggatgtggaacaactagaacactcacacactgctgataggaatgtaaaatgatacaactacttctgaaaacagtgtgatgctttttaaccaattaagaaccgtacatctaccatgtgactgagccattcactcctagatatttacttaagagaaaatgacactttgggaggccaaggtgggcagatcacgtgaggtcaggagttctggaccagcctggccaatacggtgaaaccccatctctactaaaaatacaaaaaaaaaaaaattagccaggcgtggtggcacatgcctgtagtcccagctacttgagaggctgaggcacaagaatcacttgaacctggatggtggaggttgcagtgagccaagatcatgccactgccctctagcctgggtgacagggtgagactccatctcaataaaaagaaaaagaagatgaaatatgtccatacaaagacttgtacatgaatattcatcatagctttatttgtaatagccaaaaactgaaaaaatccaaatgtccatcaacaagtgaataaataaattgtaatatattccaacaatagcatactattcagcaataaaaaggaacaatcgagaggccaaggtgggaggatcacttgaggccaggagtttgaagttgcaataagccttgatcacgccattgctctccagcctgggcaacagagcaagaccctgccccaaataaataaataaataaaaactattaacacaaacaacaatatggatgaatctctcaaggtaattacgctgaacaaaagaagccagacacatccctcctcaaagaggatttactgtatgattccacttacataaaattctaggaaatgctaactaagatagtgacaaaaaggcagattagtgggctgggcgcggtggctcatgcttgtaatcccagcactttgggaggctgaggcaggagttcaagaccagcctggccaacatagtgaaactccgtctctactaaaaatacaaaaattagccaggcgtggtggcgggcatctataatcccagctacttgggaaactgaggcaggagaatcccttcaacccgggaggtggaggttgtagtgagccaagattgccccattgctctccagcctgggcgacagagtgagactctgtctcaaaaaaaaaagtttcaaaaagcagattagtggttcctagggatgaaagagtgagagagagggattataaaggagcatgaggaaatttttagggatgatgatgatatggtcactatcttgggtgtggtgacattttcattttcataggtatataagtagcttatcaaattgtataccttggctaggtgcagtggctcatacctgtaatcctcgaactttgggaggctgaggtgggagggttgcttgagctcaggagtttgagactagcctgggcaacacagtgagacttcgtctctaattaaaaaaagaaaggaataaattgtacaccttaaatatatatggtttattgtatgtcggttatatggcaataaagttgtttattcaaatacatgtagacaccaaacacaaattaccaactgggtcctgagcatgccaatggatggagaattcgccaaaaaggtgagccccacatctggaacttaaaggtgaggaaatcccgagtggaatcaccaaccatcagtaacagtttggaaatgccttcttctgccatttctctccatgtctgaccctagccacctagctagttagtttctggaatgagccctggtctgggatgaacatgactctggcagcctcctaagattgtccctctctggctgcctttgggaagagctgagctcagtgttgaggtattttcataacacaagaagaggagcggaggagaagcaatgagggaatcaaaaggaggtggagatgagttggaagggtagctattcagaactgagtcatccaggggctggaagggagctaaaagaacacatacttcaataattcttgtttagggatgagaacaccaagaccttgaccttttagtcacacagaattggggctctaatccgggtttctctgtttcccatctcatctattcctatcacccattgccgttatgccgagtgggcactattcacggtatgcgagctgatggctttcctggcactcaacacgttagagtacctagtgtgataagaatagaatagtctggggtctgaaggagctcacagtctagcagagacgggtctacacacacaagtaactccaataacgaaagcaagacggtaataagtgttataaatggcggggggcggtggctcacgcctgtaatcccaacactttgggaggccgaggtgggcggatcaagaggtcaggagatcgagaccatcctggctaacacggtgaaaccccgtctctaccaaaaatacaaaaaaaattagcttggcgtggtggcgggcgcctgtagtcccagctacttgggaggctgaggcaggagaatggcgtgaacccaggaggcagagcttgcagtgagccgagatcgcgccactgcactccagcctgggcgacagagtgagactccgtctcaaaaaaaaaagtattataaatgaggtgctacagaggagaggaatcttttccgtccagaagagagagatatggtgatgggaagggagcaaggaagtcctcatctaggagtccaaccccccagaatggcaggtaggcactccctagtaggtgttcaataaatattcgtgtcttcgtcccttcacattctaaccccagtctaactttccttcagcctaccaaagccctgtgttcctccacagaatgccgcttcgtgccactgtgccttctgcatccccagttctctcctcctggaatggaatgttcttgccaataatgagcgagcggtgccatgaaacagagctcgggagggtacacagcataacagttaagcgcgcaggctatcgaggccagccttcggcccatccgtaaaaaggagataagatttatttcataaggctgcaccgtggattaaatggacattccggtaaagcttttatttcagtccagcgcggaaggagggctcaagtaatactcgcaacgtttgtgcgagcgtggccaccttctccgcccgtcccgtctccccggcgccgctcaagagccgccccctgtccgcctcagcggcgcccaggcacccagcagcgtccgcgctgccacgtcgccttcgctcaccccagcaacagccgggttgaccagaccggggccctgagctgggtacccagggcaccgggccgcgccccacaccctgcctgcgccttccgattggctcctgcaggtgcccgtcgtcagaggccgttgctgattggcttagatgggggacggggcgggcctctaggagtgaaggaaaggcggggacccggatgtgtgtggtggcggcggccgaagagcttgtgtgcggagctgagaggcctatggatgaggaggacgcggcggccccggtaggcggggatcgggggcggggtcccggaggcctcgtatctccccggagcctgaagcggaaggcgggggtcctgggcgggggctctggggccaggggcggggccctgcgctctggtcactgggcttcttctgttgctgcaccctcggcccagtgcagggcctggggagactgggcgtaggcacacggatgggctggggcccggctgctcccgggtctcatctcagtgatcaggccgtgcccggggaggagacagggcccagtagggccgccactcgccggtgccaagactgtggggtctgcgcaaccagcatctacctggggttgagtcctggctgagtgcccgggagtggaatcttagggctgtctgtcccacaggtgcctactcttctgggccacgtggtgggttgtagctactgcataagagtcgtaatttgcgtattgggatcaaattcagcccagccaaggcttactaagcacctaccgtgtgcaaggcaatgtcaggcctcaagaaaacccctgtcccagtgtttagggaatgggaagagaagagtacttcacctctttctcacttttggctcccaggaaaaatcattcattcatttatatgtagggactgatggttgtttaaatacctggatcatcccacccccatccatcggcgctgctaccgacttagtggatgtcatttctcatgtgaactgctgcaacaacgtctgaattgtttgcccacatctgttcttgatcctcttgtgatcagttctccaaccagcagctggaatgatctttaggaactgattaagatcgtggcttttttttttttttttgagatggagtttctgtcacccaggctggagtgcagtgggacgatctcggctcactgcaaactccacctcccaggttcaagcaattctcttgcctcagcctcctgagtag

SEQ ID NO: 6142 - DNA, 6000 bp, Homo sapiens
aatattgagcaagtcacttaacctctccagttcttactccctgctctgttaagtggggatgagataatgtacatgtctagcacaatacatggcacatagtaggtgctcaataaaagatggcttctccacagccccctcccccagctccacatcttttcttcaaaggagtccaccagaaggggcagccagacaccaaagggtgggctggagcacagatgtagtttggtcaaaggctggcagacagggagatctaactgaagctgaatagaacccaggcagttggtgggagttggcaggggaagcaggatgcctgggttctgggagtttccatccaggggaagtcccaggtgtgggtgtgggggtgccaggctggccccacccaacactctggccccaggggatgtgggcacagggaggaaagtgggtcacagcagggctgggacttaaccccattggttccatgacctctttgctggctctagaggaggcacagtcacaaagaggtctgctccctctttcaaggggcccccaattccttttcaaaaggaagagacttggaacttttgtgtctgggtaggaggaattggaagctctccagtggacaggggaaagagaaccccgtatcccctggatggagattctgtgcaaaacagacagctacatccacccacacactggctggcagacacctgtagcactcgcctcacacacactccaggcaactgtggaggcagacgtgctagctccagggagtgggacaggtcagggctggatcgggggagtgggggcatggtagagcaggctcagaggagaaggccttctgtctggtgaggctccagctgggcaaatgcaggaatccctcaccctggaggatttgccagcatggggccttgttttccatagtataatctcaagtctcagcctgtgagtcgtcttccctctctgtctctgtttccctttctggaggaaatgaatgcattcaggtatctcagcgtcctgctatgaccacaaggaggtacttaccatccctcccttttggcatattgaaatccaagcacgtcacaggaatggaaggcccctcttttttgggggcagggggagcagactggctgagggccaggacatcaattccagggcctttgcacatactcttgagcagcacatatatttcactgcccttccttctctctaatctccctcattttttctccgaagactttcctgatctccttggcggagaatactcctctgctccattctcatggtccctcatgcctctccacactgattattctagttgcagttttgtggattatttggttaacaactgactccatccgactgtgaacttgccagggaccatacctgggtattcccagaacctagcacagtgcttatcacatagtggatgcctaataaagatttgttgaattaatgcatggtgcctgttcagggaagaaattcccagaggtgtttaggctaatcctaaaatcctgagcttcaaaattaagtccttattctatgtggggatctgggcagcactggggctggtaaggaccttctacacacaaactccctcaccaggagagtcaacgagctggcaagcagcagaataggcctagtacaagggatggagtggagcaagcaccagaggcagggctggcaccagcactggcacagagcttgcctagggggaggaggtgggagaggagaggaggaagggaaaagagaggacacgtgttgtacaaaacatgttttcatcacgctctccctgggtgccctggtccccaagccctgacagcacttccatgccttaatgatgtctttgggggctgcaacacagctcccccaccaccccctatagtcatctgccagacacctctgagcatggcataggacatcccccacaccaccagatttgggcatggggaaatgacctattcagtgtcctgatgccggagggttgggagggggtgagggtgaaaattagggtggggcaattttcatcctcaccactgtccgcccccccagcatcagggcactgaataagtcatttccccatgactttcaggacaggtgggacagatatctgcatccttttcctctcctcataatctctccttttggtctttgctctgggatgaggggagcaaacaaagcctggtactagggcccccaagatatcatttctccaagttgccagggtgacaaagtagagcagccacaaacagagcaaagcctagaaatagggatgacccaagggaaagaggaatgaggggagccccctccaccagtttccagagtgggaagccctcttcccaagcctcctcctggaatctctggacagaaagctggctctgttgcaagctggggagtggagggtggggagaagaatctgaagccctcacaatgcccctcttccctgtcccccaatctgctgctgctgtttggtttgacttccaaactgctgcagtgaacagaccccagtcactgggtcctggggaggggcggtagagggggcgggggtggaagcagtggcaatcccaaggggaggggccggcatagggcgggtcttcctgggcatcgctgcttggctgctgtcgtcggctggggacgaggaggccgccagaagggaggagctacagttaccaagacggatggatagacaaacgcccaccagagacaaagacccgggcagacagacagacaaaccaagacaaagggagggcagagacagttggaattctgactccctctgttttcagaggctaccccaagtgttttgtcccccgatttaggcttccctggccccatttgctacctagatgcactgtctcagagctccagctgtagatctttgggaccaaccctaagcccctctacagaaggagaagggaagagttcagagagatgatactcagcagggagaggagagtgtcacgggtggtgcctggttctgtgtcagaatgcctggccaaggagggagtggtgcccttgcctggttcatgaggacaggaggctcattcactgtaaaccaagtacagatgtgctggaagggggagggggaaattagggccacattcccaaaccacaactgggcccgccctcctcccaccagccaccactagggcagggcaggaggggttaactttgcagcctcttggcaggagccctgccacacaggcggggcgccatcccaccccagcctggacgcctgggtccaactccctgacacccgcccctcccacactgctgagagctgctcccagggtaaccaagcaaagtcaacagcagctaggccacctggggacgggaccctggagtatctattcctagctcttcctatccctggagtgaaagagagggcttgtctgcacccccattgccatctcccattccctgaggtaaccacagcatgcctcttctttcccccatctccttcacctgactttggctaccaaaagcagcctttcccaggagggaggacacctggcccccaggggggagcaaggacaaagccaagtaattccagtatggaaaatgtgacgtgacccaggagtctgtgtcccaggtcctggtcaccctgcgagcattgctggggaaggtactttgggtatgtctgtccagcctatcagcctagctcagactctccccttctcctctttctccctcccaactccagtccccatgggagtgtttgggatccgtgcacagagcttggactgcagacccattcttttctctccctctgtcctcagtagaatgcagagtgaaaccactgggttctctcactctagggttgagagtctgtctatgttgaagcagataatgcccccatcagacacagacactcactctcggcactggcatgcgcacgcgcttgcacagacacacacacacacacacgcacacacacacacacccggagtcaacagcattcatggcacatctaccaggcaggcaggcaggcaggccggtgctggctagggcagacacacaccctctgcctgggctttctctctcacacccagcccaaggctcctcccactcccagccacagttcctcctgccctcctctccagcctctccccttccaaatccaggcctaaaggtgggggacaactggcagccagggacccaggcgccctaactcctggagcttactccaggcaagatgacagggaagatgtctgtgagccctggcctcagcacccccagcaacagccactagtcaaccagtttgctcctgggaccaaaggactgaggtgggctaggggaagggagaggctacttggatctgcaggtgaaggctgagcaaagagtaagggcaggagcatctattctagatctggcatactcctgcccggccaatccagcactgggagggagtgggtaccgccccattgcctaccctggggaggcgccagagactggcctcgcaagagtcacagcctggccacagacaactcaactagtccccccaaaaggcagaaaggagaaaagtgccagagagaaaaggttggcatcacggggccaggacactgacctcctctgccagccgtgcccggcctcccagaggatggagtcacggaagcctagcaaatgggaagggcagagacccaggcgtcccgggccgccccgcccagtccccctcccgcccacccatccctccgccccccagccccagggcacagaggagggagccgggcaggggcaggcaggggagggaggagcgagggcgggagggggaggagggagttgggcagggagggaggttggggggggggtggggagggagaaaaagaaagaaaatattttccgtgtccccgcctgcagagtcagtgtgcggtttgggagaaaatgtgtcggatattttggggcggtcacgtgggcgggcgggctccgagaggccccgggacagtcccagcctagagccgtgcccccccaggagccccccagtacggcgagccccggacattgcgacgctccatccaagagactgcccgacgccgggacctcggggctccgccgcctcccttccccctcccactccaggtgagtcaggcggggaagcaggctcgcccgccccgtcgcctgggtcctccggcgaggcggctgggggagggggcgcggaggagctgcacgggcgaatgccctcccgaggctggccaggctggccgccgggcttgaggggggcttcttgccccgacccaggccagtcctgctgtgggaagggaatggggaagattttaacaggctgaggatgggctgggtcatctgcccttcattttggtgcatagcagaggacagcatttggggaagtcttcagccagggggcattcctccttatatttttgtgctgggaatgtgagagaagacagggtttcctctcgcggggaaagactaccacccccttacccccgggctctgaggggtagatttgatgttccatgctggtccaagttcctccctccccagtggaatgggacagcttggacatcagaaggcaaggaaaacgtccagaggcaagtgagcctggccctccgcgtccaggagttccgaaggactggtgcataggatagggatctgtgaactttccttgaagcgctggattccctcccacacgttcccagcccaggtgcgagccttggctccctccagccaaggtggggggcacctctggagtattcttgagggaagcccaaatggaacaaagaaagagcaggaagaccgggacagggacccaggagtgctggtcccagagttccactgacgctgcctctctgtctttagcagctacggcccagttccctcaacctgacccagtatgtagaagccagtctctgcaggcggccagcgggtaagaagatgcttggttgttagtggtggtgggggcaggggagcctgagtaggaggtcttcagggcaagaaactgagatgactgtcccgctttagggctctggtcctgggcagctggaatcccaatcctcaagtctgagg

SEQ ID NO: 6143 - DNA, 6000 bp, Homo sapiens
agctgtcccattcctccccctacaacacacacacctttcaggcagggaggagatgagcttccagccccaagagtggaggctgccacatcctaacatagtatctattgaaaaggaagcagtgtgtatctatgattatatctctgttcatctatatatttttgacatgtagcaacacctctccatcttatcaaggaactcaactcggtctgggtctccccagtgcccagtggtggcctttgacaggtaggaggatgcagtgctgcaggctattttgttttttgttacaaaactgtcttttcccttttcccctccacctgattcagcatgatccctgtgagctggttctcacaatctcctgggactgggctgaggcaggggcttcgctctattctccctaaccatactgtcttcctttcccccttgccacttagcagttatccccccagctatgccttctccctccctcccttgccctggcatatattgtgccttatttatgctgcaaatataacattaaactatcaagtgaaccactgttatgtctgatgcttcactcctctatccacagcccccattgtccccttttctgggaggtcactggcctttcatgtctgtcatcttcatcactcccccatttcttaggacagaaggaacagggatttttgtctctagtttttatacatgggagatacagcctagagaaagtggatgatttctataaattacaaagtatgacagaaggcccagggcagagctcctgtggactgccttggagacaagggcccttggcatcctggcagcaagtactcacaggaaacttagtatgtgctttatgtggatggcgggtgggagagttgctgatggcaaatggccttttacttttcagtgttttgttgccaacccccacccaaccattaaaaagtggctgttgtgaccagggagcacacacacagacaaagacggaaagtatagctttctatggtaaggaggaggctggtctggaaatgaggggtagagtttacttagaagcaggtaagaaaaccgggcatggtggctcatgcctgtaatcccagcactttgggaggctgaggcgggttgatcacctgaggtcaggagtttgagaccagcctggccaacatggagaaaccccgtctctactaaaaatacaaaaattagccaggtgttggtggcgggcgcctgtaatcccagctactcaggaggctgaggcaggagaatcacttgaacctgggaggcagaggttgcagtaagctaagatcgtgccgttgcactccagcctgggcaacaagagtgaaactccatctcaaaaaaagcaggtaagagttcacaagaaaaacaggtaatgctcagagactgtgggaatcaggaagaggtgtagggaaatcacagataatttattgcatctgtatattcctttataaataacatcacaaatgagaacaatgagccaggctgaagaatttgacaaaagagatagcaggtgtctctggagtttcccagtaggagagaaatgacttaagaagctatctgtggctggtgtttggtagacacttgacacaaatagcctgtgcctcctgaggagagcaggaaaggcagtggtggtcttcactgtgttgtggccaggagcacatgggtgtccagagaagggtaagaaaggaaattgctgaaagccaaataccaaagcccagattatgaggttttggaggttcccaccactgaagctgcactctgaaaactgggcagtttacaaaattagaggaatcaacccattccaacttcaaaggagaccagttacctccatcctggacacaggaagccagctaaaccagcctctttctgaatgcagctcagcccagagccacttgtaattgatgtttagagaaatactagaagcagcaggatggtaaacatggaatggctgccctatgctacgtggaatggtagattgctttactgttcacctagtgataacaggagtagtcacttcattttattgatgataaattgaggtttagccaagtcacacagtgaagtgcaagagctaggattacaactgagttctgtctggcccagaaccagctctgcagtgtcccatccaccctcacaccgctgctcctctggacctctgtcacacaggagcagacaaggatcattctgggatgcagcagctactgcccacagaaaagccatctccccgtggccttgatactcccttttaagaagtggtaaactggccgggtgcaatggctcatgcctgtaatcccaaaactttgggagtcccaggcgggcggatcacctgaggtcgggagttcaagaccagcctgaccaacatggagaaaccccatctctactaaaaatacaaaactagccaggcgcggtggtgcatgcctgtaatcccagctactcgggaggttgaggcaggagaatcacttgaacctgggaggcagatgttgtggtgagccgagatcaagccattgcactccagcctgggcaacaagagcaaaactccgtctcaaaaaaaaaaaaaagataaaactacaagataccatgatgatgaatgtcaggttttgtggttgggaccaaccatgagacaaagcttacgaaaaggtttaccctggcttagtccgcattaacagaaatatggtatctggagcatccagatccaaacctgctctaatctacgtgtctaaaggataagttggttcctagatgccttgccttaaagagtggggtgcttccccttgagcaaaaaagactatggagtgggccaggtgcggtggctcacgcctgtaatcccaacactttgggatgccaaggtgggtggattgcttgaggtcaggagttcaagaccagcctggccaacatggtgaaaccccatctctactaaaaatacaaaaattagccgggcatagtggtgtgtgcctgtaatcccagctacttgggaggctgaggcaggagaatcgcctgaacccgggaggcagaggggttgcggtgagccgagatcgcaccactgcactccagcctgggtgacagagccagactccatcgtaaaaaaaaaaaaaaaaaagctggagtgtaagaatgaactctctcttcaaaaatatgaagagcttttacacatgaaagagatgagatgttctgttgagacttaatggagcaaactaagaccccgagtagaagtcacaggaagcccaaagccccctcggcacaaggataaatatgtccgaagactgtctgaggagatggtaagttccccgactggggcacatgaggcaatcacagctaacgttttgaggatacctgttctatgcaagctgttttattgaatggattacaaaaagtatgttaagtaatgcacaccctaggaaggcgttccttgtaaaatgggcccatgtttcaggtgaggaaactgaagctcagagcgggagacagcttgctcaagcagaggccaaggcctttacgtcatggctcttcctcagcacaagctagagacccacactggtggggatgctccaaaagggactcgaggattagaaggaacctgcaccatatggctttgaaggcctctccctgaggattagtgattctgatttttcttaagacaggattctaggctactctatatgagagccagggccaggcagaggctgtggagaccagagtcggggtcagaatgatagtccagccccacagtagcctgctcctgtccttctgggactccctggagactggaccctagcacctccactcagcctcaccctcctcacttcctctgcagaggtctattctaggaaaaggaaatggccggagctggcaatgaggagctgtgaccacagggtggcagcagtgcttcagctgtggagagtgactataggaagggcgatgaggcaggtcggaagcagtgctctctagtgaggatgggggtctgtctgcaaagattggaagccacactcattcagtgggctccaaaatcctgtagcctccctctatatcttaataattttttttttttgagacagagtttctctttttgccaaggctggagtgtagtggtgccatctcagctcactgcaacctctgcctccccgattcaagcgattctcctgcctcagcctcctgagtagctgggattacaggtgcctaccaccacgcccagctaattttcgtatttttagtagacagggtttcaccatgttggccaggctggtctcgaactcctgccctcaggtgatccacccgccttggtctcccaaagtgctggggttacaggtgtgaggcactgcacccggccaaaaaaaaaatggtttttaattaaaaaaaaaaaagatacaggctgggcatggtggttgacgcctgtagtcccagctacttgggaggctgaggcaggagaatcacttgaacccaggagccagaggttgcagtgagccgagatcgcgccactgcactccagcctgggcaaaaagagcgaaactccatctcaaaaagaaaaaaagttaaattctctccatcatcatgaagttgaatatattttttctatccacaggcaaatctgagtagcctccaagaggcacacaagcagaggatgggctgtgttgccctgactgccagccccaggcacagaggaccaggcctggtcatcctcacagactctgaccctggctcttcccactcctcttccactccaggacatcctacttaacccctcctgacatgagtttcttgtgctttagtctacaggttaggaaagaggggaagtgataaacaagctctccaacctgttgagggattaggggttcgtctaaggctccccagggcctggctctgacaaagcgtctgcaactaatgatgcttcttgagctctggagacaggatttatgcatctaataaagtctgtaactccaggcttaggggccgggggcaggaggctgagagcatgaagtcctgggggcgccatgggaggagatcccaggtggctcctaatgagccctgcatttccatttgcctgctctagattcccctaaggctactgtgaggctgggggtgggggaacagcaggtataagaggttggggtggctgtaggagggtaggtggcagcatggattctaggcaggctgctgcactgctggtgctgctgctgttaatagacgggggctgtgctgaagggccaggaggccagcaggaagaccagctctccgcggtgagtgtgtgtcccatccccatatcaccattgcctctacttcggttgagacttgtgctctaggttctgatactttctctggctgccaaggttgtcattaggtcctcacatctgaggaaatggttccgcagcctcctaccacttgcccctggaagccagtcccttccccttgtgacttacgtgtccagggtatttgcccatcttccttccctgatacccccttggcacaggaggaagacagcgaacccctcccaccacaggatgcccagacctctgggtcactgttgcactacctgctccaggcaatggagagacctggccggagccaagccttcctgtttcagccccagaggtgagtctgaaagggacacaagcatggcaggggctgggggtggaaagggcaggaggcagaggaagaggagaaggaagggggctagagaagggagactgcggggacctgaggacaaatctttcctaaggtttggcagaaatacccagggatcctggaggaatgaatggctgagtccccgggctggagaggggctgaattcccagttctggagcctggctgcccctcaacgctttgggaagaagtgacatgtcatcccttgatatgtctgcatgcaaggtccacacccaaaagtgtcaatgtttgccccccaaataaaattgtctggcttctgaatccatgtgtgtctgtgtgagactttacagggctgggtggaagcccaagggcaagaaccactgcccttcccctccaccaaacccagccctccagcaaggc

SEQ ID NO: 6144 - DNA, 6000 bp, Homo sapiens
gagcaacagagtgagactgtctccagaaaacaaaacaaaacaaaaatttgccaggcatggtggtgcgtgcctgtaatcccaactactagggagactgagacacaagaatcgcttgaacccgggatgtggaggttgcagtgagctgtgatcgtgccactgcactctaccctgggcaacagagtgagactgtgtctccagaaaaaaaaaggaaaagaaaaagaaaaagaaaaaaaaaaaaagatatgggacaggactgcagggcctaaaaggggaaaggtcagtttgtcagtatgggtcaaaggtgagaaggacaaagtctgggctgggaagagatgcataaatatttgcaaatgttttgtccttcactgttttggaagccatcaactttctggtttccttgtgattctgggaaagggcagattaaaaacagcaacaacaacaataatagtaattcaggtcatgaagataccaaagcaaatgagatgtttggactgtttttttcctctgacttgtttctcctcaaaataggaggatcacccacatcctttaagagtgaagatgaggtgtgctcagggcaaccgaagtttccaagagctaagacactttctagctctggccagtcttggtgtctctttgtcctgagcctttctccacttcccaacctgagcactgcttccttccagcagggctgctctgctgtccccccatggtccaagctgtgctgctgctttgctgtgtcctgctgtccctggtgtctgcctttccaagaaatgctcagaatgagactctgaccctccagccatctttaacagagactgggcatccatcaaacatgctctccattatttggagaacatggagagccagattcctctcccagatcccaggatctgccaagatctcttacacacagccccctccctagcccctctgcctgagtacctgtccaacttagctctgagggtgcccttggaggaggtgggctgcccaactgaggcccatgttctgcagtttcagatgcgaggaaaggataccactgaaaccctcatccgtgagagtcaaaaagttcaatggggaggaaggcaataccaacatcattgtgacgaatctagtagtcccttagggaagtgtgaataaacccagcacccagctgcccatcctgggaaatgtatggatggtggcaaatatacccactggggtagctggcctaccaggtagctcagatggtgattgagtttgctgagaaaccatctcccatgatgcttggtgtcacagttcaaagttttgggtgtccacatcaccaagaactgcaggtatgagtcttgggagcatattgaagaattaggcaaaaagttgaagaagctctcaagatcatttaaattgtccatggacagtgacaatataatctatcaaatgttccacagctattctgaagtgctttgtgaggaaaatgatccaggaattgatcccggctcatttcagctattcaatatcacataagtaatgagtctcctttcccaggactgtattcaaggatggcacacagtaagtagttagaaatgttggagaccacttaggacagatgaatgctctttatttcacctcttcccttaaacacatatgtgaccagtgttagccttgcccctctccacttagtaggtgtcagctcccctccttttttttttttaagacggagtctcactctgtcacccaggctggagtgcagtagtgcgatcttggcttactgcaacctccacctcccgggttcaagcaattctcctgcctcagcctcctgagtagctgggactacagacgcccaccaccacgcctgggtgtatatatatatatatatatatatatatttttttttttttagtagagacagggtttcaccatattggccaggctggtctcgaactcctgaccttgtgatccgcccgccttggcctcccaaagtgctgggattacaggcgtgagccaccatgctcagccgctaatttaatttttaaaatgaagagaaatgagagtatcacaaacatctcatctttcctaattctgaatttccctggctcctatcatgagcttagagtgggaatgtggcagggacatacaggaaatgccaaagaacaggactgtaggcatagaggttgagtgtgtgacaaggggcacaaggtttgagcagccagtataaatgggcaaatatttgcagagattacatccttcactgatcataggggaaagcaaatatctcctttcctcatgggacacagaactaggcagaacaggatcaggaagcgatcaaacctaccaaggcagtctcacttctcaatgactggactgtgtggtaatttggggtccctatatatgggtggaaataaaacagaagtccctggtgacctgtaaatgggggagaccaagtgggagcaactggggtgcatttcctatttcctaggcctttacctaaaaagaacagaagcttggggccaggcgcggtggctcacatctggaagcctatcactttgggaggcggaggtggaaggatcacttgagcccaaagttcagaactaggctgggccagatggcaaaaccacgtctctacaaaaaatttaaaaattagctgggcatggtgtcacgcacctgtagtcccagctgcttgggaggctgaggcaggaggatccctcgagcccaggaattcaaggcagcagtgatttgtgatcccatcactgcactctagtctgggcaacagagcaagaccctgtctctaaaaagaaagtacaaaagcttggaagcaggtgatgtatgaggtgtccccctaactgagtcttgggctcaccatcgcccttagggaaatggtttgtatgtttcggatttctcccctttctagggtactctgctccagacatgcgtggcctcagactcatcatgataccagttgagctgctactttgctacctcctgctgcaccctgtggatgccacttcatatggaaagcagacaaatgtcttgatgcactttcccttgtccttggaatcccagacaccctcctcagaccccttgtcctgccaatttctgcacccaaagtcactgcctggtttcagccacatggcccctctacccaagttcttggtaagcctggctctaaggaatgccctggaggaagctggttgtcaggctgatgtttgggctctacagctacagctctaccgccagggtggtgtgaatgctacacaggtcctcatccagcatcttcgagggctccagaaaggcagaagcacagagaggaacgtgtcagtggaagccctggcctctgctctgcagctgttagccagggagcagcaaagcacaggaagggtcgggcgctccctcccgacagaggactgtgagaatgagaaggagcaagctgtgcacaatgtagtccagctgctgccaggagtgggaaccttctacaacctgggcacagctttgtattatgctactcaaaactgcctgggcaaggccagggaacgaggccgagatggggccatagatctgggatatgaccttctgatgaccatggctgggatgtcaggggggcctatgggtctagcgatcagtgctgcacttaaacctgcattaaggtctggggttcagcagttgatccagtattaccaagatcagaaagacgcaaacatctctcagccggagaccaccaaggagggtttgagggccatctcagatgtgagtgacttggaagaaacaactactctggcttctttcatatcagaagtagtaagttcagctccctactgggggtgggccataatcaagagctatgacttagatcctggggctgggagtcttgagatataaaagaatgtggtaaccacagaattaataactgtactaccctgacaagctatatacatgtcttcaaaattttaatctgatttatccaggaggaaggctgtacagtaaaacgtaagaacgtaaatgtttgggtgttgaagtcacagggtttggtttcgaatctaggctccacttgttagagcctcggtgatcactgaatagtaacttctttcttgaactaagatcagttttgaagtttctaaaggagatagaatgattttaacctcaatgagttgccctgtaaatttaaaatgatacaatgaatctaaaatgcttatcacagtactttcaataaatagctattagccaggtgcggtggctcacgcctgtaatcccagcactgtgagaggctgaggcgggatgatcacctgaggtcaggagttcaagatcagcctgggcaacatggcgaaaccccgtctctacaataaatacaaaaaattatcctggcggagttatgcacgcttgtagtcccaactacctgggaggctgaggcgggagaatcacctgagcctgggaggtcgaggctgcagcgagccgagatcgcgccgctgcattccagcctgggtgacagagcgagaccatgtctcaaaaaataaaaataaaaaaaaattgttttcattacctcagccctcctcttcctatcccaaggcgtcgaaattccggtcccaccccttcccatggagcccttggcgtctccaggctcctcaagctagtttcggttccggggctcacgcgcgggttctcgaaaatcagctgtttcagtcttgggctagtccactaattggactcctcccctcgtagaaagtgcctacttgaacttctccaccaatcgctgaagctgcaggtgtggtttcggctcagcttgtcccgccctgcggaggggcggagttgcggcggcgccagtgagctcgcagtctgggaagggcttgactgaatggcagccagtgtcggggtggcggctgggaatgggggccgctccggacttccgctgccaactacaagggggcgggtccgaggggggttagccgaagttgtaggcggggcgcgaggttctagtacccgagctcatactagggacgggaagtcgcgaccagagccattggagggcgcggggactgcaaccctaatcaggtacgggccctgagagggtgtgctggggtaggggtgggggtgagagtgagagttcctccgagggaagggcgactggccccaggggttaccccctggagagggtagcttcggtccccagattgaaataggagctgtcgcctgctcggtcctcgatcttcttctgtccagcctatctccctaaccctaatgcccctctcccaaaactgccctgcagcttccgagacccggaatctggcattgttatgttggttcggtatctgacgtttttccctctgctctgcattattttttatcttcaccaaaaaacgatgttcaaagatagataaatctaaaaacaaagatagataaatctattatccttgttttgttaaaaagtataagctactgaaagatgaaacgattgcctaaggtcacacacaaaattcagttcatttcagaaaagcttcttgagtgcaaaatatgtgcctaagaatgagagataatgagaaaaaattgtttcagcccttaacctcagtgtttgcaatccatttggggagaccaggttttttgttttgttttcatatttgaatctttgctgacttgctcctttaatatcagacacttaaatcctcaagaattgggacctcatcattaatttttttttggagatggaatctcactatgttgctcaagcttggtctcaaactcctgggctcaagccatcctctcgtcttgtgggcctcacaaagtgctgggattacaggcatgagccatcatgcctggccacctgatcatttttttaacttttttttggtatcataaaagcaatacagatacatagttttaaaaatcaagcactactaaaagagttaaaatgaaaatagcccctgcccaatccctcccttcccttgttcctgctggaggtagaaaggcagctgatgttattcatgttagtagaagactctcccaccccaagcatttctctttattttgtaataaaatcat

SEQ ID NO: 6145 - DNA, 6000 bp, Homo sapiens
gaatggctggacactgacaagacctacctctagagctgtgttgccctggttcccacacaactgcacttccaagatgagcactggcttcagccccctcagataccttcttcttccctgtccctccgggtctcctccaggatatgcatggcaaactcaggagcctacagaagcctagatggtcaagtaaaagagcaaagcatgctggatggaagagtagtgcaactgtaacgactgggcacgctagtcctctttgaagggcagtcactactcacaccatctgattctttctaagaagggaatattgtcagatctctacattttcaagagcagccagaaatcaaatttttaattaaaaaatctgcttttcaaatgtcagcagctaagattttttaaacatattcaagtcttgatctttaatttttaaaataagctttatattttagaacagttttagatttacagcaaaaatggcaaagatagtacagagagtttccatatacccccacacccaattttccctgttattaacatcctatattagaatggtacatttgtcacaattaatgagccaatattgatacagtgttattagtagttgacttacatttccttagctttacctaatgtcttttttctattcctggatgctgtccaggatagcacattacatttggtagtcatgtgtctttaggttcctcttggctacgagtttctcagacttcccttttttgtttgatcactgacagttttgaggcatactgatcaggaattttgtagaatgtccttcagttgggtttttctgatatttttcttgtgactagactggggttatgggttttcaggagcaagatcacataggtaaagtaccattctcatcacatcatatcaagggcacatactatcacatgactcatcactgttgatgatcttgatcacctagttgaagtagtgtttgtcaggtttgttactttccccactttccacactgcacgctataaaaggaagtcactctgcacatcccacacttcaggagtggggagttacgcctcgcctctttgaggacagcgtctctaaacaaattatttggaattgttctcagcacaatcttccataaccaggtcctacctacattttgggcttcatccccagctgctccctccctctcccattccaggctcatcatactacaggtcagcacctgcagatcctgcatggtgccattctttctcatgtctcttgctctcactattgccactgtctatgcatggatgttccttatctttcccccttgcatgctcaattcccctttgaccttcaagactgctcaagtatgctctactctagaaagtcttcccagaacccagtctgcctcgaaggattttccttgagtcccaaaataccctgtgcattttcccaccatggcgttcattcctctctattgtttattctcaacacactcccttgttagactgagagttctttgacagcagggctgtctttttacttacctttctatcccctgtgcttatatacggcaaacatcagacaccgggtaaatatattttgaatgaatgaatgaacaaacaaatgtgcagaattctagatacaagatttcttctatgaatttccagtcattctgccttatcaacaatcaccacattctgccttgtattatggttgtttaggtacttgtcttacttattttagtagctctattgctctttgaaggctatgatcatgttttatttgtactataatttccaggtcagtgtcttacatataatagctgtttaataaatctttgttgaataagcaaatgagttaatgaacaaataaatgaagctgcctgcacacataattgatgagagggaatcgcacaaggaaaggaagcataatgaactggaaaataaatggcagaattttcaaacgaaatgaagttgacttgcctagcacattatttccaaatttttatcatatgctagtaaatattgtcacatgtttgtttaaagaaatttaaaaacttaaatcaattcttaatgaaatagctacataactgctccttaacaacagaaaggagagtcaagcctgattcatctcttagagatagacctccctacaaaaagaaccacgctgctacccttaaaaatcactgttgtataacaaaacatgtgttcctttgtcccctttaataaccaaacgagtttatatcaaaaattttttaaatagcatttctctttatctatctctaataaaatataatttttctaagtgtcctgtgctggagagaagtaaacagaaaacaaccattctggaagaaaaaaaacgtccttatagcaagatagattaccattgttatcaacaccaaattcaactgctgcagaagaacctcactcagaggaaaccgagttaggagagaatttagttcctctttttcttgcaccaaaaaataaattttatgaatatttctcaattagtatttgattaggaaaacctgtagagggcgtccttgcaccaagagccatagaggtttgcgcagaactagaaaaaaatgttaaaaccactcgctccgagttaaagaaaatgcctattgtgctgtgaaattattatctttacctgggtgacactggcattataacattaaagtgttttaaaagtagcctaatgttcatacattatatacatgaatattcatagaaataaaaaataatgcaatgttgggaaacaggtaaatatttttattgtaaaggaagaatcactgtgaagctttggatgcaaatagacttaattatgatttatttatcagtatgaggtataagttactaagagaatgggctttgaaatcagagtgtctgggatttgaacccttactctcatttaccagctggatatccacagtcaacttactggactttttgagccctctttcctcgtcagtaaaataagaataatagtagtacctacttaagagttgtgaggattaagtaagcacttaaaataaaagtactttaaaaattaagacactgcaagttcaaatcagtcatagacttcttgtctaattccttttttccttttttttttttctattggttggttgtatagctgcaaatatttcctcattggaaatctatattctcagaacctaacactgatttaacttgatgcctgcacatgtccaccatctcttctgttgtttctgtttgtttttccctcttgaggcatctgctactctataaaggactgattgaaacaccacgcccagccccagacatttgatccttgaggcatttgtcacagcttcgggtactaaagaacaaacacaagtaaatgaaccttttatgagtccgaaggctaagttttttaattaaaaacaaaacaaaacaaaacccttttgcttccgttttctttgtgcatccgaggaattaggcaggaggcaaaaatcagttctttctgctgggccaggtggataggttatgctgcagcccactgccggccaagcatgcttctcacagacgaggccagagccttggttttgcccccacgcacctgtgaattcggcaacttttaaaaaattattttatttatttatttatatattttttgagacggagtctcgctctatcgcccaggctggagtgcagtgccacgatcttggcttaatgcaacctccgcctcccggttcaagtgattctcctgcctcagcctcccgggtagctaggactacaggcccccgccaccatgcccagctaatttttgcatttttagtagagacggggtttcaccacgctggccaagctggtctcgaactcctgacctcaggtgatccgcccgccttggcctcccaaagtgcagggattacaggcgtgagccatcgcgcccggccgaattcagcaacttttaaaaaatatcagcaaacgtgaagatatccacgatgttagaggagccctaccccggagggtcaggtacagctatcgtccagggcccagggcactcttccgggcactgccgggttatcagggagacagacgggaatccccaaatgctgggtgtcgggcaagtaccagctggacgccctgcgcctcgagccaaggccagcgcctgccatcggcaccatcggacagtcgagcctcgagttttaactgcttgggagcgcgcaaagtgccagcctatcgcagaacggagcgcatagggttggcggagagaggaatcctactggctgaaagggagacgaagggcaatttgcgccttcagtgagcgccggaggaggaacaggagtcatcacctcatcatcatcatcatcatcatcatcaccatcaccatcaccatcatcagcactcagtcaagcccagcgttgtctgctctccccatttccctcccccgaagcctcccttggcccgaggaggtggcgagtgatgtcccaggggtctctgagtgcccttctccgggtccgccagccctacacgcccacttcgcgggcgctccactgggcgcaccgcactgtgaatgcagcctcgggggtccctcgcggccccgcccccgggggggccccacagcgcccccaagtggcggccgcccaggcctcgcgggccccactcctcgctcgcacctcgctcgcgccagcccttcccgctcttctgttctcgctctatttgccccgctgactgctggcctcgccagctttgccagtcttacgtctctgccgcccccactcccgcccgcgccccatcttcttgcgcgactcgcgcccgctggtccccccctcctcctcccgcgtcctgcctgccccctcctcctgctctcgcaggctccttggcacccaggccgggaggcgacgcgcccagccgtctaaacgggaacagccctggctgagggagctgcagcgcagcagagtatctgacggcgccaggttgcgtaggtgcggcacgaggagttttcccggcagcgaggaggtcctgagcagcatggcccggaggagcgccttccctgccgccgcgctctggctctggagcatcctcctgtgcctgctggcactgcgggcggaggccgggccgccgcaggaggagagcctgtacctatggatcgatgctcaccaggcaagagtactcataggtaaggcccccgcctccagcgccttcccctgcctatgtcctcctctctccactcttcaagaaagagggatacctgcgtttcttgtgttttaaaacttaatttccacaaaagagtgttcccctcttttaattagatattttccatctgaaagcttataaacttctcttttaagaaaccaaagctgatctagtgttctgatcatgctgttgttaatttttatagccctgcgtttttaggtgcacccggcatttttttgcgtcggttaactccatgtccatcccttttccctgaaagcatgggtctgttggcatcattctcatcatccacagagaaaaattaatcttagtagcgttgatggtactgaaggcagatgcttgtgaacagaaatgacccacactaattctttggttttctttttgcttgaaacttctgatttagatgatttcaagtctacctggtttgatcgttttattattttaaaaaccaggatttgaagaagatatcctgattgtttcagaggggaaaatggcaccttttacacatgatttcagaaaagcacaacagagaatgccagctattcctgtcaatatccattccatgaattttacctggcaagctgcagggcaggtaagttctgagaaaattaccctttaatatttccactgccttatggcaggtggaaatagtactgtatagtgtgtagcctggtacattttacagttattaagagaaatttctcatctgattgccaaagcaaataaagaattaatttccatttatttcaagttgccatatcaattaatgatcttcaaaagaaaagaacaagccttgtgcctaagcccattattttgataagactcagtgtcctgaggctgctggaaatataaagacctc

SEQ ID NO: 6146 - DNA, 6000 bp, Homo sapiens; identical to SEQ ID NO: 2762

SEQ ID NO: 6147 - DNA, 6000 bp, Homo sapiens
aagcagccccctgccttaacctctcaaagtgttaggattgcaggagtaagccaccgtgcccattttcttttctttctttctttttctttttttttctgagacagagtctcgctctgtcacccaggctggagtgcagtggtgcaatctcagctcactgcaacctccgcctcctgggttcaagcgattctcctgcctcagcctcctgagtaggcgggattacaggcatgtgctaccatgcccagctaatttttgtatttttagtagagacggggggggtttcaccatgttggccaggctggtcttcaattcctgacctcatgatctacccacctcggcctcccaaagtgctgggattacaggcaagagtcactgcgcccggccttttttttttttttttttaagagacagggtctcactctgtcacccaggctggagtgcagtgacgctcgctgcagctgcgaactcctgagctcaagtaatcctcccacttcagcctccagagtagctgggactacaggtatgcaccactatgccctgctaatatttttattttttgtagagacagggatctcactatgttgcccaggctggtctcaaactctggagctcaagcgatcctcccacctcagcctcccaaagtgctgggactacaggcctgagtcagcctgtctggcctttttttttttttttttttttattcaacagatattcacggcatacctgcaagattccacgcccatagtttttttggccaggactgaaagtgcttctatccccaaactgcaagtctttgaaagggcaagcttttgccacttggtttagctgctcaaaccacattggctaatgcctgtatatgtctggtgccaaggtttttgctcaataacttctctacctcttatgcaacccctcacttgacaccctctacctgttggcatccagaagaaaattccaccctccaggtgagcaaggagttgtcacctcccttttcatggacaccatacttcctaatgcagcctatctttacctcagtgttttcagccatgttgtaggtatcagtgttgctaatctccacctgaccctgccttgtctacagaactggcaataactgattcttgtttttataataggtatcattcccattctcatttcatttctctcatctgaaatatgtccctgtggttcagaatgaaccctaactttagctggccagttcttatggactgaattgtgcccacccaaattcatatgttgaagccctaaccccaaatgtctctacacttggccttaattatttagattaattaaaggtaattaaggctggccagacatggtggctcacatctgtaattccagcactttggaaagcagaggcgggagaacgacttgagctcaggagtttgagaccagcctggccaacacagtgaaaccccgtctctactaaaaatacaaaaattagccaggcatggtggcgtgcacctgtaatgccagctactcgggaggctgaggcaggagaattccttgaacccggaggtggaggctgcagtgatccgagatggtgccactgcactccagcctgggcgacagagccagactccatctcaaaaaaaaaaaaaaaaaaaaaaaaaaaaaaaaaaaaaaaaaggtaactaaggctaaataacattataagggtaggggatcctaatccaatagaactggtgtccttatgagaggaagagacatcaggggtgtgtgtgtatacagaaaaggcccttgcatgtaattgaaggattaaaaaaaaatgagaaaaggccctatgatgacactgtgagaacgtggccaactgcaagccaaggagagaggcctcaggagaaaccaaacctgccaacaccttgatcttgggcttccagcctccagactgtgacaaaataaatttgtgttgtggccaggcgcggtggctcatgcctgtaatcccagcacttcgggaggccaaggcaggtggatcacctggtcgggagttcaagatcagcctgaccaacatggagaaaccccgtctctactaaaaatacaaaattagccaggcatggtggcgtaatcccagctaccagggagggtgaggcaggagaatcgcttgaacctgggaggcagaggttcaggttagctgagatggctccactgcactccagcctgggcaacaagagcaaaactccgtctcaaaaaaaaaaaaaaaaaattaagtcaggcatggtggcatgtgcctgtagtcccagctactcaggagactgaggcaggagagtcgcttgaacccgggaggtggaggttgtggtgagccaagatcgtgccactgcactccagcctgggcaacagagcgagactccatctcaaaaaaaaaaaaaattgtgttgtttaagccacccagtctgtggtattttgtcatggtggccctagccaactactgtgctaatcttctgtgtctttgtccaaaccactgataacaataaacaggacagagccctgtggctcaccactagacacctccctccaggctgatattaatctgaaacagtccaaataatctaattctaatctaattaattaacaacaataacaatttgcattagttcctatttttctaacttgttcataaaaatgcagcaagaaccattttcaatttttttttttttttttttttggagacagggtctcactctgtcactcaggctggagtgcagaggcgtgatctcagctcattgcaatctctgcctcctaggctcaagtgatcctcccacctcagcctcccgggagctgggagtacaggcgcacaccaccacacttggctaatttttgcattttttatagagacacagtttcaccacgctgcccaggctggtctcaaactcctgagctcaagtgatcccacctcaacctccaaacgttctgggattacaggcatgagctaccccatgtggccaaaacccattttcaaaatgacttcagaaacaccacatctatgtcatttcaaggatcgaacacattaatattaataagcttatgcaaatttctctgtgatcttatgcctcagctgactcctctgggcctcagatgcccagtttgtgacatttggggatagggagttcaccatcacaaccatcaacactaccatttattgacagctttctaagtattaggttactgtgcgaagcactgcagacccctctctcatttaatccatcaacaatccccctaggtaggaataattggtcctattttccacatgagtaaactggctcagagaggtcaagatgcttgcccaaggtcacagagcaggtgaacaccagagctgtaactggaatccaggtggctgcactgagtacaggatttgcatctccctaccccattacctgtatttgttcttcttccttggtgtgagggtgggggtgctgccccttgagggggtggtctcacagctcccctttgcccccaaggccttcgatgcctccttgcccacgcctctggttctgttagccttctccacccagggcggatcgaagtccggtggggtaggccgggtgcctgctgggctgccaaacagagtctcatccacatatgacgtcctggccttgacccggtagccacctcggcagcggtgctgaaggccgagggtctgcatcccactgacggccagctccacgggggtcttcatgctgcctgtggtccctggtgacagcaggtgtgctctgccggccaggccctgcttccgaggctccctgtgagaggaggtcagagtagcacccctgagccacagaagtgctaatggaggaagaccggtagtgtctgaagttctcatcccaagggtttagttctctctcaaccagtctctcaaaggggagctgtcaacttcagggggcattttggaaatttctttggcttttttttagttgtcataatggtggtgaaaggggggctactggcaattatttacagaatgactctggcggtgaaggagagatgacacctgtgtctatttaggcaccaaccagaaaacacactatggtggtaggggagacaggcactttcctatgtgtactgatgggggtgggggcaatgacagccagcgtggatcccatgcctacctcctgcaaagagctttacaagcattgtttcatttaatcctctcaacagcactgtgaagtagcttcgaatttgtccattttacggatcacaaaactgaggtgaagtcacatgtgtaggtcacacctataaagctaaaacggtggaagtgaaatctgagtccagagcttgtgtacttggctacactgctatcgggagatcaccgccgcccccaccgccccacattctgcgactcccaaatcaatgacccgattaaaaagtgcccgaggtccctgcatttttgggttgttctcctacctgagcatcttggctcgtaggcatcgggatcctcagggacccgtccccgcaccttcttcccaccaggtctggacccgtcggtgagggcgcgggggcgcgcggtgcatccgggatccccgtcaatctgcagcccggaatgcctggggccccggacccccggcagcctaggccgtcccggggcaccgcgcgcggacggactcacccgaggagccggcacaggctacgtgtgaacggcccgcgaatccagaaacccagaacccagcactttgcacccagcaaccagggagcagccagcagcactgcggacgcggcccggaccattcgcgcccgcggatggggggagtccgcccaggggcgggcgccacgctcctgaggcccaggaggtccctaaacatggagagggtcctctggtgccactcactcaggtgcgtgtgtactaggccgccgagggccgcaggcactggcgaaagctcagcggaggtcacgtggtcaccgcacctcccccccccccacgcagttggtgcgctcctcaggccacgcccccttctgcgttcccagcgcgcggcccgaatggcggccgacaagggcccggcggctggacctcggtcgcgagctgccatggcccagtggaggaagaagaaagggctccggaagcgccgaggcgcggcctcccaggcccgcggcagcgactcggaggacggcgagtttgagatccaggcggaagatgacgcccgggcccggaaggtaggcgcgtggggctgggacgcatgttcgggcccgagacccggctccgggcagcgcctcgaggcctcagtttccccagctggggattgggctccgcagagtgtggggagggaggctgccgacccgaggaccggtcttgggaccgccggcctgagcacgtgtctcggggcttgtcaggctcagggttccgcggccagagccttgggatcccggggctggagcctgcgggccttcctgccgggttttggtcgcgcgtctctcattggctgcctcctgctcgtggggcggatcctggctccctttcgcccaatgaaaagtgcgggtgcagaagatctgactttgagagtttggagcgttcttgggaggttgaattaaggggaggccagactgcgtggcttgagacagtgtgacgcctccaaacctctgggaaacgaattaaaacaattttttttgagacagagtcttgctctgttgctcatgccggagtgcagttgtgtagccacgccttgctacagcctccgcctcctgggctcaagcgatcctcccacgtcagcctctccggtagctgagaccacagacatgcgccaccacgcccggataatttttaaattttttgtagagacgggggtctccctatgttgcccaggatggtctcgaacttctggcctcaagcagtcctcccacttctgcttcccaaagtgttgggattaacaggcgtgagcccggccagtttgtgtttgttgaccgtttactatgtgccaggctccatgctaagagctgtacgagccttattatttaatcctcacaccaacgttgtgctaacaccaccagcaactgtcatcttcattt

SEQ ID NO: 6148 - DNA, 6000 bp, Homo sapiens
ctgaaagatcacccgagttgctgttttcacacacgaggaaactgaggccctgaaagtttgactggcttgtccaggatcataggctgctccgtagtgcatttgagactgcaactggctgccattgggttcccattctgtattcatggtgtcagcacagctacaagcagcacttctagtgttttctccttctctttggggtctctgacagccaagaaaatctttgtggatgagggtatttttctttcttcttttttgttttctctatttgctttaagtttacttttatgatgccatttgattgattactctgttttcaattttatttattgatttttgttgtttataacttactgcactgaatggatatgtatacatttggttattttattttatttatttatttttgagacagaggctcactccatcgcccaggttagagtttagagtgcagtggcaggagcttggctcactgcaacctccacctcccaggttcaagcaatctcctgcctcggctttccaaacagctgggattataggcacgcatcaccatgcccgcctaatttctgtatttttagtagagatggggtttcaccatgttggccaggctggtcttgaactcctgacctcaaattatccactcaccttgtcctcccagttctaggattctaggattgcaggcatgagccacagcacccggccaacatttggttattttaaacaaaggaaaaaagaaaatgcaaacagtatggtaaaaagtaatcccactccaactcccagtccccctagttcccctccttagaggcaactaatgttactactagtttcttgttacccttcctgaggtatctcaataaataatctatttttgagattattccatattagtgcaaatagcactaactcattatttttaatggctgcatgggagtaaattatattgttaactattccccaaatgatggacatgtttctagtttgtaccctacaaacaatgctatagttcatatccctgcactgcatgtctttatacaatcgtacaagtatctctgttggataaacttctagaagtcgaacagctgggtcaaaggctgtgtgcattatagattttgatgctagttgaacggacatccaaagctatggtgttaatttatattcccaccagcagtgtatgagagtcctacttctctctacatttgtctaagcttttaaaatactgtcaatacttcttgtggctttaatttctgctttttcttatgatgagtgtgttagtcggctccagctgctataacaaattaccatagactgggtggctttaaacaacagacatttacttcacacagttctggaggctgggaagtccacgatcaggtgctggccatttcagttcctggtaaggaccctcttcttggttatgtcttcacacagtagagagagagaagcaaactcccttgtgtctcttcctacaacggcactaattccatcacgagggctccactcttatgctaattacctcccaagggctccaccttcaaatatctttacagtggtgagtagagtttcaacatatgaagtttggggaggacacaaacattcagccaataacaacgagtgaggttgagtaacattttatatacaatcaagtgtcaatgatggggatgtgttctgagaaatgtaacactggtgatttcctcattgtgcaaacatcataaagtgcacttgcacaaacctagatgagatagtctactgcacagctaggctaaatggtatagcctattgctcctaggctacaaacctgtatggcatgttactgtactgaatactgtaggcagttgtaatataatggtgtttgtgtatctaaacacatctaagcttagaaaaagtacagtacaaatatggtattataatcttatgggaccactgtcatatatgtggtccactgttgtccaaaatgtagtacatgactgcatttaaaagctggtcttctctattctgtaaactgtccaagtcctttattcatgtttctattaggttttgctctgaaagatttatcattagtatttgatttttcgagagagggtctccgtcacacaggctgaagtgcagtggcaagatcatggctcactgtagcctcaaattcctaggctcaatcgatcctcctatctcagcctcccaggtagctgggactacaggtgagcacctggctaattcttttgtagagatgggagtttgtcatgttgccttggctggtcttgaattcctggactcaagcgatccgctggccttggcctcccaaagtgctgggactacaggtgtgagccactgcacctggcctattactatttctacttaaacctaaacatgctgaagaatgacaatttggtcaccaggtgagtaggatagaactaccttcacctctgatgtaaatatatggaatctggatatgatgggcattataccctcgaattgctcaggcctaagtaacaccgtgtatgttgacagagtggttttttttttttttttttacttttaccaacagtatctttatttatttatttatttatttttttgatggagtctcactctgtcgcccaggctggtgtgtagtggtgcaatctctgctcactgcaacctctgcttcctgggttcaaacgattctcttgtctcagcctcccaagcagctgggactacgggcacacgccaccacacccggctaatttttgtatttttagtatttttagtagagacagggtttcatcatgttggccaggctggtctcgagctcctcacctcagttggtctgcccgccttggccttccaaagtgcacggattacaagcgtgagcgactgcatccgctcatcaacagtatcttaatagaaattctcaatattggcctgaggtcattgggtcagcaatcaggatcaatttttgagattaggaaatgaggctcaaagagttaaactatgttggtcaaaataatgcaattagagggatggcaaagccagccagaggcatctttctaaggagcctcctgaattcatgctcgggctctggagtcagaaggacctgagtttgagccatgtactaactgagagattggagatgtcactgcacacctctgagttttacctaattacagcctaagaataataacagtatctactttaggtggttgttctgcggattatgtgaaataatgtaggtaacgacattcattgtaacaatatgttgcatgataatacacattataacatgttgctcatgagttttgctttagcagtatttgtggtagttccaaaactcagttcacgtgtcttaagacttctcttattatacactctcatctcttccctgctttctactcttcctttttttttttttttttttttttgagacagggcctctctctgtcactcaggctggagtacggtgatgcgacctcggctcactgggctcactgcagcctctgcctccagggctcaagttatcctcccacctcagcctttcgagtagctagggctacaggcacatgccacactacgcctggctaatttttgtatttttgtattttattttttttgtcatgacgggggttcttgctacattgctcaggctggtcttaaacctcggctaggattaccggcgtgagccactgtgccagccatccactcttcctcttttagcttaatctacctgaaacagctgattgttccatgtttggaggcgtattagtgaagacattgttttctcctcccccttttcggggatccatttcttgaggactgggagagcttctcttcatagcagcactcctccggactcccaggccatatacactcaggaaatgttggttatccaatgaatgacgccaggaagaagggtctgctcccaacacggccttagcacagtgcctggaagttataacagattctggcacacagcaggagctcaggaaacatttatgtaatgaatgaatgaatgaatgaatgagtgcacacagtaactaggagtaagggctcaataaacatttctgtattaaacgcacagtgtctggaacacagtaagcgctccgtctatggcagccgtgaatatccctgggcgaagcctgtgaaaccttgtccaagagcttggcttcactgtgcgcgggttcgaatctggactcctcttcccaagtgtgcgacctcgggcaagtgatttaatccctttgtgctttagttttctcctctgcaaaaggcggacggcggcgcgagcctctgaggacacattccccagggcactcggacccgctgcctggcccacatcgcggccgccgcgccacgccagccggcctgggctgcgagggcacaggccgggggtcccgcgccctcctccgcggccaccacgggcgcgcccgggacccacggtcccgccccgccacgatcagtgcaccgcgagggggcggggcggccacgaggggcagcccacggcagccacgggccggcagtccgccgcccgccggggagcccggccgcccgcacttctttctctccctctctgcctccctccctccctcttcccggccggaggacccggccgcgctcagctcagcagcgcctcccgcgagccgccgccgccgccgccactccggacccctcccccgcccgcccctcgctccccccgcgcggccggcgcccgtcacgtgaccaagcgccagccaatggcgggccgagccgcggtcggcggccgccattgctgtcagagcaagcgagcccggggagggaggagaagcgaggctgactggggaggaggggggggtgggggaggaagaggaaggaggggacgtcgctcggctgccggggtcgcccgctggcttcgtccgcaccccccccttcgcgagttcgcgctccgcggcggcggcggctccgaggcggcggcggcggctccggggctcgcctcccctcgcgcgccggcgggggccgagggggagtcggtggctggagataaacaaggcggcggcagcggcagcagcggcggcggcggcggctgaggagcagggaaggcggaggcggtggccggcccgcagcgccggcccggggcgcgcgccccccccgccagcccgggcccgctgcccccggcgcggcgtcgccgcggcgcctcccgcctgcccgccggccctcgcgccctcccccggcggcggcggcggcccggccgccccgcgctccccggcgaggcgccgccgcccggcccggcctcgcctcggacgcctcgctccgacatgccccgctctggcggccgggctcgcggaggatcatgactgcggcagcgaactgggtggcgaacggggcgagcctggaggattgtcactccaacctcttttcgctggtgagtagccgggctgcggggagggggctgtgccggggaagggggggggtccccgacctccgccgccgaccaactttctcctcccgccgccgggacttcgcccctccctcgcgtctccccgccgttcgcctctcgccgattctcccccttttggatcgtctctctctcgccttggatcccatccagtgtttatttggctctttaaaaatcatttgtgagcgcggcgctcggcgtggaatttgcatgtggaagtctcggagctgcggattctgggtcgcacttcgaacgcccaccctctgttgcaatcgcactccccttctcctcccctttcccccctttttttccccccgtaaatgtggaaggctttgccttgtgctgccgcgcctccgatcggcaacctcttcccccgttgttggatcagctgcctgcccgcccgcctgccttttgaatttttttaaattccataatgacacctgcaatttcgccctaaaatagttgattgaatgcgattgtgtcaggaaaggactcttgcacccgaagctcccgcgattgtaaacatcgacagccgcctgcctctcggggcttactatgctggagagccgtaaagccattgcaccgagccgacggaaggtggagaaagc

SEQ ID NO: 6149 - DNA, 6000 bp, Homo sapiens; identical to SEQ ID NO: 670

SEQ ID NO: 6150 - DNA, 6000 bp, Homo sapiens
tgatacaccacataaacaggattaaaaacaaaaaccacatggtcatctcaatagatgcagaaatagcatttgataaaatctagcatccctttatgattaaaactctcagcaaaactggcatacaagggacaaagggacccaaaagcaaattcaataaaaacaaatataaatagctgggacctaattaaactaaagagcttttgcacggcaaaagaacagtcagcagagtaaacagacaacccacagagtgaaagaaaatcttcacaatctatacatgtgacaaaggactaatattcagagtctacaatgaattcaaacaaatcagtaagaaaaaaacaatcccatcaaaatgcagactaatgatatgaatagacaattctcaaaagaagatatacaaatggccaacatatgaaaaaatgctcaacaccactaatgatcacagaaatgaaaatcaaaactacaattcgataccaccttactcctgcaagaatggccataatcaaaatatcaaaaaacagtatatgttggcatggatgcagtgaacagggagtacttctacactactggtgggaatgtaaactagtacaaccactatggaaaacagtgtggagattccttaaagaactaaaagtagaactaccattggatccagtaatcccactactgggtatctacccaggggtaaagaagttattaatcgaaaaagatacttgcacatgcatgttcatagcagcacaattgcaaaacagtgaaaccaaccgaaatgcccatcgatcaacgagtggatgaagaaactgtggtatatttatatacaatggaatactatacagccataaaagaaataaattaacagcatttgcagtgacctggatgagatcggagactattattctaagtgaagtaactcaggaatggaaaacgaaacatcgtatgttctcactgataagtgagagctaagctatgaggacgcaaaggcataagaatgatacaatggactttggggacttggagggaggagtgggaggggggacgagggattaaaagactacacatatggtgcagtgtatactgcttaggtgatatgtgcaccaaagtctcacaaatcaccactaaagaacttactcatgtaaccaaatactaactgtaccccaataacttatggaaaaataaaaataataattttaaaaacgtcattgcccctcccccccaaaaactggaacttttatttgcaattgtattgaaactgtaaatcattttggagatgtatttgttttctaggtctgccataacagatgttggtggcttaaacaatggaaatttattttctcacagttctagaggctagaagtccaagactaaggtctgtaaatttcctttcttctctgaggcctttccccatgacttgcagatggccaccttctcactctgtcctcatctggtcattcctttgtgttgtctgtgtcctcatctcctcttctcaataaagataactgttgcattggattaaggcccacccatatgacctaattttaccttacttatccaaatacagtcacattctgagatagtgaggattaggactttaacataggaatttggaggaggggaacccaattcagtccataacaggagagcactgatattttcccaaaattgaacctgccaacccacaaacacaatatatccattttccatttattttaatattatttaatgcctttaatagagaacgatacattttgctgagaggcattaaataatattgaacatcatgttgggtattcctttatttaacgagatccccttttctcctttttgtactatggtttaagtcctagaaggttgacatttatggaccccattaaagggctcccttgtcttctgggctctggctgggtttgaccaatgggaagcatgggagatctaaaagtagatattcatttccccacttcttccccatggctgtgctgatgataattgggagcagttgtgttcttctactgattattccagctctcgcccagagccttctcctgcaaccgtacctttctcaaataaatcaggttcagataactgctccctttcagtttctcattcagatctatggttagtgccctattttctccttgttgtttacttttgatcctggccacacttctgtaactaatcccttcattacactgctctcaacttctacatttcagcgtgccagttttttttctgctggggagtacactttgtttttttattcctatgtactttataattcttgatgctatttaacatggcatattttaaaattacattttttgttgttgctaatgtatagaaatgtgatttcttcattacacttaaaacaacaacaacaacaacaacaaaacccagtaacctaggcatcgcacccagcctgggtaacatagtgagacttcatctcttctaaaaaaagaaaaaaacaacttcagtaacctttctaaattctctcattaattccaataatttttatttttatttttttcttttgagacatggtcttacctcattgtccaggctgcagtgcagtggcagaaattgggcttattgcagccatgaacttctgggctcaagcgatcctcctgcctcagtgtcccgtgtagctgggatcacagtagtgtaccaccatgcctggctaatttttttatttttttgtagagcctgggtctcactttgttgcccagactggtcttgaactcctgggctggagtgatcctcccatctcagccacccaaagtactgggaactggaattacaggcatgagccaccacaccttgcctcttttctttgtatataacctctaaaacaatttctaatcacagatttacaactttctttggaagatttatgcatttttaagttacctgaacatctagtacgatgctgtattgaagaggcagtagcaatcatctgtctcgtacctaatctaatacagaatgctttctgtatttcaccattaggtgtggggtttcagatattctatgaggttaaaaaagtcccttctatttctagtgtctcagaattcttataagtgaaagaatgctgaattctatcaaaaacttcttacacatcttttgatatgattttctttaatcttttaatattgttaattatatcaattacattaacctgtcttctaatattaaattgaccttgaagcctacccaattggtcataatacacaatactcttagaactcagaatccaaatgagcaggaaataatacattctttagagccaagtatgtaccataacttaccaattatattcttatctacacacaatgagcaataaatgaacatgtatcagtatctgaccagttgtgtcattttgagtgggtcttttatttacctccatcagtaatgcaacaatctatttaatcagtaaacagtcatgctgagtattcactaaatgccattcacttttctggcactagagtacaaatgacaaagccataaccattgccattaaggagttcataaatgtgtgagtggtgcgtatgtgtgagacaaaagggagaggatggcacaaaggaggagtcgaacaagataaaatgaaaaacatatatagtaagtgctttaccgtaagtgaatgaacgagagtactaaggaaaaagaatggagacgtatttcaagttctcacgttgtttgactcgaatcttgtagacggtgtttgctgcaaaaagatgaagaaaacattcacagacatttatgttgattacatatttattgctatgtgcccagacgttttgaccttggggataaagtagcaaagaaaacacaaaaatctctgttgtattgggtttacattctatcaataaagatacaacttgcccagagaaaagccctctcctggttaggaaacagtatcaacaattaacagctctggtggtttcacagagccacagtgggctgcctgctgcagacaatatcagagtttgtttatatttaaatattattttaatatttctatttttgtccatgtattataatgcacatctatgtaatttgcaaatcatcactcatatatacatcatatcaaaaggtgtaaaagtttttgatagaattcagcattcattcgcttataaaatgagtgaaggctcactttacggatgagagtatttcatcaaaaaaattggggatctacgactctagagttctccgaagtccaccaaggaaaaagtaacttgaatttaatcgcatttaaaactatatagtatccactcctaaaacattagcaacataggaaaacttacacagcggaagaaatgactggggattttttttttttttttaatacatggtctcgctctgttgcccaggctggagtgcggtggcgcgagcaccgcttactgcggtgtcgacctctcgggctcgagttatcctcccacctcagccttccaagtaggtgggaccacaggcaccaccactccaagcccgtatatggtttttaaataagacaaattgcaaaaaacgttgccagacagcgttcgctggtttgggccgtcactgggtatggctcgtgtccgtctagatattcagaggccgagcacagtcctcagtagggctgctcggcaggtacacagctgacgctggtccttggacttatgggagtgggaacaactttcaactcggccgcggaccaggaaggcgttctgacccgctagagctcggggacagggaccccatcccggtgcctagagcgtctcccttagtcggcgtgggccagcgccagttacctcacgagcactgaactagcgcctgcgcccttctatacttctcgctctttcttcaagtcacttctacccggcgagcccgccctcccgccaatcgtcatttccggcgggtgctctgcgtcatttacgtcgtcacttcctgccgatgccggtgtggacgctgtgaatcgtggctggcccggttctccgcttctccccatcccctactttcctccctccctccctttccctccctcgtcgactgttgcttgctggtcgcagactccctgacccctccctcacccctccctaacctcggtgccaccggattgcccttcttttcctgttgcccagcccagccctagtgtcagggcgggggcctggagcagcccgaggcactgcagcagaagagagaaaagacaacgacgaccctcagctcgccagtccggtcgctggcttcgccgccgccatggcaatgagacagacgccgctcacctgctctggccacacgcgacccgtggttgatttggccttcagtggcatcacgccttatgggtatttcttaatcagcgcttgcaaaggtgagcaaggccgcaatcctggtcctcgacggctgggactgggctgaaagggatcgggacccgcacgctccagtgccgaagcggtggtgtggtgaggggggagggggcgatattaacatctgagatgagagccaacactggtccggtggagaaaggagtgtgttagggaatccgcagctggagccgagaggacgcttttgtagaaactattacctccaactaagacctctctccttattttatttttattgctatttttgaaggagctggtcagcatttgcctagactctcgggacaacacggtaaatagctttcaaggatttggggaaaggagaaattaggccaggccgtgcaataccttacaaagacgttcgctcttgtctcactggatattcctttgtggtattagcctcatttttcaaatgggaaactgagattcaggctaagatgtctgtccaaaataagactaaaatctagattgttttgacgcagatcagtattcccagccaattacagatgcttttcagagagaatgatctgttcagctcttcagttaatttattactgcacattccttagtgccttcagtgggtggtggtagttaaatagctgaaacaatttttccactttgtcattgaacatcattgtatatttacatttgaatcttagacttt

SEQ ID NO: 6151 - DNA, 6000 bp, Homo sapiens
aattaaacatttctcaggtgagattgctaaactaccatcaagttatctgaattactttacctcttaacattcatgatcaaactcctaaacacaggaagacttgtaagtctcttcaaaagggagaaactcatggtaggaaaagtaaactgtcaatactcagcctaatatcttttttttttttttttgagacggagtctcactctgtcgcccaggctggagtgcaatggcgtggtcttggctcactgctacctccacctcccaggtttaagcaattctgccttggcctcccgactagctgtgattaggttcctgccaccgtgcctggctaatttttgtatctttagtagagacggggcttcaccatgttggccaggctggtctcaaactcctgacctcagtgatgtgctcgcttggcctcccaaagtgctgggattgcaggcatgagccaccgcatccagcctttttgtcttcttgggtaaaaaaatcaggaacagaacttggagaaccctcttgtatgattgtatataataccgagaggactgaggaagacttgggataccataactgctttaagagtgtttaaaaactgtaaaagtaaacatcagttgagttattgatgcttatacacacatacaaacgcataatccctaagggaaaaagtgtaagcaactccacataaaagtagatgtgtgcacaactattccctcattcttgtcctaagttttgtccttccttgcagtttgctcagaattttagtatattgctattcctgtccctaagaaatactgcttctctccccgctgcttccccggtgtacataccatactgcaacaacccagcttaagaaaattgatttttgataagttaaagcagtatttcctagatgagagtactcagagcaactttcaaaatcagctaggaagcacatttgaaataaggacttagtgtgattcaccccaaacctactaaatcagtctctgggggtgggtctaaaattgtgcacattctcatgtacattgaattttgggaaccactgagctaacagaaaaagaaactaatacctgctcattggtttttgtgagaatatatatatataaagtaactgatgcacagtaggtaaaatacagaagtcagtgcttacaacagtgcctggcacacagcaggtgctcaataaatacatgtgaacaagttaattaaatgactatttttgtgggtggccctgctttccacctaaggccaatctcaaaatgttttcacttttaataaaaacataaatacgactccaaaagcattgagaaaatgaatgcagcttttgctgaagttgttattttccagggaaataatgtaagagggtttgcattacacaatgaagttccctaaataccgctttaagatatctcaaatttcctggctaggtgcagtggctcacgcctgtaatcccagcactttgggaggctaaggcaggcagatcacatgaggtcatgagttcgagaccagcctgaccaacatggtgaaaccccgtctctactgaaaatacaaaaaatttagctgtgtgtggtggcacatgccagtaatcatagctactcaggaggctgaggcatgagaatcgcttgaacccagggaggcagagttgcagtgagccgaaatcacactacactccagcctgggcgatagagcgagactctatgtaaaaaaaaaattaaaattaaaaaaagatagcaaatttcctctccttaaggcagctgcaccacctcctttaccaccctctctgtctcaggaatgctctgtcctccaattacctctctgcttttccttcccttagaccatgctcaagctcatctttcctataccagaagcccaccatagatcctcttctctctctaaacatatgggagagtgttggcctacttgtttctccaaactgcactcatcaatctgcccagcaaatccaagcatcttccccaggattcaccctccacaggatgctgggggcagggtaggaagaaaaggtagttttaaacattaataatttattttccccagtcacttaggaaatcaataatgggtagttgctatttatttatttatttatttgagatggagtcttgctctgtcacccaggctggagtgcagtggcgtgatctcagctcattgcaacctccccctcctgggttcaagcaattctcctgcctcagcctcccgagtagctgggattacaggtgcccgccaccacacccagctaattttttgtatatttagtagagacggggtttcaccgtgtgagctaggacggtctgcacatcctgacctcgtgatccgcctgccgtggcctcccaaagtgctgagattacaggcgtgagccaccatgcccggcctatgtaatgttttttttttatttaccatctttaccattttaagtgtacagttcccaatggtaataaatatatgttcagccttcttttccccttgttgttttccaccccctcttctctccccttcctggcttctgtgttatttattgttatgcatcattggaaatagtatcttcaatttaattacactctgaagcaggtgtggttttttgttgttttgggtttgggttctatcttgttgttttttgttgttgttgttgttgttgttgttgttcttggaccaaatacaatatctaagtggctttagggactcctctctaatctaagttatattgttacaatcccagcagaatgctaaaaggacaggagtttacagcttgtgaggccgtggttcctaattccagatggacaaaggagtatttgttccacctttaaaatatttgttcttgcctgagtacttagcaatgaaagaaaattaatgaacaaattaagtgaaaggcaagcaatgattcctggagagcaaggcagctccagggcttttggcaggggaaccatgctgaccagaaggaactgtgtgcattctattacacaaattctctagcattctattatacaaatcatccaatcacctttctcacatttttttttccaagttgaaaatatgagaaaaccactcactggaaatgagagattaccttcctatccatctggcaagacattatatgtctctctgccttatcctatgggttatatagctactctttaaaaaacaaaaaaatcatgtcttagaaagtaaagctccagagcataaagaaaaaaagagagcaagcaggctttaaacctgagcagtaaggggaatacctattaagcaatgaaagggttgtgccccatggaatgctgtaggtcggctttgtttgtgcattattacccttcctgctttcgtattttagattctggattccccttctcttgctttcaggctttggtggaagtgaatcatcgtttctaagaaacggggactgcaatgattcacaggcaagcttactggacaccacaataggaactcctaagaaggagacctaacttttatggtcttgcttctactatctactagctgagtgatcctggccaaaatactcgacatctctgaacttctgtttctctactaagacaggaattaagaaagaggttgtgaggctcactgagccgataagggggaaaatgcattgtaagcaaggccatgtatagaatagtatttacattttaacccagatcttaaagcccaggtctaattaattctacctgttaccccttggtaaaccacctcaaaatagtgtacacttgtctggaaagccaaggtttgatcacattcgggaaaccctgtatggaattactgtttctagctgccaggagaagttggtgttggtagaatttggggtggagttccaagtcaaagctaggaatgagacgtttcaagactggttttgattagggatgtgtcttggtgtgtgttgaggacagcacagttttcagcacgtctcccttacctctaaagtcctagcccctgcttaagcctgcaacagttttctcctgtcatgcccacttctgcttgggaacacacttccaaaccctctgcccagcctctcacaatggccctaagtactgccctgaggacacataaggtgctggttaagacgttggaattgagtccttgtaggaaagttattacctttaggctggttgcaaagtttgatttggtgtcttctctactgtgactttcctttacttacttctactagattaccaaggaatgggtctagggaccagtgggagggcagcaaaccagtgtattctagacacgtggccataggatgtagggctgtcaagtgatgcccaaaagatcttgtttctggatttacccaaccgttccaggaggcaaaacggcttcctcgggaccctctctctgtcatctacactctcgtctctgcagctaagcccttccttaagcagaaaagagcagggtctctcgtccagcaccctcctccccaaccctagccccgtgccctccgctaacccaccgtgcaattatcttcattcatcctttacctttgccccgagggtctaacaactgcaatcttcggaatgctgggacaaagcttactatgagcatggaagcctgttttcaatagggtggttgctagaaggactcaactggccttttagtgctttgctgctcgcgggagggctcggcggggcggtgtccgcagcgactccgcccttggcccgggtctctttcccgccgggaagccccgcggcgcccagagcggcgggcggctggctccagtccgcatgctcagtagctgctgccggccgggctgcggggcggcgtcccgtgcgcgcctacgggctgcggtggcggccgccgcggcacccggcagggcccgccagtccccgcttccctgctccagagccgccgcctgggccggggcagggcgggcccggggctcctccatgctgccagccgcggggctgcggagccgaccaagtggctcctgcgatggcggcggaagaggaggctgcggcgggaggtgaggttgccggtggcgaggcgacggccccaggtgggcgcgcggcgtctgacgcgctgggggcgtccccgcgacgccaggtctgcccccgctgccccgagggaagcgcccgcgcctgtcctctcgggccggagcatcgcctccgaggggcggtgggacaaggccgccccgtggggcacaggtgcggcgcggcgcccggcgcgtcctcccggggagcgggacgcggggaggggagctggggtcgccgccggcgctcaggacgcggtgtcttggtcccgggccgggcgcattggcgaaagggagccagcgggggaccttgcacccggcgctgggagcatccgcctccacccactgctgggcgcccgcgtcggcgtcggcatggcatgcactgctgcggggacttcctatatttcttctttcttttgtgtaaaccagttgtcagcagcctcggacctagcccggttcctgtgaacccctcccctctgagctgataatactcgcggcttcccggcttgaaccgctgccccgcggtggagcgcgcaggtgggcaggtgcgcgtggacgcggggccacactccgggatcgcagcccgctccgcgacagccctccataagcgacaggcggctcgtgtctttcaccgctgaagcttcaggaaagccgtcagtggagttagcttgttcgattatgtatttctgtggtatttttgtgaatggagttggaagtttgcggtgctttttccttctcgctagtattcactggcagtattctgtagttccttacaacggggcctttgggaccactgctcacaattacggaatgaatacaaaatagctgttgtttaagacaaatgagaggcaggaaaacagaaataactgaaggaagactggcagagaagttcagggaagcagttaattctcccctttccttttggaataagatgatagagttttagattcttctctgaaataaggcaatgagaggaggtggctttcgaaattctaatataattgtgggaatttacatcatggggcgatttcaga

SEQ ID NO: 6152 - DNA, 6000 bp, Homo sapiens
atttaccttcaataaaacttattaaacacgaaccaactgcttcaactttatacatttgtgaataggctaatataaatgcctaggttatcagtaaggctaatttttaaattcagtgtaatttaaaaggttttatcatcttctagtaagtaacagaataaataagaattcctagagttgcttaaattgcttatcagcaattcctctccctaaaggtaaatcatatattctttccaatctctctagccaagtctgttcaattcattttcacaattttaaatttagctaagcttatccaagaaaatggatgatgatttattaaattacctgtatatataacttttccttcttggcattcagaaagaggccttttcccacgtttgtgtgctttttcccgaaatcttactgttaccaccacattcggattaccagcactgcaattcattttagaaaaagatttggtttccacaaggtttccaaactttttgttgacaaaatggtggacagcttttctgtggtctttgtttgtatcaggtttaaaggtaaatttggaattttctttctttgcatccaaatatttaaaaaagtcaaatgcttcctcttcagataccaaatgacaaagttctttatattcaagatttggttttacaacaatttcactgttttttcctacagttactaaaaatggaaatttctgcctaatggcactgtgtaaactagccctctggtttttgtcaaggattctgcctattgagaattcaggaggtagtccaattagctctgttttagaaagccacttctctcttacatcacaggcaaaattattcagtaactcatgagttttttcatccaaaaaggagcttaaaacatcagctttttcttcacatttggaagttccatcaacgatagtatcttccttttctgaaccagactgatgattttggtcaccatcagtgtacttaatcaaagtatgaacttcttggtttcttccatcttctaaggacagattttgaagatctagttttggttttttgggaaaattatttggctcaagttgtatttcactaatcttgaaaataggctcatcgatggtcttattaactaactgtccctgttcatcaatttcaataacaataaagtcacttggtgagctttttatagtgccatgaaatccaacgtgatcattaaagaaacacaaagaactaaacctgattctataatctgtatcttcttccattcttctataacagtgcctagaaaacaaaacaaagaggtggttagttaacagaaagagaagttatggatgaccaaataggaataggtttgcaggatttagttaattctgtctctcttttaattctgagtcttcttaaatggtatcattaacttaatttataactatatgtacttcctgtgtactttgactctcctataccaagctgaattaataggcaaactatttctggtatagctaaagatttgttaacttgtatcttcactcactccagatttgtacctattatccaggattaaaatgagtcaattttatcttaaaaatatcatttgtaggctcacaagaagaggtgagaacacaggactataaaacaaagatttgtccaaattccattcctggagcctaaaatttccagctaattccagagaacatgtggctaagttttcttatattattagtggttagtgacaggagaggtgacaaaaagacaataggaaaactgatgggtaaatgaagttctaaatacaaatttgtgatttgattatatttcaaggtaggattaagtcagtcctgggccttctctaatgcccccattaggacaaatagaagctttcaaggttgagccagaggaaagttctaactatatcattggcatcagacagaagaaacccttacagagcttcctggaaacactatgcaagagaatagtactctgatctctcacttttcacacaaacccatggctaccataccatatggagctgcaggaaagataaattgcccaggggccccatactagtgagttctgtgtttcccccacattctccaagtaacttatcatcatctggaccatcatctcatacctataatgtattctactaatctgaaccaatttagcaaatcacaccttctcaatcctttccatcatgccatatagaaatcactacaaattctccatatcctaatttcctaaggaatatataagatatacttactttccttaattacttaatttcctgtacagttccctcactttcttgccctaattgaaatctggctatttcttcaggctgcttcttcttcagtcctctcaagtaaaggctattttttctttcccacccatctaccttaggacctggaggctgtaaatattggtctatgtttgtcactgttcgttgcaagccatttcttcctctactacctccaaaaaccccaattcttttgaagagcctgccattgggctttaccatctgctgtcatcctctctcggatccccagacaactctgcttcattcactgatctctggctcactaccttcttatccaacatgatttttatgatcatctatatggatcatccattcaatgtcttggaccctcaagtcctcaatctcaacctcaacctcacacctctacttcatcttggtcatccactgtcacggtcataactttgactttctcatctccaaaaactgcattaaccttaagcatctgattcttatgactcccaatgtcctttatcacaccaactttaatacttccattccaaaaacttttagatattgtgaaggtccctaactcctgcttctataactagcccacaaaccagccagaatggtcttaaaaggtaaattaaatcatatcacaatccagtttaaaaccctctagtcacatttgcaataaaatccaaattactcaccctggcttccaaggacatctaagattagggaccctgcttattctccaaactcatttgtacctttaccccattacccactatactccagctactctggccttcttcaatagttttgtgctaactgttcctgttgtttaaattgttccctccccaatcatatagctgcatcttttaggattcatttcctcagagaagtttttcctgaccaataatctacaggaacctgcaagtgattctctttttttttgagacgaagtctcactctgtcgtccaggctggagtgcagtggcatgatctcggctcactgcaacctccgcctcccgagttcgagcgattctcctacttcagcctcccgagtagctgggaccacaggggcgcgccaccacgcccggctaattcttgtatttttttagtagagatggggtttcaccatattggccagggtggtcttgaactcctgacctcgtgatccacccgcctcggcctcccaaagtgctggggttacaggcgtgagccaccgtgcccagcaagtgattctctttcacaaaaccctatttaattttctgcatagcagttctaggtaaagtttttctttattatttattgtatatctcctccaaagagaatgttagttccacgtgaggagtaaccttgtctgccttatttactactgatgatcacacattttgaacagtgtcaagcacatggtaggtctgcaataaatactattgttaaataaatgaaataactagtacaaaataagagctgtaggaatgaagtggaagataattagaagaggcataatgcaagaagtggccatctaagtcctccatagttcaagagatagaaatgaggcagagacctcacaagtaatgtacaaacaaaacatgcaatgtgtgcaagaaaaacaagcagtccagatacagagcagtggggatgggaatgcagggagactacagtgctggaaaatgtagctgagttagtaccagattatggaagatgttgaatgccctgacaaggacttagaatctattgggtggtcaatggatggctactgttagtgtttgagtagaaaagtgacacaattccaaaacatgcttttggaattgtaagatgattctgatggaaatgagcaagatgtatccgatggagtaacagttagaggagttcaaaaacaaaacagcatggtcaagaacatagctgtagggattggccctgaaagaataatgatcttttctttctcccagaaaaaaggaggaagacagacattctaagcaagtgaaacaggtagggaaacttggggagaatgtaattccagcatcctggtagaagagtggaactgacctggaggacagcaaaggagcccacgtggcgttaagcctgaaggtgcagtattcccattcaacagagactgctgctgacagtgggcgggggagtagtttgcttggcccgtggttgaggaattcgttggcggaggagggatcctgagaaggtactagaaatactgaacccagtcctgcagaagctacttaacttcacagaaaactagggcgtcgttgccctccagcacgtccaaaggtgtccccgacaaggccagcagctctacctgtttcttctccctcctcttactctgcctgtccaaaggcacgacactagtccacgtcacctttctttgggcgcaaagggtatggatcctcaatgccaacctcgtcaccccccccccccacacacacacacacacacacacatacaagcccaccatcgcgcaagaaactcgaccccgtctacctcggttcagtggaaggcattcatttgcacaacgctgtgcgcatgcccggaagccttaagtgtttcagcctccgacaggggcgtaattaaaggggcaggcgcccacgtaaagacgcgccctacgcaatacgtggagtttctcactttgtggagccgcctggaggcgccaagatgaagcccatcggggaagtggggcggggccaacccggcaggccccgccccttcgcggcgcttcctagttcggctggttcttctgtcgccggcttcagcagcccgcgcccgggcaggtaaggcattccccgccttaatgcctcggtcaaacgtcgtccgaggtccgcttccaggcctcggcacctctgccccagggttgctggggtcggctgcggaacggaaatctctttatcatccgtgagaaaagttagagaggaagtgggttcctttgacagagcttactccagaagaaagacttgggtaggtccccggtaatcaagaagttcgtcggccctgaggaagagcctgaggcttggagggacgtcacccagctgttctggggcgcagtcggacctcaagtttctcacctctcaggccctggattccgtgaacccgactgcgaaatgaagtctcttttccccagaaccaggaagtcaggccagcacctgacagatgcctgtggcgccagcagctcgctgagcctccacacgattgtaattcgcttgtttctccggcctccaagcttccagggaattagaaagtggaggcggcttatgggatcagatgagtacattcgcagatgggggaaaaaagtgtacctgtcagcttggaagccagagggagacaaagggataaaagcaaaccctgtccaggtgcggtggctcatgcttgtaatcccagcactttgggaggcccaggcgggcggatcgcttgaggtcaggagttcgagaccagcctggccaacatggtgaaacccctgtctctactaagatacaaaatttagctggcatagtggcgggcgcccgtaatgccagctactccgggggctgaggcaggagaatcgcttgaacccaggaggcagaggttgcagtgagccgagatcgtgccactacactccagcctgggcaacagagggagactccgtctcaaaagaaaaaaaaaaaaaaaaaagcaaaccctgagaaagcgagaaagcactttgagcatttagaatgggaacaaacggcgctattagtgcttcaaaaacgtaactgcccaaggcccctggtaagcagaggatactaaaatctgc

SEQ ID NO: 6153 - DNA, 6000 bp, Homo sapiens
attgcactccagcctgggcaacaagagtgaaactctgtctcaaaaacaaaaacaaaaacacaaaaaacaaaaaaaactgtttggcaaacatgctcaaaaatattggcaattaatacataaaagcattgtcatatgcaagcatacatgctttatgttaaaattgaaactaccattacaaaattataaccaagacagtgaaagagatctgatctgaccaactgcattttgcttctaaactccaagctgtccttgttcattcctgggcataggctgaactaactttggaaggatcttagtttagagtttatagttaaaacaaagacaataacagcctcttcccaaaacacccttcttacctggggactagactacctttgtaggactaacaaattagccataagattagaaattattgtttagaaatcatgcagctggaggctacaagattctgatcctccccgaattgttcctggggataacaccactattgtaaaacctacgatcagtgcttgagatattttgcaaaccctgtacttgatagatcagctggcaccactcagatcaaaaaactgggtcatctgatcttgtggccgccacccaggaactgactcagtgcgcaggaggacagcttcaactctctctgatttcatctctgatccaaccaatcagcactctcaattcactgaccttccctcatccatcaaatcagccttaaacactctgatccctgaatgctcagggagactgatttgaataataataaaactcagtctcccatacagggagctctatgtgaattactctttctctattgagattcccctatcttgataaattgggtctgtctaggcagcagggaacctattgggcagttacaaaaggagccttttgggcagttacaaaatgatagtgttatttgtcaacatgttgatgactaacattttcatctgagatgagaaactgcccatcccttcatggacggaggaggcagaatatggaatggtcaaatgtaatacctctcttaggtcctcttcagttggattctaccaagtgcttctttatttgttctttttgttgttgttgttgttgtggttgttgagatgaagtctcactctgttgcccaagctggagtgcagtggtgcgatctcagctcactgcaactccacctcccggttcaagcaattctcctgcctcagcctcccgagtagctgggactacaggcatgtgccaccacgtcctgctaatttttgtatttttagtagaggcagggtttcactatgttggccaagctggtcttgaactcctgacctcctgaaccacccatctcggcctcccaaggtgctgggattacaggcatgcatcaccacacccggctttttttttttgagatggagtctcactgtgttgcccaagctggagtgcagtggcgcaatctcggctcactgcaacctcccaggttcatgcaattctcctgcctcagcttcccaagtaactgggactacaggcatgtgccaccatgcccggctaattttttttttgtatttttagtagagacgtgattttactgtgttggccaggctggtctcgatctcttgaccttgtgatccatctgcctcagcctcccaaagtgccgggattacaggcatgagccaccgcgcctagcctctttatttgttctgaaataatatgagtttacaaagttgaaagagatttctacaattctaggtatttcaactaccataaacgaaagagctaatgttagtagataaactgtagataaactgaagataggctttgtataacattcaacataagaagtagccataaaatgaatttacaaacaaaacagcaagtaaagacatctataatacgatagattgaattgccatattctttaggatgaggcctggaatatgctgaacatacagattgcagaggcactcagcccaagattagtattgggccttcatactccacagttgatcatcacagctaatataagaattcatgcaatgattcagttattgagttgaaactagcaggctggcactgtgctagactcgaaagatatactgaaataggtagggcagaaatcctagcctgagattttttttcttagaaataacattcatagcaacttgtgaaaaaagccatgcctgtgtctccagcagcagtgaaacaagatggtggatcccctcaccattaacccccatatggaaagggtatatgtaattcagaagggatgtgtattatgtctgttctcacactgctataaaggaatgcctgggactgggtaatttataaaggaaagagatttaattgactcacagtacctcagggctgaggaggcctcaggaaacttacaatcatggcagaaggggaagcaaacacatcattcttcacatggtggcaggggagagaagaatgagtgcccagcaaagggggaagccccttataaaaccatcagatctcatgaaaactcactattacgagaacagggtgggggaaaccaaccccatgattcaattatctccacctgatcccgcccatgacatgaggggattatgggaattacaattcaagatgagatttgggtggagacacagccaaaccacgtcaggatgtgtagacaactgaagtacaataacatcaaggctgttttgacgtaagggcagaatttacagtatgtgctctcacacaacttgaaatcttaaaggccttccgggaacagggttaatcagaaaccaacatggcagattagtaccaaagatggagttactttagcttccagattccacccatcaatccagctcttacagtttcactcgccctcctatttggagatggtccctgagcttttagggagggtggtttcatatgatatagctttagcagcagcgccctagcagtggaaaacagattgggcccagagagattccaaatgagggagattcacaggctttgttgaattatctctagtcttgagaataccatgactttggttttctcagaagtaaaacaagagatacttcttgtttataattaatttgaataattaataatttgaatagtagaaacataatgcatgcaaggattacaatcaaaagaaaatttgtatgccagaacaacaaagaacctatttcgttgggaagccaactgagagcagcgtgaagaaaattaaggcctgacacagggactcacactcgtaattccaacactttgggaagctgaggtgggaggttcatttgagcctgggagttagagatcagcctgggcaacagagcaagtccccatctctacaaaaacaaacaaaaatagccaggtatgatggtatgcacccgtagtcccagctccttgggcggctgaggcaggaggattgcttgagcccaggaggtcaaggctgcagtgagctatgaccactctactccagactgggtaacagagcgagaccctttctctaaaaacaagaaaaaattaaaacccagttctcctttagcgacatcttgtagccactagcctgacattttaaacacataaattagaaacatgatgcaagagtgattcaaggtattttatataggaaatgcctggtgtagtgtcttggacagctaaataaaggtagctgttaaaacattagttttattctatgctcttaccattcctccctctccaagttttgtttgtagtctgtggcagcaacctagtctgtatttagtacacattgaataatcaacaatgaaatgtaaatattgagcacattgtgtgtcaaacacatgtattaactcaaacctcacagaaaccctttgaggtcggtactattaacaatccccattttacatacgagtaaactgaagcatggatagactaaagtaaagtgcctgaggtcaactagtgaggaggcggagtggcagtcaagtcgaggcagcctaagcctacactgcctctatgttgcattaataaattaataaatctgtgaccaaataaatgaagtgacatttagtagcatcgaaagatcccgtgagtaggacttcctaagaatgctctccttcttttcatggacaaaattttagtctgtttaaaataaattttggaccggacaccgtggctcacgcctgtaatcccagtactttgggaggccgaggcaggtgatcacttgaggtcaggagttcgagatcagcctgtccaacatggtgcaaccctgtctctacgaaaaatacaaaaattagctgggtatggtggcgcgcgcctgtcatcccagctactcaggaggctgatgcaggagaactgcttgaaccccggaggcggaggttgcagtgagccaagatctcgccattgcaccccatcctgggcgacagagcgagactccgtctcaaagaataaataaataaattaattaattaattttgaaaacctgtcagcactcatcagagctttacactgctgtactcgggacacttggggccgtagacaagcaattaaattgactcacacgtggttagaaccacgtcatcctgattcgtgaatccgtactctcaactactagaagccctttgtggaatgctcggggcgaacctgacgcttgagctctgacaccacgcagacacagccggggatttaggagctgggtagggactcctgggccggatgcctcatcccggcatgcacctcaagccccggtgaccacgccttccggcgagcgccagggagcgcgtgtgcgcctcgccgcccggaagcgccggccgctccctgcatgctgggagttgtaggcctccggcgtcagcccgcgggctgccgcccgcactctccaagagactgctggcgccggcgcccgcccgcgcggcaccgacgcggggagcgcgcttcgcgctgactcagcggcggcggcggctgcggcggcggcggcggcgttagccggccctcgcgctctttcccttcctggggcgccgaccccgcccgcttgcttgcttgcttgcttgcctgcctgcctgcctgcccggcgccacgcaagagaaggtgccaggggacgcagagcgactagaggcgcgcggtcccggccagcaccgtctctggcgttgtagctgcggccgtggcggaggactacggcgacaaggacgagggccgctctcccagctctctgcgtgccgcgccgctccgctccgctggctgaccatctggagtgcaggctgggaggcgggatggagtgatagggaaggtgactcggggctcgggggcagcgggaccgggaccaggtttggtccgcgtgaggcttcgaggaagttggccggggcggaccggcccgggggagtcccgacgccagggagggtgcaggcttgggaccctctatggcggtgcaccccctggctgggcggaccgggtgggggtgggtacgagccggggccgccgccgaggagcgcgtcccgagtgcgtggccggcggttgcttggtgtttcatcacccgaattgccacgaggcttcctttaggggagggatcgggggagggatgggagcaaggctagcagaggagggtcggcatcgcctgtggttccgaagcccgttagtcatcgttgtagcgttatcaactgtggagacctcaaacttgattcttcccccacccctggacaaaaaggaaaagtgttatttctgtgcagtaattggccagcacggacgctccatttcttctcaaaccttcctcaccatcctgcaggactagagaagcatgaggtttccctgtaaccagaaaaacgagtactttttgaaagtgctaattagttgtggcgggcgggggttgggggagagttacgttttattaaaccgacttgtcagcgtggtgttaaaaggctggaaagattcagtcgtagtatttgaaacagtcttcagtaggtgtagaggaatttttccaaattgtttgattcttaatggctatccaggaaaagttaaggcttaatattttaagtatgttgcttgccttcccccaagaacctttgcaagatgcataattgt

SEQ ID NO: 6154 - DNA, 6000 bp, Homo sapiens
tgttgcccaggctggtcttgagcttctgggctcaagcagtttgcctgcctcagtctcccaaagtgcttgtattacaggcctgagccactgtacccagctggtggagttgctgttaacctagacagggaggaatgcaggaagagtaggtttaagaggcatgatcaagaattcaattttggacatgactctagaatttaagagagaggtctggactaaaaacataaatttggtagtctgtggtatatagatgtatatagatggtacctaaagccttgaaactgattaagatcagcaaggcagtgggtgcagatagagaagaaccatggattgagtcctggggtgctccaacatttagagttcagggagaagaggaggaacagcaaaggaagctgtggggtgatcaatgaggtaagtgaaaaatataagagaatgtggtgtcctagaagtcaaatgaagaaagtttccaaggagggggtgatcaactgtatcaaaactaccaataggtcaagtaagtgaggactggaaattaattattttacgtagcaatgatgtggacatgtgtgaccctgaagagaatagttttagtggagtaaagtgggaggggtgcttctaattagagttggtttaagagaagatgggaggagaacattggacacagtgagaatattcagctcgacactgcaaaggggagcaaagaattggggccaaagacagaagggggaagtggcatcaaaaattttggtttgcatggaatactatgcagccataaaaaatgatgagttcatgtcctttgtagggacatggatgaaactggaaaccattattctcagcaaactatcgcaaggacaaaaaaccaaacaccacgtgttctcactcataggtgggaattgaacaatgagaacacatggacacaggaaggggaacatcacacaccagggcctgttgtggggtggggggagtggggagagatagcattaggagatatacctaatgctaaatgatgagttaatgggtgcagcacaccaacatggcacatgtatatgtatgtaacaaacctgcacgttgtgcacatgtaccctaaaacttaaagtataataataataaaatttaaaaaaattttggtttaagttgaaagaaacaacatcatatttgtatgctgatggaattgaggtggtaaagagtgaaaaactgatcatgtaacagggaccagggaaagcatgtgcccttgatgcctttgaaatggtaatagggataggatccagtgcacaaacgaagtataatgatttacataggaccctagataattcatccatggaaaacacgaagaaagagtatgttggcaaagatgctagtagatagttcgatgtagtagtgagattccgtggaagttttttcctgatgcatcagtattctcaataaatattctcaagataattggtggaggacaggatgatgggagttgagaaaaaagaaagtatagcatagctttcaaggagaccagaagaatgcatgggctaaaggtgcatagtatgcttgtccagtggcataaaggacccacttgagagtcttggccttgattttaaattgagttcaattaacaggattttggttttccaccccgttccccagctacactcaggtgcatgggtgtggagccaacttagaaaattggatttaatcagaattgcaaacttgccaagagagctcaacaaagtgagagaggagcaagggaatgtagagcatatgcaaaggagtgaataaaataattgaccacagacttaatggataagcagaaaagtcaggatgtcaagagggtggagccagaaaagaggcagcaagattttggattggatatctggtgaagggacaggattgttggggtcagagtactagagggaatgtgctagaaagacaggaggtatgatcagagagtggattcatgaaagaaattatagatgggatgcagctattgataatgacaaattctaggggacgctcatgggagtaagtgtctgaaatggagcattgggtggagtacaatgtcaccagagaagaggagtcaaggaaatgagaggccagggcattggaaagatcaccatctattctacatatatatatatatatatgtgtgtgtgtgtgtgtgtgtgtgtgtatgttttaattttgtttcatcaacttttattttaagttctagggtacatgtgcaggatgtgcagtttgttacataggtaaatatgtgccattgtggtttgctgcacagatgatcccaccacctaggtattaagcccagcatctattagctattgcttctgattcactgcctccccctaccccctcccctgacaggccccagtatgcattgttccccaccaagtgtccatgtgttctcatggttcagctcccacttataagtgagaacatgcagtatttgattttctgttcctgtgttagtttgctgaggataatggcctccagctctatccctatccctgcaaaggacatgatctcattcctttttatggctgcatagtattccatggtgtatacataccacgttttctttatccagtctatcattgatgggcatttggcttgattccatgtctttgctattgtgaatagttattctacatatattttaaatcactgagaactaagataggattagtactggagagagcaacaatgagccaggagctagagagtctaaaaacgaggagaaggaattggagtcggggagatcagcagttgatagcaaccatgatgatacaacctgatgatataaaaatcaaaactcaagacagttttaggaataggaaggcaacatggtctgagaacgactgccaacactgaaaatacaggaaatttcacatactctagctttcacttaggatccttgcttcttggtaaattacaagatctggtaaagcaggcctttctgattgcttccctcatctgcagtgatttcctgtttcctctgagtgagtttgcctccctgtagtagcaattcaaaagctaccaaataattaatggccttttgcctctgttgctcagcatgttcaggtagtccctttaagagatgtatagagggccgggtgtggtggctcatgcctgtaatcccagaaccttgggaggcctagggaggtggatcacttgagcccaggagtttgagaccagattgagcaacatgggaaaaccccgtctctacaaaaactacaaaggttagccaggcatggtggcatgcacctgtagtcccagctgtactggaggctgaggtgggaggatggcttgagcccagggggtggaagttgcagtgagccgagatcgcaccattgcaccccaacctgggcaatcagagcgactaaaaaaaacaaataagaaagaaaggagggaaggaaggaagaaaggagggaaggaaggaaggaaggaaggaaggtaggtaggtgtacagtgtgtacagattgacaataaaaccttgaacaacgggatatcgaaattcttgcccacacagtatgggctttgccagttttcagatacatttttatgaagtattttcgctggcaaaaccattcaggtaggggcatgaaatgatagtgtttcatcactcgtgatctctaggggcagctattccaaagactacaatctgagaggtttcaaaacacctctggtgttttcacttgatggccactgcccactcttccagtcactaaggctgagatttttctcaccactttcaaaacaactttttgtcactggtaacatgcctcatgtgacctagaagattttgaaacaacaattttacttaaactccgtgaagatttcaaaacaacaattttacttaaactccatgttgaaggcaaaaaggaagattgtgtgaagcactttgaggaaggaaaaaatgatggaacgatatttcatcaaggaagcccatgaggaagaaaatttattaaaaccaagtaggtgtatggaggagaggccgcctcgtgaagaaaacgaacataattttacgctgatttggtgtcttttctgtttttctcttgttggtatctacattcatcttttccaataataatcccatatatgtacatttttatctgtttaaattcagtaaaagttgggaggaaaatgtgtcaaaacttttagagtgtgatgggctgagtggggttgtgagtgattatcttcttttttcagtttttttctgggttttccaagtgttcctcgatgaacatggatagtttttctgacaggataaaaaagaagtagtccgggacagtggctaacaccccgaatcccagcactttgggaagccggaggtgggaggatcgcttgaggccaggagtttgaaaccagcctgggcagcataacgacactccctctctacgaaaaacgaaaaaaaataattagccggacgtggtggcgtgcgactgtggtcccagctactcgggaggctgaggtgggaggatcgcttgagcccaataggtggaggctccgtgagctgagatagcgccactgcgctcctgcctgggcgacagagtgagaacctgactcaaaacaaagaaaaaaggaagaaaagaaaggaagggaagaaggaaggaagggagaagctttcaaaaataaacttttgtaagaagtaatgacaccgctagccgtccacaccaggagaccgcctagccgtggggcacggtgggctcctgggagctctgagctctgggctttctccagttcgcactctgcttgtctcggcagctccgtccccaccgcagaggtgtgaaggggcgcaaagccagcgaagggagaacccgggtcgggtaacccccaggcctggccaggcggacgcaggggcatctcgggcgaggcgcgccttgcgtcacgtgggcaccgcccctgcagtgaccggagaacggcgtgttcctagggctctgctgccgtcgtggaagcaggatttccgcggttgtgtaacggcctgtcgcaggcgtgcagggacctggactccgcctcgtccccggggctcgggcagccgagccatggcggggaactgtggggcccgcggcgcgctgtcggcgcacacgctgctgttcgacctgccgcccgcgctgctcggagagctctgcgctgttctggacagctgcgacggcgcgctgggctggcgcggcctgggtgagtcggcggggaccggccgggggcggcgggggagcccagcgcgccgcggggcccgctcggcgtcgccctgcatggctggggtccctcgcggggctggcgcggcctccgggaagttcccgccagggagccggccccctcctttcctgggttggatgcagagactccctgggacccagatgccttccctcccttctctttcaaagaattttgggtatcgctgcaaagtcaagggagccgaggcctgggaaagacagataaccagcgtgaaagcatcttctgttcgtccgcgatgccaccctcactgggttcgcaatgtatgatgtcttctggtccttgcaaaatcaccccagaacatcattttagtattgagacatttttagaactttgagatacttatcctttggtgttttcaatgcatccctaagcccctaacttaattacaagtgaaatgctaaagtaaactacggtttgcaatgaacgcggctcctaattttcttaattaaatcttatttacccaatttcgttgaatgaaggtttatgctaaagggtggctttttattttaatctaaaaaaattggcttcagaactgtattttatgcagacattggaaagttgagcaactgcctgctggaagtgttgagtgtagccagagataattcggacaaaaatcttcgttttgttaagtacaggcatttttggttagatttgatattccacaatgtcatgtttaatgtttattgaaaagaatcatgattatgtcaaaataacttagctttaatggtctgaaataggatttttcttaccaggactagcagaaggcctaagaggagagttttcttt

SEQ ID NO: 6155 - DNA, 6000 bp, Homo sapiens
tttgtgtggtgtttcccttaatgcattcctaaacattgccaatttaaggcaaaactaccattttgttcatttatattccctgttacataattttgcggttcatttttctcaaatcaatattttcctaacttagactactaatgccatctatacacttaatttaagtatggtctcactcttctaaataacttctggaaagaacgtataatattggtcctgctatttatatttattcatgccaagaagtgtccatttcatttcttttttctttctttctttctttttttttgagatggagtctcgtgctgtcacccaggctggagtgcaatggcacgatctcggctgactgcaacctctgcctccggggcttaagcaattctgctgcctcagcctcccaagtagctgggattacaggcacgtgccaccgcgcccagctaatttttgtatttttagtagagatggggtttcaccatgttgcccaggctggtcttgaactcctgacctcagatgatccacttgcctcggcctcccaaagtgctaggattacaggtgtgaaccactgtgcctggctccctttttttgttttttctacctttaatcctagctctacagccaaacaatagcttcaacccatactgactcattgaatgttttaacaaattcccatcatttacatgccaggcatgtttgtccttttgcatgactataattgtagttagatatgattctcccaaagataagtcatattgcatctcctgtccctctccaggtaaattgttaaagcatttgattgatcattgtatccatacaaatttaactaacttagcatgtatgtaattgaaatttgataatatgtagtttagagtatttctttagaaacttcttttgggtttcttactctcactgaaaaaggtattaaagttaggagaaggattggtttagagaagacaaagcagatagtggatcttataagaagaaggaatgaaggaccgatgaggaattggggttgaacagtacaggaactgaaagtgaaattttgcttatacttccaagatgaatggattgtgacattgttgatcgattctgcttggttgtcctaacaatttatgtaagtgacctcacatcattttggatctgatgatcttagcttacagattatgttacagcctattttgtctgcctctatatttgtagttacaaagtatgggaatgtagggcaaggttaccagtaaagatgtgtgtgtgtgcaatttccagcttcaagagctttggaaaaaagtgcagtaaccaaatctgtcacattcgaaatatataatatttcctgtgactacttctggtaaactgccctatcatagaaaactgaaggaatcagcaaatacccatgagctttgcttagaattgttccactatcattgatatcctgtgtatggatatgaatgactatggatggtttcagtccatgccatttttttaatatttggacaatgatttgtcatatatcagtctgtgccagattagcctttcataagacttcattatcatctttactgatagataattcaggagccaaaggtatatcagaattttgtttaacagcagggtattaactgtacctgttaacttactattaggaaactgtctgtttccaagcagcaacattttttggcatttggcagacctatggaccatttttaagagacagtatcttaaaaatgacagggattggaattgggatactctctcagatttctttcagctctcaagtttagtgatactttgaaatgttgggttggaattttatgattatagtgtttattttgattatattcttcgttttgaagggttttcttcttgctacttttaatactgattttctcatcgaggaattatattagtactttctgctgttctctccattggtttcaagacttaatattattatcctcttctcactcccttcagtttctgtgtcctgccgtgtttttttttttccctaatgtccttctgttgcagtttgggttccccagaaagcagattttgagatggaaattagtgttcgggaaagtttattagaaagtgttcttgggggccaggcatggtggctcacgcctgtaatcccagcactttgggaggccgaggccagcagatcacctgaggtcaggatttcgagaccagcctggtcaacatggtgaaaccctgtctctattaaaaacacaaaaaattagctgggcactttgggaggccggcagatcacctgaggtcaagatttcgagaccagcctggtcaacatggtgaaaccccatctctattaaaaacacaaaaaattagccaggcgtagtggcgcacaccagtagtcccagctattcgggaggagaatcacttgaacccagtaggcggaagctgcagtgagccaagattgtgccactgcacactccagcctgggcggcagagtgaaactccatctcaaaaaaaaaaaaaaaagaaaagtaaagaaaaaaaaaaagaaagcgctcttgggatcagcccctgtggacgaagggaaggaaggaaacactgttgggccaagggggatgttgggctgccatgtagtctcaaataaaatctgaccctgtggggtgcttcaaagctgagaggccacctcacccttgtccccagttggagaaaggggaccaaggctttgtcttccacatgtcaaccaatctttggatgtgggcttccctgggaagggagtgtgatactgggtgaagtgaggccatcctgaaagagctgatagttgaaggttgtctgcaggcagcaccacagcagttggggaatcagtccttcagtcctgaaaggagatgtgggtggcatgtcacagtttccattcaatcttttttgcaggggtgctggagatgggaaggaatggcccaggggatgggtcagaattttcaggaataaggagttgcagcatacagtggtcaggagcttgagagatggtagagaacaaaagtggatgtagaataggttctgccaggcaattgacttctgacattgactattgcttttctaaatacattttaaaaattctatttatagtgatgcttttcacttttaaagttatagaaacctgatgaaaactctgagtgcactatacagagaatgtatttttgttttttacccatttcccatttgccccaagaatactgcactggcaacaagcagcacttttttattctaagtgagaaatgggttaaagagatgggtcctgctcagtcacacaggctggaatacagtggcgtgatcatagctcactcctgggctcaaactcctgggctcaagcagttctcctgtctcagcctcatgagcatctaggactgctggtgtgtaccaccatgcttggctgattgctgaattttttgtggagatggggtcttggtatgttgcccaggctgctcttgacttcctggactcaagggatcctcccacccgtggcctatcaaagagctgggattacaggtgtgagccactgtacccagcctgtgccatatctttattcaaatataatttggttttataaaacatacagattttttagttttatgttctttataggctcttttttctctctccatttctttaataatttaaatatacttttttggtgtcttcatattaaaaatcagttgagcactcaattttctgtttggcatatttgttaataatcacagtaaatcattttctccatattttgtaatctctaaatttataagctcatcttcattggggattgttttttgttttgttttgttttggtttggtttttctacccaaagaaatcccgtggggccttgtttacctctcatcactttaaaatagttttgtgtttgtttcttctagatactttacagatttcactggcccaggatctaattccttagattggagattcttaatttttttacctaggagattctcatacaaataagattcacatttcaaaactgttgtgtcataggtttaggattttaatttcttatagcatttatagcatttcccctgtcctcttcacccagattctcagagacaagctctcttaagtcttaatatgactatgagtgaatttctcctccccgacaccattttttaactatgaggatagacctttgaagacagccctggttttctggaagaatctcagtaccaactttatacctcgtgtgcccagggcctccccttctgtccctgcataagtatcaggactgctttagagttgtgaaggtttaatggggctggaaatccagcagagtgctttctctcttgagggagcactttcttctgttctttctccttcaagaggcatcttgttaccaatttcaatctatacttaagtgctgaagagactccagtgattatccccatagctccagtgttggccacagctgacagtgtatgcttttgtgcttactattttggccatcagttctggctttggtttagcatcagggaattatctttattgcaagtaaagctatgtatttaattttgttacacttattttcttcttttcttagtgtctgtagtgggaagtcttcatgagctcagttggccatatttctgtacctggaattcccgtaagttacttattaactaccgtttctcagattctacctctctaaaatgggagtaataatggtgtctgtgtatatagcgttaatttagaccacacagtaagctttcagtcaatgctagccagtattattttcaccatttaaaacttaaaaaaaaaatcatcttaggcaagagttggaagtgtagtggtagctgtgtttacttacttaacaagaggaggaaatcttagttaacgccctagagaaaccaaatcagaaattttgtttggtacagtacaatgccgaaactgacgcttagagtcccaccctttctgacgttgtgccaaaggtcacttggcacataagtaaactgagtggaatggcctctcaatattgcctggacgattgcttagaggagtatttcctgaactgtgtgggtaggtaagtttgaatttgttaatattttctttgctaaggagggctctcaaaggcgtaattattataaagggtatttgtagaccttgaaacatgtagcaatacttttagtccaagtaagccctttgattgctttttaacttcccatttagtattccaagtggattctgaacttggtgaaattagtggtaacccagtctcctcagggtcttgcctcctgtcttctggcttacagaggtggagattcaaaggatttctttcctttaggtcatggtatttaagagaataattttcccctcatattatagctaagaagaggtctgttgactattacagattgggaatccatgggcataatatacgaaatgtttaaaaaattactttgaacttaaccttatatgcaaaacattgattatcttataaatattaactgctttggattgtttacacaatgttagttgtactatgaaaatttgcttattaaccaggtttagacttcttaggttgttcttggctttgagtccacagatttaacactgccaaatttctgtgtaaacattttgcttgggacctaaaatacagttgaatatgtgtatttaaagtttttttttttaaagcccatgtatattaatggaacttgtaaatgtttaaatagtcaattaatggaagcttttaagaaacaactctttcaaaatattcaattttataattatgatgttttaaatatcaaacttgagttagtgacaaacatgtaattcataatatataaagatctataagtagttcttattgatttattacatttaatcttactcagaaggaacttttttgttattattctgtcactaataattaagtgcaaggctatttaaaaacaaataagagctaataacattgtaacacagactagatagagagcaaaaataaataactgattaagttactgttttggtcttgggaaatgtggtaggttcttgag

SEQ ID NO: 6156 - DNA, 6000 bp, Homo sapiens
aaggaaccaccctccccacatgaatgtacttctggcagagaaccctacaactcagcctcttgggacttgattttctcaggttctgggagaggcaagtaaaggagatggagtggagagggagaggagagagaatggtagtggggataatgctagagctagtacccagtccccagtgacgtcccccttgcgcccctgtgccatggacacactgagatcaaggtcagggttcaaagtgagattaaggtagggaagtggtcaggccgggctccatcttcgaaggccatgctgaaggagggggctgaaaggagaaatccaagggaggagccagagccagggcaggtagctggggagggtgcggctagcctggaaggacaggcctgggcagggaagtggcaggaggagggaggaggggaaggcttgggggtgggttgctatgcggctttaatgggggtggggcatgcagcacctagtggtagcagagaggaagacataggggagacgaagagatccaggagtctgggaaaccttccagagtgggagagtagcagaaggatgagagagtgtcctctctcatttctccgacctgctgtccctttttggctgggagcatctagtggagagggtttagaggcttaaatctgatgccaaaggcatactcacattgagtttgtgcatctcatcaccctctcccttattctatggatgacacacacacattctctctcacacatagactaagagaggtggcccttgaagaggtctggcacttctccctggggctggctcttggatcttattgctgggtccctggcaccttggggacatccttgttgagaagtgaagtcttgctctacttcctggggctgtctcggggtctgaaggggggtgagacaggcatctcagaactgtctggtggtggaggggaggctcagggagcacgtgctgctgaggcaagcacaggcctgtgctcatggaaagcagaggggtgtgtgtacgtgtgtgtgcgtgcgtgtgtgttcatgcatgtgcatgaaacctcaggtgtctgtgtccctatgtatctctatgtttgtgaatcttagtgtgttctagatttgctttctatagggaacagagtgtgatgaaagagaagggaagccttgccgtcctcccacccctgagcagatagctgtggtcctgatgacctagcccaatttgtcctctgaacctggtgatgctgccctggccatggggccactgtccctggggcaaggagcccagatttcaccacactaagtcaccacacatggagaaactgaggacaggttggcacagagaaagtcttgcttaaaagaaactgaaaaagagagactcacagacaagacaagggacagctacccaggcccaaaggtgcagacacagagaagccaggcactgggagaagcaaggagaacaagcaggcgggtaagggcagtgaggcctcctccaggaaaaaaccccagtcgactgcctcttttcccctcccctccccggtctctcctcctccggcacaggctccagctccaggccgacacaaacggggctttgattgcaacaggaaacctcttgggcggggggggggcggggggagccgggcaagccgccgccgccagggcccaggctgcacccccctctcctggccccctacccggtcccagcccccatcctgcccaacgcgcctcacatccctgctttgggccccactctcattcacacctcgctattcttctgctcttctgctgccccctcctccagagacccccctcccattgcccttcaggtgggactcctacctcaggacttacccttctggcagggcctgctttactttgaaatgcccccttttcagcttttcgagggaaggttttagaaaaaagggagaatttagcgtgaggaattcagagccagttatcctcaagccccatccagaaggtggcaaggagggaaaggcagggtgcatgaggagttagctgtccctgccctgcctcgtcctggccaaactcatccttgccagggtggcagggactctaaggggtgaccccgaaagaatctgagtgctaatggctttgttagttgggaaggggtactctcctctttgcctctagggctatgcctttgtggggctctagctgggaggggggtatgccctggtggtggggatcatagggaagggggtgagtcaggcagcagccccccttcatactcccaccaggatggtggagaacatctggttcccatgaaatgctagaaggctaatgggtctaattgctgcaataagggctggggaaactttggggaaaagagggggcactagatcccccaccctcttaccttctccccaaggctgtactaagtctgtctagaatgggggggtcagggttgatggggagggcgggcctgacaccgtaatgcctggtcctaaggaccccctccatgcaatgcctgggatgcacacacagatggggtgatgagtggggtgcatctggtgaagagaaacgggggctattgaggactcatggcttcctggagccctcccccaactcctcctgtgccctcctcccaacccccctccctgtggcctggccacttctggttctaattaccaaccaggcaggcctgacttaattgggacctttcagatttctgagggggaaggggggtactgacagcttgaagttgactaatcaaggctctttccctcttgttttcggggtactccctattttgcacttaactgtttttgttgttgtttgctgctggtcagattctgattcagaaagttctttctttctctctctctctctctctttctttctcctcctttctctttcttcctttttctttcttctttctttctctttcttttctttctctctctttctttcttttttttgtggggttcgggtgactggattcagaaatgggtatttggggttgggggaggagaagggagtttacactgggttggaaagagcagtgcattccctctccatccctgcttcaagccccctagtcagccttgccaccccgaggtttcctcgccatccacaagtcaggccttttcccagccccggcagccccccgcccctcccccgcgcccgccatccctcgcctactctggcaccccttcctgccctttattcttccaacaggcgccccactcctgcagcaccccagtgcgccccccacccggtacaacagattcttagaaaagcgcgccccgccctggcccagccacagccgcctggcgggggaagggccgggccgggcgccgctcccgctccgcggcgctgcccgtgtgagcggcgctgacagagccggctgggcaggcaggccgggcggcccggcggctgagggcggggcgcgggggagggggggatttccgggagtcgccgctgctggcgctgtccggggccagggtccccccattcggccctgccgggccagggcaaacttctgacgtggccagccccccgcccacctcacccccttctccgccgggcgagggcgctcagtgccggaaggggcaacccagggaacagtgttgcggccttggagagctgaggggcactaaccgaagggagggcagttatgcctaggctagagggtatttaaagaccctgagaacagtcagtgaccagaagcgcccctattgccgagggagcccttggcagtgagaaactggaggaggggagttggccatcaggggcagattcatcgaggcgcagttggcacggcaggcacagcttatggggtagttttgtgctctaaaagtgaagttatgttcgaagaaggagcatcgagagagacggtcgaggcgcttagggggcgtcagttgcgggataaggcttcggggactcggagggaggcggcccgggccgcggcggagggcggactgctcgggctaggaggggtagactctggctgcgctggagggggcggggggactccgcggcagcgctgaagacggcctgggcggggtggggcggggccgggtcaggaggaggtgagcgcgctcggccacccgccccgaggggggttcccagagagttcacggcgggagcgcgctccggccctaggaccgcgggtggggagacgggaaggaaggaggaggcagcgcgcgccgagccgcaggaatgcacttttcggccctgaagcgggcgcgcggagggcgagggcggagccaggcctgggaatgagaggggtggaggtagtgcaggtcccgagcctcaggagagcagctgcgcgcggggacctccacgttcccctctccccagtcatccttaacacccctgtattgactagtgtgaaaaagggagagtttggggagagggaaaactctgaaaggaaatgcttatgcttggttcctcctctccttcttccaaccccgacctgggcacgcgcctcagtgcaaatgcatgcaaagcctatgagctgtggagagtatgcctgcaagcattctcccgagcaaggtgtgtttgcacaaacgtgtgtgcacctatgattttatatgcgtgctcacatgtatgttcactcttgcatatttgcaaattcttggtgcctgataagataaatgcatgcacggatgtgtgtctaagcaagcgcgcgcgccgcggagcgagtgtacgtatgtgtatgtgtgcgctccactctcagctttgctcatctcggtgcccggcccccttcgctctccaagccccaccccccacccctccaggcttcgcttttaaaaaaggtctccccagtgctagctgccgaagcacccagataagagctggacggaggctaaagcggcagccccagcttcgcgccccgcccagtccctttcccctgctggggatcccccctcttccccgcccaccccttacccgcatgcagcccagcgccctatgctagccctccccctccccccctgctggagcggggcgccgccgggggaggagggggaatcggctgcgggtccttggtgtttccagcacccagtttcccttcaagccgggtcgcgatgtacgactgtatggaaacgtttgccccgggtccgcgacggctgtacggggcggccgggcccggggccggcttgctgcgcagagccaccggcggctcctgtttcgccggacttgaatcttttgcctggccgcaacccgccagcctgcaatgtaggtaccggagtccggggctggggtgtagggtgcaggagagggtgggatttactctttccgtgtgtaaagagtggaactgaggtgcaaggaggagcttctggccctttctatgtaaggtactggccctttaaacgtgggggcctcagcgtctcctttgcgtgtgtgcagtagtgtttggagtgtgtgtggtttttatggtgggtgtttagctcgaacctgtggttgatgccactccagagttcctggggatagggagagaccgaggtgtgtgggtagtttgcgccttcacgtccgtggccctggaaggatatgacactcaggaccgtgggtggcgtttgtaaagcccatgtgggaagctggcagtgttaaaaatatcgtttgcagagcgtgtgaatccctggagtgtgcagcgccttgcctaggtggtgtgggtgtgggagcaagggtctctccaccagtgtcgcctgcgacagctgccaggtccacatggcctgtgaggggatgtttgtggcgtgaggccgggagggcgtgtgcccctgcgtggctgcgggggcggttttggaaagtgctgtgttcgagagtgcatcctgtgtgttctcatgccgggtggaaaaggttgtgcacacaagagggagaaggctgagttttgtacgccacccccatataaaaaaagaaatgtttggaaacgtgtatgcggttatatgcagagattactttttcctatggctccaacacacaacaacttcagcaggaagcgaaaagtttaaagcaaagtctgtgtgtgtggtggggggtggcctgaagttgacagcggcagggcgag

SEQ ID NO: 6157 - DNA, 6000 bp, Homo sapiens
cttgactgagtttatggctcctaaggagctttcctaagactcttgactatttttcttcccccttcagtcaagtgtttttacagttaagaattaatttgtaactgcatacatgccctgccagtctgtccctgtgttgggtggctaatttatgtagcgggtcttttttatttcttagcccccatgactaattatctagtcctaacttcatttttatcagtgggaagatgtgtacgggacctcagtgaggagcactgccagaaccacagtaacaaaatggcactgaaataaggaagcagcaggtcagaaccccctagatagttcttgagttggttctcagtctcactaaggaggcagaataattgctgccctgaaacttctctgatagtcaaaggtaacttcacttaccttgttattgctaccagccatgtggtcactctccccaaatctttgtcttccagatccatctggaccagaaccaaacatcatggaaggtgtcacttggcccttcctaaagtccatggcgtttctagaggcctaagggaggacactttcagaaaggagctgagtgtatggtgggtgtcctgaattcgttcatgtgaatacaggactcaggcttcccaccccactccaatgtgagtgctcgatacacaagcactctagctagctgccacgtacccaaggccacagagggaggggacagaaccaggtcttctggtctgctcactttctgccccattcccctaacagaaagtttgcttagagttgaaaagtctaagaaagcctcccacaatactagagaggccaacaaaaaaaaagtcatgccccctttacttactcttttgctgctggttatgcatctcaaatctgacttccttagccttcacctccctccttggccctaagcattagaccatgtactctaagtagtggttaaagagggactgagcaaactgaacctcctctcgctcacttctctatccctgttctgttggttttggctcctttcttgattcactgccctctagcaccacccatcctggtagatggagtgcttaaccccaaccgtgccctatgtacagcctgaaccaccaaacagacaccaaaaaaattcttcctgtggtttctggggctcccctgctccacactgagaggctccttaaaggtgctagcccctgatacagctatccccgccagttttctccttttttcataacttccttcccatccccaaatcattaatttttcattaatattgtacattatatacacaggaaggaaatacattattttttttaaatttcataaccagcctgtttagattccagtcttcctagctatatcacatatgccttgttgatatgctctttctgctttctttagacttaatgtttgacgggggtgggggtgtctggaagaacaggaaaggtggggatcctaaggcagattaaaggactccctccaccccactacagcctcccataactctagtcatccctctcatagtacaggactgatttctctgtgtctgtttgtacacacaaatgtgcatacagacataaattcccccaccccataccaaggtggttacctagcaggaatgagcgtaggtggctgctggccaccattaccaccgtctgcatcagctgtgttgtctctctttggggtaaagtcctaccccagaatgagaaaaggctggggagagtagggcaggttaaaggagcttatgtcctctgtagatgtaggtttgtatcatagctactagggtttatttttttaatggggggctaatagcacagagttatctcaccagcagtagctactggtgagtgatgttttagctgtaagaagtggctatgagcaatagtttcactgactttaccttagggcagtgccacagtaatctgggaacttgttagaaatacacattctcaggccccatcccagacttattgaatcacagactctgggggcagggtttaaaagcactccaagtgattctaatgcacactaaaggttgagaaccatttcttagggataagctgggaaatttttacaggtgtggaggatatttcaaatacatcttttgcctttgcactaacatgctttcatttctttcagtctcttcctccattccctttaaagtcttccccatcatatcactgatctcaaaagctagatttgtcttcattttagtcgtatccctaaaaccatgcattggtctggacaggagttgtcccatattcccttgcagactggtcactccatgttctctgttacagtaaggaccagccaagcttcagctgtcccattcctccccctacaacacacacacctttcaggcagggaggagatgagcttccagccccaagagtggaggctgccacatcctaacatagtatctattgaaaaggaagcagtgtgtatctatgattatatctctgttcatctatatatttttgacatgtagcaacacctctccatcttatcaaggaactcaactcggtctgggtctccccagtgcccagtggtggcctttgacaggtaggaggatgcagtgctgcaggctattttgttttttgttacaaaactgtcttttcccttttcccctccacctgattcagcatgatccctgtgagctggttctcacaatctcctgggactgggctgaggcaggggcttcgctctattctccctaaccatactgtcttcctttcccccttgccacttagcagttatccccccagctatgccttctccctccctcccttgccctggcatatattgtgccttatttatgctgcaaatataacattaaactatcaagtgaaccactgttatgtctgatgcttcactcctctatccacagcccccattgtccccttttctgggaggtcactggcctttcatgtctgtcatcttcatcactcccccatttcttaggacagaaggaacagggatttttgtctctagtttttatacatgggagatacagcctagagaaagtggatgatttctataaattacaaagtatgacagaaggcccagggcagagctcctgtggactgccttggagacaagggcccttggcatcctggcagcaagtactcacaggaaacttagtatgtgctttatgtggatggcgggtgggagagttgctgatggcaaatggccttttacttttcagtgttttgttgccaacccccacccaaccattaaaaagtggctgttgtgaccagggagcacacacacagacaaagacggaaagtatagctttctatggtaaggaggaggctggtctggaaatgaggggtagagtttacttagaagcaggtaagaaaaccgggcatggtggctcatgcctgtaatcccagcactttgggaggctgaggcgggttgatcacctgaggtcaggagtttgagaccagcctggccaacatggagaaaccccgtctctactaaaaatacaaaaattagccaggtgttggtggcgggcgcctgtaatcccagctactcaggaggctgaggcaggagaatcacttgaacctgggaggcagaggttgcagtaagctaagatcgtgccgttgcactccagcctgggcaacaagagtgaaactccatctcaaaaaaagcaggtaagagttcacaagaaaaacaggtaatgctcagagactgtgggaatcaggaagaggtgtagggaaatcacagataatttattgcatctgtatattcctttataaataacatcacaaatgagaacaatgagccaggctgaagaatttgacaaaagagatagcaggtgtctctggagtttcccagtaggagagaaatgacttaagaagctatctgtggctggtgtttggtagacacttgacacaaatagcctgtgcctcctgaggagagcaggaaaggcagtggtggtcttcactgtgttgtggccaggagcacatgggtgtccagagaagggtaagaaaggaaattgctgaaagccaaataccaaagcccagattatgaggttttggaggttcccaccactgaagctgcactctgaaaactgggcagtttacaaaattagaggaatcaacccattccaacttcaaaggagaccagttacctccatcctggacacaggaagccagctaaaccagcctctttctgaatgcagctcagcccagagccacttgtaattgatgtttagagaaatactagaagcagcaggatggtaaacatggaatggctgccctatgctacgtggaatggtagattgctttactgttcacctagtgataacaggagtagtcacttcattttattgatgataaattgaggtttagccaagtcacacagtgaagtgcaagagctaggattacaactgagttctgtctggcccagaaccagctctgcagtgtcccatccaccctcacaccgctgctcctctggacctctgtcacacaggagcagacaaggatcattctgggatgcagcagctactgcccacagaaaagccatctccccgtggccttgatactcccttttaagaagtggtaaactggccgggtgcaatggctcatgcctgtaatcccaaaactttgggagtcccaggcgggcggatcacctgaggtcgggagttcaagaccagcctgaccaacatggagaaaccccatctctactaaaaatacaaaactagccaggcgcggtggtgcatgcctgtaatcccagctactcgggaggttgaggcaggagaatcacttgaacctgggaggcagatgttgtggtgagccgagatcaagccattgcactccagcctgggcaacaagagcaaaactccgtctcaaaaaaaaaaaaaagataaaactacaagataccatgatgatgaatgtcaggttttgtggttgggaccaaccatgagacaaagcttacgaaaaggtttaccctggcttagtccgcattaacagaaatatggtatctggagcatccagatccaaacctgctctaatctacgtgtctaaaggataagttggttcctagatgccttgccttaaagagtggggtgcttccccttgagcaaaaaagactatggagtgggccaggtgcggtggctcacgcctgtaatcccaacactttgggatgccaaggtgggtggattgcttgaggtcaggagttcaagaccagcctggccaacatggtgaaaccccatctctactaaaaatacaaaaattagccgggcatagtggtgtgtgcctgtaatcccagctacttgggaggctgaggcaggagaatcgcctgaacccgggaggcagaggggttgcggtgagccgagatcgcaccactgcactccagcctgggtgacagagccagactccatcgtaaaaaaaaaaaaaaaaaagctggagtgtaagaatgaactctctcttcaaaaatatgaagagcttttacacatgaaagagatgagatgttctgttgagacttaatggagcaaactaagaccccgagtagaagtcacaggaagcccaaagccccctcggcacaaggataaatatgtccgaagactgtctgaggagatggtaagttccccgactggggcacatgaggcaatcacagctaacgttttgaggatacctgttctatgcaagctgttttattgaatggattacaaaaagtatgttaagtaatgcacaccctaggaaggcgttccttgtaaaatgggcccatgtttcaggtgaggaaactgaagctcagagcgggagacagcttgctcaagcagaggccaaggcctttacgtcatggctcttcctcagcacaagctagagacccacactggtggggatgctccaaaagggactcgaggattagaaggaacctgcaccatatggctttgaaggcctctccctgaggattagtgattctgatttttcttaagacaggattctaggctactctatatgagagccagggccaggcagaggctgtggagaccagagtcggggtcagaatgatagtcca

SEQ ID NO: 6158 - DNA, 6000 bp, Homo sapiens; identical to SEQ ID NO: 2761

SEQ ID NO: 6159 - DNA, 6000 bp, Homo sapiens
atatatgtatgtgtgtataattacccatgtagctcttagggcacgtgtgtgtgtgtgtgtgtgtgtatacacacacatatatacaaatatatatgtgtgtgtatatgttatatatgtgtgtctgtgtgtgtatatattatatatatgtgtgtgtgtgtgtattagagacggggtttcactctgtcgtccagactggagtacagtggtaccatcatagctcactgcagcctcgaacttctgggctcaagtgattcccctgccttggcctccccaaattgcaggtgtgagccatcaagcccagccggaataatatattcttgagttgcctgtatgcacacacactatgatagattatgcatatttagtaggaaaaaatatatgtctatatgttataaggaaaaagtctaaagggaaacacaccagcaaattcctattctttctgtctgtggagtgtgattagagctgaattattttccttactacctctttgtattttctttttcccctttttagagacaggtgtcttgctatgttgtccaggctggtctgggctcatgttatcctcctgcctcagtctccccagtagctgagactataggggtgaatcaccacacctggctcttctttgtattttctgattaaaacaaacaaacatattttactttttacttagcaaaggcatttaaacatatttcctttctggaaaaaagtgttcacagcagctctgaattcaggaagagattttgacttgataggggctcaaacaggggcattttgacttgataggttgccgaagaatcttagaaaagaaagcagacaaaaattttggggtcttccaggcccccacccctgtgtctttctgttgagctcaagtattttgtattcaactcaacttgacaagtcctttggcagatacgagattcccagcaaagtgaaggctcagcagctaactcagcttagcgatttttttttttttttgagatggagtctcgctctttcgctcaggctgcagtgcaatgtcgtgatctcagctcactgcagcctctgcctcccgggttcaagcgattctcctgcctcagcctcctgagtagctgggattacaggcatgaaccactatgctcagctaatttttgtatttttagtagagacggggttttgccatgttggccaggttggtctcaaaactcctgacctcaggtgatctgcccgcctcggcctcccaaagtgctgggattacaggcatgagccaccctggccagcttaactattttatgagggccaataaccctagaaaagtgaccgacactgtagcattagaaagcatcaccccagccagtccctagcccttttcggtcctgccaaactccaggtactgatttccaaagcacagccaatgtgagctggaattacccatgcagttcttggggtatgcattagtctcgcagggctgtgtaacaaatcgccacaaaccaggtggctgaaagcaacagaaattttttctgcagccgagaaatttgaaaccgaggcattggcagggccgtgttccctccgaaggctctagaggagcatccttcgtgcctcttccagagcccggtggctgctgcaccttggtgctccttacctgtagctgcatcactccagtctctgcccccatcgtcatgtggccgccttccttctgtgcgcgtctgtgtctctaagccttctccctgtaaggacactggtcattgaatttagggcccactctaatccagtgcaaactcatcttaacttatttccatctgcaaagaccgtatttccaaataaagtcacattcgaaggtactgggagttaggacttcaacatgtctttttcaggggacataattcaacccatatcaggcatgaggacaaaaggggaaggagcatcttggaaattcaagcctcagggcattggccagtcctgcaggaaaggcaggcaccaggaccggaggggctggaacaaatgtccccttctctgcccccttggatggcagaatgaacctggccgggttcccctccccatcctggctgcacatacccactcctttacctgctgtatggtatgactctcaactcctccactaaaccaggccttctcttaactcaggacactttctccatctctaaccccactctttcaactcaagctcttcctcccagtctctgctcagacatcacctcctccaggaagtcttccatgctggccctggggctagctcctctgggctccagacagagtccacagtaccacggatggccttgatctgattatagatccaccccactggaagctccacagtccacccgactggaagctcctaagccatcacccccagtctccccactgcctgcccagcaaccagtgtggctcttgcctggagaaggtgctcaggaaatgttccccgaatgaggctagcataggtgttgattgggcccttttcctgggccagggccaatgggagtctcttctgcagtagggaagcaggtgaaaggggctgaaacagatcacgtttcgggggagggggtgggggggggtcctggaaaatagaagggatttttaatactactcatggggctttacttaggcaggggagccttcctgggtggcacttcttgttcttgttttttttttttttttttttttttttgagatgatgtcttgctctgttgtccaggctggagtgctgtggcatgatctcagctcattgcaacctctgcctactgggttcaaacaattctcctgccccagcctcctaagtagctgggattacaggcacgcgccaccacccccagctaagttttgtatttttagtagagacgaggtttcaccatgttggctgggctggtcttgaactcctaacctcgtgatctgcccgcctcggcctccaaaagtgctgggattacaggtgtgagccactgcgcccagctgcctgggtgggacttctcatagggtggacactggtgcttctctgggtgacggagagaggaggaggccttttgggagaagcctgcacacactttccttaaagaacgttttcctcagggttaggatgctttttcctggagggaacagggaggagtgggttcgtcttagccacaggcccccatcaacagcctgcaggcttccttcccttccctgccatggcctctccactcacctcccctaagagaagaaggtgcagctgcccccctacccctcacccccagcccagggcgcagcttggtgccacctcaagaattcagagaggcaagggtgctggccctttggggtcatccaacctgagttcccaggacagaagcccagccagccctggcctgccctctactccagcccccactcactcacgtgctcagccatgtgctcttcagtcttcattgagcccgtactgtgtgccaggccctgaccggggtgctggggtccttgtccgcttggtgctcacagtctagtgagagagtcaggatggggctccaggaggaagaaaaaaccatcctgctgtaagagtcagtcatttcctgtaggactctgagggcctactgtgcgccacatgggcattcaactctctccctgtctccatcccttagccctactatgtgctatgtcctgggctagatgatggagatgcataaaagctaagaaacttacggctggaattcaaacagctgtggtttcattcattcacgctttcattaattcaggtcccaggtgatttggtgtgccagaggccatgccaggggtttgtgggagcacacacttttaggcagagtctgagaagcatctcgccttccaccaaaaattactgatacattttatatggtaactaccttatatacattctctcaccaacactttacaaagttgcctagtagctaaagagtcagattccagagcctgactgcttgagtttgaatcttggttctgccacttcttggctgagtgtgcttgagcaagtttactcaacctctatgcgcctcagttttcctcatctgtaaaacaggcatactaatagtcccgcccttgtagacctggcacaaagattgaatgaatgaatgtttgtgaagtgtgtggaatggtacccaacacagaaaaagtgttacataagactttgttaaatagatcaaaccatgggagggagtgaaggtcacccctgctttagagataaggaaactgaggcctggagagggaatttgacttgcatcagtttttgcattttatatattcatttttcaaatgagaaatatctcaattttatcacaaaatgacgtatgcacattgtaaaacagtcaaatgctacggaagactatgaagctgaaagtgatgatctgtgcattcctcatctccttttctcttgagattatggttgttcacaaggtgatgcttcatccctccagctttaattaaaattgtccatgtttggctgggcacagtagctcacgcctgtaatcccagcgctttgggaggctgaggtgggaggatcgctagagcctaggagtttgcaaccagcctgggcaatatagtgaggacttgtctctactaaaaatcaaaaacaattagcagggcatggtggcccgtgtctgtagtcccagctacttgggaggctgaggtgggagattgtttgaccctgggagtttgaggctgcagtgagccgagatcgcaccactgcactccagcctgggcgacagagctagaccctgtctcaaaaaaagaaaaatgtccacgttcacatatacatttacaaactgcttttctttcttgatcagcacatcacaggtaattttccattctcatacacatctatccctttccttctccaggtggacaccttgcgttccagtgtgtgagactccactgtaatccacccagcagccctcccactgggcgggcacagcataccccacagtcagttatcaaaaaccagctgtgaccttgcaggtagcaactctgctcacctcctcatctcccgacgccatacctggctgtggtggggcgggggtgtgtggggtacactgaacatcccagggggcgctggcttcctcactcttctggggagcgttctgcttccaggatgaaattttcagccccttcacgccttgtggcacgtcgtctgtgtgcctcgacttttctttagacctttgcaggtagagttttcaatccacattctctgatctctctgtctccctgccctctctctcagtctctcttttctccctctcctcctcttccttcttctctgtcttgctgtctcctctgtcttttttgttttcttcctcctcctcctcttctttctcttcttctctgtctctctcttgcctcctcctcttcctcttcctcctcctccttcttctccctcctcctccttcttcttctccttcttcctcttctctctcttatacacacacacacacacacacacacacacacacacacacacacacacacacacacacacacacacacccttctcttccaaaatcaaccctgagttgccatctcagcttggggaacaaccttcatgagcggccctgcctggagaagccgtgagtccctgcctcctccctgcggcctcctgtggatccttggctacccagtggaggactctcagaactagtgattggggccagtggaggacactcagaggcagtgattggggccagagtgcaggagaatgtcttggagatggaatttccaggaggtgtttgaaggggggccagctctgtgcagatggccgggctggggaggtgaccaccagcggcctgctgtgtctgcctggtgtctctgtccaccttttccctgcatgacatcagagcgaagcaaggaagccctctgccaagcactaacgcatctgatgtttgcgtcatgtcaagtgcagggcaggtggtgctgtttatttttcaaaaggggtaggaaggaggtgagaagtgaggaagaagggaagagagggacagaagaggagaaggagaagggggtggggagaaaggagacaga

SEQ ID NO: 6160 - DNA, 6000 bp, Homo sapiens; identical to SEQ ID NO: 671

SEQ ID NO: 6161 - DNA, 6000 bp, Homo sapiens
cagacaactcaactagtccccccaaaaggcagaaaggagaaaagtgccagagagaaaaggttggcatcacggggccaggacactgacctcctctgccagccgtgcccggcctcccagaggatggagtcacggaagcctagcaaatgggaagggcagagacccaggcgtcccgggccgccccgcccagtccccctcccgcccacccatccctccgccccccagccccagggcacagaggagggagccgggcaggggcaggcaggggagggaggagcgagggcgggagggggaggagggagttgggcagggagggaggttggggggggggtggggagggagaaaaagaaagaaaatattttccgtgtccccgcctgcagagtcagtgtgcggtttgggagaaaatgtgtcggatattttggggcggtcacgtgggcgggcgggctccgagaggccccgggacagtcccagcctagagccgtgcccccccaggagccccccagtacggcgagccccggacattgcgacgctccatccaagagactgcccgacgccgggacctcggggctccgccgcctcccttccccctcccactccaggtgagtcaggcggggaagcaggctcgcccgccccgtcgcctgggtcctccggcgaggcggctgggggagggggcgcggaggagctgcacgggcgaatgccctcccgaggctggccaggctggccgccgggcttgaggggggcttcttgccccgacccaggccagtcctgctgtgggaagggaatggggaagattttaacaggctgaggatgggctgggtcatctgcccttcattttggtgcatagcagaggacagcatttggggaagtcttcagccagggggcattcctccttatatttttgtgctgggaatgtgagagaagacagggtttcctctcgcggggaaagactaccacccccttacccccgggctctgaggggtagatttgatgttccatgctggtccaagttcctccctccccagtggaatgggacagcttggacatcagaaggcaaggaaaacgtccagaggcaagtgagcctggccctccgcgtccaggagttccgaaggactggtgcataggatagggatctgtgaactttccttgaagcgctggattccctcccacacgttcccagcccaggtgcgagccttggctccctccagccaaggtggggggcacctctggagtattcttgagggaagcccaaatggaacaaagaaagagcaggaagaccgggacagggacccaggagtgctggtcccagagttccactgacgctgcctctctgtctttagcagctacggcccagttccctcaacctgacccagtatgtagaagccagtctctgcaggcggccagcgggtaagaagatgcttggttgttagtggtggtgggggcaggggagcctgagtaggaggtcttcagggcaagaaactgagatgactgtcccgctttagggctctggtcctgggcagctggaatcccaatcctcaagtctgaggcttctgcccttagggtcagatgctgagttggggtcaaggaccatagccagcatctcatatccttgaggcaagtagagagaagacaggggagtgggggtagtgtgtgcagggagcctggagcttgggtatcccatatagacagacatacacacacacacacacacacacacacacacacacacacacacacacgcactgtggcctacagcctagtaggcagcatggggcacgcccccccacaccccggcacacccccacccctggctcagaaagccacctaactggcacctccagttcccccctctgccccaccctgtccatgccctctgatgcccacacacattccactggcattgcctgcctgcctcctgggcactgcccctccctggggctagtagggtggagggagggcacctggggatgagaggtggagactcaagggtctggactcccccagggatggcacaatgccaaggaagcctggcccactgctgcctcctggggagcaggctgggggcccaggctagagcagaggatgcctgggttctctgcccaggctggagatggggtcatggaaaaaggtggtcgtgtttatacagaggggaggggggcagcgggtggagagtggccgacaagagcagctttgttccaggctctggagcgggcagggcgacagggaaacacacccccctccatccggcagcccccttcatccatgccctcccctcaactccacctcagctctaagagaagcagctttgtaagagcccctctcccctagtctgtcatccccgctgccccaccatttgagatggcatcttagtagaggaagaatgttctctactttccatgagtcccccaaagaaccaaggcacctggggcctcagtttaggacttccttttactctgcactgccttcaattccttagtccattctcctaccctgggtttaagaccctccccttctcttcccagccacgacagaaccaaggctcagaaatgggaggaatctctacccccttcctctcttcactcaactcccaagtcccttctctgaggcaaaataagaggaaggccaaggacaactctcattggctcacatgcagcatcattccttggtgaggatcaggagctgagcatccctctgtggggacccccactgccctacctgcctgtgtttcccattggtaggtgagaagcaaagacaaggagggctaaggcagagagccctgttcccagtctaagccaagtctggggaacatggggatgggggagtcctctagtagcttctcacccttgtcattggaggggttaatccacctggaatgtggcctggccagttgagctgtggcccaggggcctcaggggcccccaaactcctggctccatcagggcttaactagggatgagaacttcggaggggaataggagaaggaaaaggagagggaccctggaggcttggagctcagacttttagggcctgcgaagacactgggctaaagagtttgagggtgctgggtgtatgggtggtgccatggtgaggggcaggggatgcttcattcataagggctgagtgaaatgtgatggcgttggggtctgggttcttgtaacctccatgacagtttaccctcaagggcttgaaggccaaggtagaggagagaaagaaaaacaagcaaaaacaaaaataaaaaccagaggtataaagactgagagctatacatcctagaagcaaatactgatggaaagaaaggcagatatacccatcccctacctctgggcctgcccaccccatggtctctctgcattttagtctcttggcccttctctgcccttcatagcagtctgttatggctctgactggtggagatacccaggctggggtgacttttcctccctagcccactaactgcctagagaggtgagaagttctggggctcctaggaaagccaaacttttcctttgtcaggggatgaagataggaaccacctacttagcactaggattcccatctcctctctctacctccttctcctccccttcccctgggctcaggtttaaactcttagagggaagcctacttttgggggaggagaggttgcagggagaacttcctagaaacagggagcccagggataagaaagaaaaggaggcagaatgcccgggcgtgtcgctcacgcctgtaatcccagcactttgagaggccaaggtgggcggatcatctgaggttgggagttcgagaccagcctgaccaacctggagaaaccccatctctactaaaaatataaacattagctgtctcaacaaaacaaaacaaaaaaagagagagagagagagaaaaaaggaggcagagaagtaaagtcagctgaccaagaagcagctccttggcatcatacacttggcacaagtgggggctccatcaacatccttagatttgaagcagtgggtacaagagggcttacagggtgaggaaaaattggagacaggaagaattgggagaggaaactggaagagggagtgttgaggaaaacagagagggaagtgcttactgaagcagagtatggaggaaaataaggtacaaagagaactaatatgagacatttacatcacatttcctatgtgccctacattatgccagacacttgacattggttaatttatttagtcctcacaataaccatatgaggtaggccctattattagtcccaagtgacgcatgaagaaactgaggcacagagagattaagtgacatgcctgaagtcccacagctagcaagtggtggggtacagtccaggtagtctggctctagagtctgtccccctaacctttgccttgtactcctctccagagagctgtagggctcccaggttataacagagttatgtttgccttctccaggatggtaaagagtttgaatctgggctcccccacttgcagccatgtgaccttaagccagtcacttcacctcagtttcctcatatgtgaaatgagaatcataactcccagttcacaggactgatgtgaggtttaggtcaaatgcttagcccagttgtggtgattcatgatcacttcccaatctaggagttctctccaccagaagtccttagaccatcattcaccttgggacctcagtttaacctttcctggagctcctctggagagtttctcagagcctgcataaccccctgccgtgccctctctaccacactgcaagggccctgagccagggcaggataaactgtagcagcacagagggagaagactgcaactgagagagggtcacagggcttggaacctcagagtggtcattctctcatctctcctttctctctctttctccctaggacttttggaggcccagtgggcaggccaggcagggcgggtacggagcctcccaggctggggcagtgggcatgggcaggggctgtggctgaagacctcgcccgcccactgcagaccccaggggactctcacaccgcagctgccatggccaccaataaggagcgactctttgcggctggtgccctggggcctggatctggctacccaggggcaggtttccccttcgccttcccaggggcactcagggggtctccgcctttcgagatgctgagccctagcttccggggcctgggccagcctgacctccccaaggagatggcctctctgtgtgagtctcagggatcttggggaatgaaggcaaatgttaacaagaaggcatcaggagggtggatggtaaaagagttggcaccccagttaggaaggcaggcaggggacaggggtttggcctaatggagtagtagtgaataatggagggtggtagtggtggtgaggaaggagtttggatgtggactcaatggaagtgtttgcaaatgagagttctcctgtcaaataggatagggaggtagcaggcctaaaacttggggggtgggtatctaaaactgcctcctgggtcagtcaactagtagaggggaatacctttgtgtgggcagctgggggtgggtctggtgcagcgtgaatctgctgcttgcttgcagtggggagttggagggagccaaactgggaagcagaggagtctgggaggccagtcacctggctctgtgatcaagaggtgaaattgggttgggtgcagtggctaacgcctgtaatcccagcactttgggaggccgaggtgggtgggtcacttgaggccaggagttcgagaccagcctggccaacatggtgaaactccccctctgttaaaaatgcaaaaattagctgggcgtagtggcgcacacttgtagtcccagctacttgggaggctgaggcacgagaattgcttgaacacaggaagcagaggttgcagtgagccaagatcttgccactgcaccccagtctgggcgatagagtgagaatctgtctaaaaaaaaaaaaagaaaaaggctcacgcctgtaatcccagcactttgggaggccaaggagg

SEQ ID NO: 6162 - DNA, 6000 bp, Homo sapiens; identical to SEQ ID NO: 2763

SEQ ID NO: 6163 - DNA, 6000 bp, Homo sapiens
gggcttgtctgcacccccattgccatctcccattccctgaggtaaccacagcatgcctcttctttcccccatctccttcacctgactttggctaccaaaagcagcctttcccaggagggaggacacctggcccccaggggggagcaaggacaaagccaagtaattccagtatggaaaatgtgacgtgacccaggagtctgtgtcccaggtcctggtcaccctgcgagcattgctggggaaggtactttgggtatgtctgtccagcctatcagcctagctcagactctccccttctcctctttctccctcccaactccagtccccatgggagtgtttgggatccgtgcacagagcttggactgcagacccattcttttctctccctctgtcctcagtagaatgcagagtgaaaccactgggttctctcactctagggttgagagtctgtctatgttgaagcagataatgcccccatcagacacagacactcactctcggcactggcatgcgcacgcgcttgcacagacacacacacacacacacgcacacacacacacacccggagtcaacagcattcatggcacatctaccaggcaggcaggcaggcaggccggtgctggctagggcagacacacaccctctgcctgggctttctctctcacacccagcccaaggctcctcccactcccagccacagttcctcctgccctcctctccagcctctccccttccaaatccaggcctaaaggtgggggacaactggcagccagggacccaggcgccctaactcctggagcttactccaggcaagatgacagggaagatgtctgtgagccctggcctcagcacccccagcaacagccactagtcaaccagtttgctcctgggaccaaaggactgaggtgggctaggggaagggagaggctacttggatctgcaggtgaaggctgagcaaagagtaagggcaggagcatctattctagatctggcatactcctgcccggccaatccagcactgggagggagtgggtaccgccccattgcctaccctggggaggcgccagagactggcctcgcaagagtcacagcctggccacagacaactcaactagtccccccaaaaggcagaaaggagaaaagtgccagagagaaaaggttggcatcacggggccaggacactgacctcctctgccagccgtgcccggcctcccagaggatggagtcacggaagcctagcaaatgggaagggcagagacccaggcgtcccgggccgccccgcccagtccccctcccgcccacccatccctccgccccccagccccagggcacagaggagggagccgggcaggggcaggcaggggagggaggagcgagggcgggagggggaggagggagttgggcagggagggaggttggggggggggtggggagggagaaaaagaaagaaaatattttccgtgtccccgcctgcagagtcagtgtgcggtttgggagaaaatgtgtcggatattttggggcggtcacgtgggcgggcgggctccgagaggccccgggacagtcccagcctagagccgtgcccccccaggagccccccagtacggcgagccccggacattgcgacgctccatccaagagactgcccgacgccgggacctcggggctccgccgcctcccttccccctcccactccaggtgagtcaggcggggaagcaggctcgcccgccccgtcgcctgggtcctccggcgaggcggctgggggagggggcgcggaggagctgcacgggcgaatgccctcccgaggctggccaggctggccgccgggcttgaggggggcttcttgccccgacccaggccagtcctgctgtgggaagggaatggggaagattttaacaggctgaggatgggctgggtcatctgcccttcattttggtgcatagcagaggacagcatttggggaagtcttcagccagggggcattcctccttatatttttgtgctgggaatgtgagagaagacagggtttcctctcgcggggaaagactaccacccccttacccccgggctctgaggggtagatttgatgttccatgctggtccaagttcctccctccccagtggaatgggacagcttggacatcagaaggcaaggaaaacgtccagaggcaagtgagcctggccctccgcgtccaggagttccgaaggactggtgcataggatagggatctgtgaactttccttgaagcgctggattccctcccacacgttcccagcccaggtgcgagccttggctccctccagccaaggtggggggcacctctggagtattcttgagggaagcccaaatggaacaaagaaagagcaggaagaccgggacagggacccaggagtgctggtcccagagttccactgacgctgcctctctgtctttagcagctacggcccagttccctcaacctgacccagtatgtagaagccagtctctgcaggcggccagcgggtaagaagatgcttggttgttagtggtggtgggggcaggggagcctgagtaggaggtcttcagggcaagaaactgagatgactgtcccgctttagggctctggtcctgggcagctggaatcccaatcctcaagtctgaggcttctgcccttagggtcagatgctgagttggggtcaaggaccatagccagcatctcatatccttgaggcaagtagagagaagacaggggagtgggggtagtgtgtgcagggagcctggagcttgggtatcccatatagacagacatacacacacacacacacacacacacacacacacacacacacacacacgcactgtggcctacagcctagtaggcagcatggggcacgcccccccacaccccggcacacccccacccctggctcagaaagccacctaactggcacctccagttcccccctctgccccaccctgtccatgccctctgatgcccacacacattccactggcattgcctgcctgcctcctgggcactgcccctccctggggctagtagggtggagggagggcacctggggatgagaggtggagactcaagggtctggactcccccagggatggcacaatgccaaggaagcctggcccactgctgcctcctggggagcaggctgggggcccaggctagagcagaggatgcctgggttctctgcccaggctggagatggggtcatggaaaaaggtggtcgtgtttatacagaggggaggggggcagcgggtggagagtggccgacaagagcagctttgttccaggctctggagcgggcagggcgacagggaaacacacccccctccatccggcagcccccttcatccatgccctcccctcaactccacctcagctctaagagaagcagctttgtaagagcccctctcccctagtctgtcatccccgctgccccaccatttgagatggcatcttagtagaggaagaatgttctctactttccatgagtcccccaaagaaccaaggcacctggggcctcagtttaggacttccttttactctgcactgccttcaattccttagtccattctcctaccctgggtttaagaccctccccttctcttcccagccacgacagaaccaaggctcagaaatgggaggaatctctacccccttcctctcttcactcaactcccaagtcccttctctgaggcaaaataagaggaaggccaaggacaactctcattggctcacatgcagcatcattccttggtgaggatcaggagctgagcatccctctgtggggacccccactgccctacctgcctgtgtttcccattggtaggtgagaagcaaagacaaggagggctaaggcagagagccctgttcccagtctaagccaagtctggggaacatggggatgggggagtcctctagtagcttctcacccttgtcattggaggggttaatccacctggaatgtggcctggccagttgagctgtggcccaggggcctcaggggcccccaaactcctggctccatcagggcttaactagggatgagaacttcggaggggaataggagaaggaaaaggagagggaccctggaggcttggagctcagacttttagggcctgcgaagacactgggctaaagagtttgagggtgctgggtgtatgggtggtgccatggtgaggggcaggggatgcttcattcataagggctgagtgaaatgtgatggcgttggggtctgggttcttgtaacctccatgacagtttaccctcaagggcttgaaggccaaggtagaggagagaaagaaaaacaagcaaaaacaaaaataaaaaccagaggtataaagactgagagctatacatcctagaagcaaatactgatggaaagaaaggcagatatacccatcccctacctctgggcctgcccaccccatggtctctctgcattttagtctcttggcccttctctgcccttcatagcagtctgttatggctctgactggtggagatacccaggctggggtgacttttcctccctagcccactaactgcctagagaggtgagaagttctggggctcctaggaaagccaaacttttcctttgtcaggggatgaagataggaaccacctacttagcactaggattcccatctcctctctctacctccttctcctccccttcccctgggctcaggtttaaactcttagagggaagcctacttttgggggaggagaggttgcagggagaacttcctagaaacagggagcccagggataagaaagaaaaggaggcagaatgcccgggcgtgtcgctcacgcctgtaatcccagcactttgagaggccaaggtgggcggatcatctgaggttgggagttcgagaccagcctgaccaacctggagaaaccccatctctactaaaaatataaacattagctgtctcaacaaaacaaaacaaaaaaagagagagagagagagaaaaaaggaggcagagaagtaaagtcagctgaccaagaagcagctccttggcatcatacacttggcacaagtgggggctccatcaacatccttagatttgaagcagtgggtacaagagggcttacagggtgaggaaaaattggagacaggaagaattgggagaggaaactggaagagggagtgttgaggaaaacagagagggaagtgcttactgaagcagagtatggaggaaaataaggtacaaagagaactaatatgagacatttacatcacatttcctatgtgccctacattatgccagacacttgacattggttaatttatttagtcctcacaataaccatatgaggtaggccctattattagtcccaagtgacgcatgaagaaactgaggcacagagagattaagtgacatgcctgaagtcccacagctagcaagtggtggggtacagtccaggtagtctggctctagagtctgtccccctaacctttgccttgtactcctctccagagagctgtagggctcccaggttataacagagttatgtttgccttctccaggatggtaaagagtttgaatctgggctcccccacttgcagccatgtgaccttaagccagtcacttcacctcagtttcctcatatgtgaaatgagaatcataactcccagttcacaggactgatgtgaggtttaggtcaaatgcttagcccagttgtggtgattcatgatcacttcccaatctaggagttctctccaccagaagtccttagaccatcattcaccttgggacctcagtttaacctttcctggagctcctctggagagtttctcagagcctgcataaccccctgccgtgccctctctaccacactgcaagggccctgagccagggcaggataaactgtagcagcacagagggagaagactgcaactgagagagggtcacagggcttggaacctcagagtggtcattctctcatctctcctttctctctctttctccctaggacttttggaggcccagtgggc

SEQ ID NO: 6164 - DNA, 6000 bp, Homo sapiens
agcctcccgagtagctgggattacaggcgcccaccaccacacctggctaattttttgtatttttagtagagacggggtttcaccgcgtaagccaggatggtctcaatctcctgacctcatgacccacctgcctttgcctcccaaagtgctgggattacaggcgtgagccaccatgcccggccctttttttttttttttttttttttaatagagacggggtctccctacattgctcaggttggtctcaaactcctgggctcaaggaatcctcccatcttggggtcccaaagtgctgagattacaggcgtgagccatggagccccacctcattaacactgaaagcatttagcattgcaatgtgataaaaaggtttgttgaatgaataaccctaatacccaagaaaagttaaattacttggtaatttgataagaggacaaatgtgtgatacatttcaaaaagtgatgatcttcggttacctggtatgaatgtttttcttagaaacttggattaagaaatgtcaccaggcgcggtggctcacgcctgtaatcccagcactttgggaggcctaggcgggcggatcacgaggtcaggagatcgagaccatcgtggctaatatggtgaaacctcgtctctactaaaaatacaaaaaaaaaattagctgggtgtgtggtggcaggcgcctgtagtcccagctactcaggaggctgaggcaggaaaatggcatgaacccgcaaggcagagcttgcagtgagccgagatcatgccactgcactccagcctgggcaacagagcgagactctgactcaaaaaaaaaaaaaagaaatgtcaaagtaggccaggagcaatggctcatgcctgtaatcccagcactttgggaggccgaggtgggtggatcacgaggtcaggagttcaagaccagcctggccaacatggtgaaaccccatctctcctaaaaatacaaaatattagccaggtgtggtggtgtgcgcttgtaatcccagctactcaggaggctgaggcaggagaattgcttgaacctgggaggcggaggttgcagtgagccgagtttgtgccaccgtactccagcctgggtgacagagcaagactctgtctcaaaaaaaaagaaatgtcagagtaggcagggggcagtgacacacgtctgtaatcccaatactttgggagttccaggtgggcggatcacctgagttcaggagttcgagaccagcctggccaacatagtgaaaccctgtctctagtaaaaatacaaaaaaattagccaggcatggtggtgcgcacctgtagtcccagctacttgggaggctgaggcaggagaatcacttgaacctgggaagcataggttgcagcgagccgagatagcaccattgcactccagcctgggcaacaagattgatactgcatctcaaaaaaaagaaaaaaatgacagagtaatgtgtttaatggttaataatactctaattttgccaagacccaaattgatgatacaaaaccaaagttctcaaatcagattaagtcttgctggaaaggttgggagagggaggaagtcttggagcttcttcacttttatataaaattatctctttttttttgagatgggggtctcactatgttgcccaggctggagtgcagtgtcgcagatattggctcactgcaacctccatctcctaggctcaagcaatcctcccacctcagcttcctgagtagcctcctgcaatggtgcaatcttagctcactacaacctctacctcctgggctcaagccatcctcccatcttagccttcccagtagctgggaatacagacatataccaccatgcctggctaatttttgtatttttgtagaaacagggtttcaccatgttgcccaagctggtctccaactcctggactcatgtaatgcccccatatcagcattccaaagtgctgggattataggcgcaagccaccatgcccagcctgtaaaattatccttgttcaggtcagaaacagatgaggccatagatatgatataacaggctcacaaatgacaaaaggaatctttattttgatttctttttcatctctgctttttttttaagcaacccacattgtctagaatttaaaaaacatcctcaacattatttgccctatattactttttcaagggcattatactaaacagactctgctcacaaaatgtatgagaggaacaaattattgaatggattggataggataacattgacattagtcaatagtaaacaaaaataataatatcatgtatatatagggctaattttgtgccaggcattgttctcaatgcttctttcttatattagtctacttaattctcaaaacaatcctaggatataatccccattgttagtagtagtatcccttttatggatgaggaaactgatgtaaagagattaaataacttgcccaatgacagctagtgagtggcaaacacaagattcccagcctggctccagtggcaatatgcaatattctctttttttttgagatggagttacactcttgttgcccaggctggagcgcaatggtgcaatctcagctcaccgcaacctccgcctcctgggttcaagtgattcttttgtcccagcctcccaaataggtgggattacaggccaccacacccagctaattttgtattttcagtagaaaccgagtttctccatgttggtcaggctggtcttgaacttccaacctcaggtgatctgcccgccttggcctccctaagtgctgggattataggagtgagccaccgcgcccggactaatttttttgtatttttagtagaggccgggtttcatcttgttggccagcctggtctcaggtgatctacaggccttggcctcccaaagtgcagggattacaggtgtaagccaccacacccagccaaaatcctatgttttgatgcagtccactgaaattagttttgatcccactccaccatggaatgatttcctagttgccaaacccaaacccagaggatttttttcagccctaatttttttttcttcttttttatttttctttttttgttgagacagggtctcacaacgtcagccagcatggagtacaatggtgcaatcttagctctctgcaacctctacctcctgggctcaagccatattcccatctcagcttccccagtagctgggactactggcacatgccacacctggctaattgtgtgtctgtgtgtgtgtgtgtgtgtgtgtttatttttttacatattttttagagacaaggtttcaccacgttgcccaggctggtattgaactcctgggctcaagttatccacccacctcggcttcccaaagtgttgggattactgggctggccgtgcccagcccagccctttttacttattttattatttatttatttatttattttttattattatttttgagacggagtctcgctctgtcaccaggctggagtgcagtggcacgatctcagctcattgaaacctccgccttccaggttcacgccattctcctgcctcagcctcctgagtagctgggactacaggcgcccgccaccacgcccagctaatttttgtatttttagtagagacggggtttcaccatgttggccaggatggtctagatcgcttgacctcatgatctgcccacctcggcctcccagagtgctgggattacaggcgtgagccaccgtgcccagcctattttattttatatatttattttatttttttagagagtctcactctgtcgcccaagctggagtgcagtggcgctatctcggctcactgcaagctccgcctctcggatttacgccattctcctgcctcagcctcccaagtagctgggactacaggcgcccgccaccacgcccggctaattttttgtattgttagtagagaccgggtttcactgtgttagtcaggatggtctcgatctcctgacctcgtgatccgcccgccttggcctcccatagtgctgggattacaggcgtgagccaccgcgcccagctaatttttgtatttttagtagagacggggtttcaccatgttagctaggctggtctcgaactcctgacctcaggtgatccacctgcctcggcctccgaaagtactgggattacaggcgtgagccaccgctcccagcctaccctaagaatttctattcacatttcatagctgaggtctctcagcttccttcaaggtggacaattctgtatctctaggtgacccaattttatcccctcgtctttcgtgcacccagtttatgctaaccaggaaccatcacattattgcattgtttgttcacctggaccttaaaaggaaggttcttagtcttatttatcttattattgagtctcctcaatgccctgctaaagtactggttacattagtttatttcattttaataggtttaaatgataaagatcctgtctaggttgctaatctgtgcaatcgcctgggagcttgcaatctcactacttcgagagaaaaaccttattttggctctaaagagggctcctgacttcgccacgctcaccttcagtggtgcttcaccgcactaccacttccctaaccaccgcccctatggctgtcacctagatcaaggacctatctaaggagaaagcccaaggacaggcaaagacaggccacgcactttcaacaggaactcggcccctttcctaaacgtagttcctctgattaccctgtccaacggacgtcgctatgatccaattaagttttgaggctcagagtgacgccctctaacctcacactgtccaataaaaaaaggagtttcagattagcaccagttttgaccaatggatgagaagatcagcgtgtattaacctgtagaagcagcacagagaatgatgagcagccagttcacccaatggacctgcctactgcagcgtaggcctcgcctcaacggcaggagagcaggcggctgcggttgctgcagccttcagtctccacccggactacgccatgttggggtttgtgggtcgggtggccgctgctccggcctccggggccttgcggagactcaccccttcagcgtcgctgcccccagctcagctcttactgcgggccgctccgacggcggtccatcctggtaagtgcttttctctaggagctaacgttccattttgccgccccatgaccttgagccggggaacgatggtagctcgggcctaagggatccgtggtgttaaaaggatgcctggagccgcgtcttgctctctaatggctggagaacaagaatgggacacccataggaggtttcttcgacccagctctgtcccattttgtataaagtcctttgtgtgacggaaaaggtgcgggcaggtgcgttgaccttccggttgaataggggtactgaactctcgaaaaatggggtcttgtgcatgcggatgggaaggctgtgcaggcgctttatcgatcgctgcgcggccttccctcttggacacgcgttccgtacaagcggaaagaggcctgacttcggctgagttttcctctccttgtgtgttaagtcctggcttccgatgacctttaactggcctgaccccagctccttccaatatcttttgtctgttagtcagggactatgcggcgcaaacatctccttcgccaaaagcaggcgccgccaccgggcgcatcgtggcggtcattggcgcagtggtggacgtccagtttgatgagggactaccaccaattctaaatgccctggaagtgcaaggcagggagaccagactggttttggaggtggcccagcatttgggtaagtagagtttgttaggaatagtaaagaccttgtgtagcccaaatatccccaaaaccaagctgtctgccttctatgatgattttatcaaaatgactttcgttcttctgagtttgctgaagccacatttaggtactgagaaggagtcttggtcgatttaggtcttgataccaatttatccttatgtataaccctgcgatgcctgtatctaa

SEQ ID NO: 6165 - DNA, 6000 bp, Homo sapiens
catgcaagtccaaaatccagtggggctgtcaaatcttaaaactcccaaatgatcttttttgactccatgtttcacatgcaggtcacactggtgcaagaggtgggttcccatggtctaaggcagctccacctctgtggctttgcagggtacagcctctctcttggctgctttcacaggctggcattgtctgtggctttctcaggcacatggcacaagttgttggtggatctacaattctggggtctgcaggatggtggcccttttctcacagttccactgcgcagtgcccccgtggggactctgtgtggtggcgtcaaccccacatttcccttctgcactgccctagcaggtgttctccatgagggccctgcccctgcagcaaacttctgcctggacatccagatgttttcatgcatctctgaaatctaggcagaggttcccaaacctcaattcttgacttctgtgcacaagcaggcacaacaccacatggtagctgccaaagcttggggcttgcaccctctgaagccatagcccaagctgtaccttggccccttctagccatggctggagcagctagaacacaagacaccaagtccctaggctagacacagcagggggtcctgggcctgacccacaaaccatttttcctcctaggcctctgggcctgtgatgggaaaggctgctgcaaagttctctgacatggcctggagacattttccccattgtcttggagattaacatttggttcctcattacttatgcaaatttctgcagcaggcttgagtttctccccagaaaatgggtttttcctttctattgcatcatcaggctgtaaattttccaaactttcatgctctgcttcctttttaaaactgaatgctttcaacgtcacccaagtcacctcttgaatgctttgctgcttagatatttcttctaccagataccctagatcatcttcctcaagttcaaagttccacaaatctccagggcaggggcaaaatgccatcagtctctttgctaaaacataggaagagtcaccttcacttcagttcccaacaagtttctcatctccatctgagaccacctcagcctggatttcattgtccatatcattatcagcatttttgtcaaagccgttcaacaagtctttaggaagttccaaatttccccacattttcctgtcttccgagtcctccaaactgttccaacctctgtctgttgccaagttccaaagtctcttccacattttcaggtatttttacagcagcactacactgtaccagtacaaacttactgtattagtccattttcacactgctaataaagacaaactcgagactgggtaatttataaagaaaaagaggtttaatggactcacagttccacacggctggggagacctcacaatcagaaggagaacggtatgggggaaaccacctcaatgattcaattatctcccactaggtacctcccacaacatgtgggaattatgggagctacaattcaaaatgagatttgggtggggacagagcccaaccatatcagttgggcagccagccatctgttgttgggtgatttttaccaaagtgcatctttctctgtacaatcagaggcttccacctccagagaatgtgttatcttaatcctctggctggatgcttatgaggatagagtaaactggcaatgtgcagtgaatcttgggaggggtcatccttacaaataaagcactacagtttggtagagatggaagaacttcagatgcagtggatgctgtaaccgatggcttttatgatggtatttcatggtgatagtgtgagaacgccagacagagggaacaggtgacaatattgtctctgtccaaaagagtcatagtaaatgcaaatctgcttatcatgctattgagttaggtactaaactttgctatgccatccagttgtaaaacctagagccccaaagaagagaataataagatagaaaacaacacaactgatcttttggctaacactaagtctggaaattacccttccatttgagatgattgccagaaaaatcatcaatatatatcctatgaaaaactcctgaggggcagaggaatgggatcaatgcttcaaagactcagagaaagaaaatcactataaaaattatttgctcctagaatgtaaaaaatattttaagaaaactgcttggcattctaaaggtgaaaagactttagaatgagataaaagggagaagattacttttaaaaattcagcgacattaaaaatgtaatgacagaagtaaaatctacatcgggagtaggaatgtagactcctgtagcattactatgacagacaccagagtcaatgacatgaaagacaaacttaagatcttttcaggtatgtggtaaaagaaaaaaggattcaagtgaatgatatagaggactggggctgggcatggtggctcacgtctgtaatcccagcacttcgggaggccaagatgggcggatcacgaggtcaggagatagggaccatcctggccaacatggtgaaaccctgtctctactgaaaatacaaaaatcagccgggcgtggtggtgtgcacctgtagtctcagctactcaggaggctgaggcaggaggatcgcttgaacctgggaggtggaggttgtagtgagccaagcttacaccgctgcactccagcctgggcaacagagtgagactacatctcaaaaaaaaaaaaaaaaaaagaagaagaatatagaggactggatagatttatttaagaattatacatttctgaggaaggtactagaagaattagaacaacaataattaaagatatcactttaaaaaacaagacctgactattcaaattgaaaggactcaccattctagatgatagtaatgaaaagagggctattctagaaataccctggcaaaggtttgggaatgcaagtataaagaaaaaaatcacatctattagtattctgtcataaagcaagtaatttatgaggaaacaaaaatctagctgttctcagatagctctccagtaagaaatgccagaagacaacagaaaaaatacttaaaattttttgaagaaaaagactatgacctaagaattttctcagctgaattttttttctcatatgtgaagacaacaaatgaacaatcccatatattcaaaggctcaggaaatagagcattcatgtattcttcatgaaaatattatttggagacatacatcagacacccgaaagatgtgaaagaagaatagggtatggattacacatagttcatggcattatgtaaatgttataaagcaagatgacatagcttgggaaaacaaaagctgtgtctaatagcagtacttccaagccataacttacagtagcccaattctcaataaattggaaggcagctaaacaatcatacagtgctagtattttatagtgtcagggtctattcacatataatctcatttaacccattttaattccgtgagataaaaaccaatatccccatctaagatatgggaaactaagacgtagaagaaagcacttggctaagatatcatggctcgtaggtggcagtcaagaggtgagtttgcagtctacagatttaacctcagactattctgcttctaacatgactatagaaatgtattgatcattagctgcctgaagttctgttcttaactctaggtgtccaaaagaagatgaattttgtttagatagcattttcccatatctagggctgttggctttaaagaagttcccagaagtgaatccaattcccagaaggatcaaggtggattcttttgtgtgttactctaacaggttgctttatatatatatataagttatataatatacacatataatttatgtattatatataagtatgtataacatcatatgtaatatataaatatagtacatttcacactggtaggacgtaattccaaaccacatatttgtttaaccaattgaattacttggatttagtttctatttccctctttatttccttctgaaaatattatacaaataacatcagtttacaaaaaataaaatctgatatagcttttttatcatacactaggctagactaaatgcattctgtggattgtttacctaggaccagatggtatattataaagttgtatacaaatgaacaaggactgcctgaaatggattgatagctgagcacatttggctggagcgtctattttagaaggaaaacctgagaatcatattatttgagtgtgattcatgtgttaatagtatttcaagacaagccacttaaaatatgtcctgagtggtgatgctggaaatgatcttttcttcagtgttttcaagtgtcttcatttaagtgtacacattttgcctacctataacacgtatctacacattgtgattaagagagcaaactctgaaatcagacctagattaaagatcttaatctctgccagttgattgggcaagtgacttaatcattcgacagtaatttctgcatttgaaaatgcctatctcaagggtaatgagaattacactggttcaccaaaagaattacactgactaatataaaacgtgccaagcatgtatgtgtcacatgaaggctcattaaaaagcggatattattgttaatcttccaataactactatttccaacaacaggctgaaggggctcagaaacgtttgttgagtaaaaacacaaggaaacagtagcacagatttcctgctctcctttacgatcgatgacctgtctaaggactgtgatctctgttcactacagattgtcacctgcattaatctactgtcacccattaacctatcaaataaggcagtctaaaaactccaggcgtccctttccgtaaggacccggactgttgaactggaaagctaaaattcaaggcgtgacaattgccctttgtcccacattcctccaccggtcgcctgcttatttaaatggtgcgtcccctcgggtaccacttgaacaaaacctgcccagagcgctccctgtgtagattcgctggaagcagctggaggctccagttctcatctgctcaggtgtccccggcgccttggcgaactcggccactccagttcctcacgtggtgagcactcagggcagcgggtcgattttccgaggtcccatacctgggtttgaggggcgcggctcgcagcggcgggtgcaggggcgactgccagccctcaccccgcctcggggtgcgttcggaggccgacacctggaggacgcctccagtccccgcgggacgccacgcctgcgcgccagggatccgggataagaagtgcgcgccgggctccggctgcgcgccgcggggccaccagtttgcgcgcagggctcaggcgaccgtgcggccatggacacgccacggggcatcggcaccttcgtggtgtgggactacgtggtgttcgcgggcatgctggtcatctcggccgccatcggcatctactacgccttcgctgggggcggccagcagacctccaaggacttcctgatgggcggccgcagaatgaccgcagtgcccgtggcgctgtccctcaccgctagcttcatgtcagccgtcactgtcctgggcaccccctccgaggtctaccgttttggggccatttttagcatctttgccttcacctacttctttgtggtggtcatcagcgcggaggtcttcctcccggtgttctacaaactgggaattaccagcacctacgaggtaaggggcagggtgggctgggaccatgcagggcgcgggggaaggggactctgcagacctctggaggcgttttcttgggggcagactgtcactgccacatcgaaatctctccccgtccatcgtcatcatcaccctcccttcactcctccccgtcccccgatcttcacctggcatctttcccttctactgagaggcgtcctctaagggtgaaaaaattcttgggatttactctcctgggcttagtgaaaaaaagaggcttccaaagtgaacggattgcaacagtagtgctc

SEQ ID NO: 6166 - DNA, 6000 bp, Homo sapiens
tacaccacaaagttaatgtaaccaccttatagttataattccagagtcctgcaagattaactagcagtcttgtaattccaaatttaaattactaggagggtcgggtgcagtggctcacgcctgtaatcccaacttcaggaggctgagccgggcagatcacttgaggtcgggagctcaagaccagcctggccaacatggcgaaatcctgtttctactaaaaaaaaaaaaaaaaaaaaaaaaaattagctgggcgtgagggcacacacctgtaatcccagctactcaggaggctgaggtgggagaattgcctgaacccaggaggcggaggttgcagtgagccaagattgtgccactgtactccagccttggtgacagagtgagactctgtctcaaataaataaataaattaaataaataaatgagtaggagaatctcacatctgactggttcagcttggtccaggtgtctaccccggtccattcaacagtgctcagggggatgagaaacattatagttaactacaggacttttggagacctgtcactatgagagggagggggcaggggaccctggaagttctctgagaatgaagaattgctatgatctgggaaagcacccctaaagatgccttagttacattattttccctaagggaagaggcatttttagtacaggacaatgggaagtcattaaatatatatcaatggctgtttttttttctactgtatctacagtctatatatccccagcacagacccaggctcttgtttcacacccccccacagagaattccacactgcacataatttcctatctttgctatatttgagattttgagatggggagcacatggttttttttttttttttaagttttgtctttattgagatccttatttgttgaattattgtcattgcttttttcctttaatttttttaacttttaacttcaggagtacacgtgcaggtgtgttactgtgccatggggggttggttgtacagattatttcatcacccaggtattaagcctagtatccactagttatttttcctgatcctctccctcctcccaccctccagcctctgataggccccagtgtgtgttgttcttctctttgtgtctatgtgttctcatggtttagctcccacttgtaagtgagaacatgcggtatttggttttctgttcctgtgttagtttgctaaagataatggcctccttctccatccagtccctgcaaagaacatgatgtggctctttttatggctgcatagtattccatagtgtatatgtaccacattttctttatccagtctatcactgatgggcacgcaggttgattccatgtctttgctgttgtgaccagggaagcacatgtttcagtgctcttctgcaacaactgaactgcatagtgttcaagatcatcattccagtcgtgttttctgctgcatgggcattcctacctgactctctaacgctatgcaaggttccccaaatgccatgctgtctcatgcatgtctttgttcccccgttttttccttttgtttgcctcagtctttctcctccctgaaggtttatactatcctcccctcatctaggaagccctctcccactcccatctgcaggctcaggtaggtgtccttgtttgtgctcccccggccctctcttgtgggactcactgcactgtaatggactcattcattttctggttggtttctttcttcaaggggaatatcacagttcaacctatatcaccagtgcctaagaagggcctgctaccaggtaggtcctcaagaaaaggaagaaatgaataaatgaatgaaatgagcctcacttctatatagtcttggtttatattttctagtccctattatcaacagttctactgtagaaggtaagagcacaagctctgatgtcagactttctgggtccatatcctgtctctgctcagtttcctagatgtgtgaacttgaacaagtttacttcacctctttgtgcctcagtctcctcatctgtggatggtataatgacacttcctacctcagggtcattgtggggaattgaatgagttagtgcatgttaagtgcttaaagtctggcatgtagataattctctataaatcttagttattattattatcaaacatctaaatcaccacaagaaactgcagatctaggtatgcttcctgagcaatacattctgcaggaatggttagtgctctcagaagtcattgagcctcaggagagatggatgtggtttttgcctagtatttcttccgttatgtgctctaagagataaggaacataaggatatgttgggctggaggaatgggttagaagctccaccagtggatgctttcggtaagagagtatgtctatcatggtttattgtgattgtatttgcttttaatgaataagtgagctttttgaggacaggcaaatactcggtggaatgattagacatgcgtattcctggggccttcctgttctcagtcttgaggggttatgatgggaaggttggtgaccagaaattgtccttttagaaacaaatgtccttttagaaactatcctaaatgtccatcaacaggtcaatggagatacaaaattgtgttatatccttacaacgaaggattactcaacaaaaaagagaaaaggaacaaactactgatacatgctatgacatggacagacctcagaatcattatagtgagtggaagaagccagacacaagcaaccatagattgtatgattctatttacatgaaatgtccagaaaaggcaaatctatagagatagaaagtagattagttgttgcaggatatgggataggagatgaggattaacagtgaaaatgaaggatctagttggggtggaaatattctaaaattgctttctggtgatggttacacaacttggtaaatttataagaatctgaattgtccacttgaaatgggtgaattatttgaaatgcaaaatatgtctcagtaaagtatgtgtggggagaaagagggagggagggagggggagacagagagagagagcaagagagagagagagacaaagagagagagagagagaaaaggttggagccaggctgtttggatctgaaacctggctctgctacttactagctgtatgatctcaggtaagtttaacctctttttgtctgagtttcctgccagtaaaattggggaaaataagaagttatttaccacagagtcttgctgggaagattgtggtgatacttaaagagtgcttaacacagagccaggaccctagaaagaactcaaaagatattagcaatatttagcctaccaaggattcagcacggacttagttgaacttaattcaaattttggataatttggacagtggcttgcagaggatattgactggtcttgtggaaatgactcctggggagcctgagagcctatagcctatgatttgtcagtcgcatgcagactggaggattggaacacaggagcctcaaagatgaagagttttttttccaccgcagcagcatttacagaggcgtcatcctgctgcccataaatgtggccacaacttgcagcgtttcagccccagttcaacaagtatttaggtaacgcccactccctgccaggctctgctagggcagaggacaggtgatttggaggcacagaggagggacatctcaccttgcccatgcagttttctagaggattgatatcttagcatgaccttagaacccctagaagttacccagttgaaggggtgcagagagttacccaggcagagggcatagcttgagtaaagcccagaggcaatagggagcttgctgagttcagtgaaatgaggatgtggaaagcagagtgacaagaagaaagacttagggtcccagggaaaggccttgtgtgccatgataaagaattgtattgtaaatagtgctgcaataaacatacgtgtggatgtgtctttgtagtagaatgattagaatacatggatacagagaggggaacatcacacaccggagctggtcaggggttggggggcaaggagagggagagcattaggacaaatacctaatgcatgtggggcttaaaacctagatgatgggttgataggtgcagcaaaccaccatggcacatgtatacctatgtaacaaacctgcatgttctgcacatgtatcctggaacttaaagtaaaaaaaaaaaagtccatctagagggagaaaaggggaaaaaacaaaaataattttatttatcctgaggacaatgaggagtcagtggagagttctaagcaggttctagatatcttccggctcagaaatcttcaattagatggtcccaaatggcatctacgtatcatactttgagagagcctgctctgttgattaggagcaaataaatgtcctcctggatgtatgtggcctgggttttgcatttgggctactcaaatgcaagttcctcgtgggaccacatccatgctagtggctggctgaaaaacggcttcatgactctcatgaggggaataaaaggcatggagtggtggctgtgagcctgtctgcagggccagacctcagaaaagcaaagggctgtaaatgtttcataaatttctctctgggtgcctgctctggctgagagcccattcataagcccaggcggctgaggggcaggtattgtgccggttactatagcatcaccttggaaagtctcacttggtgagagcggcaggcgagctggggtggggcaggagggggacgcggctggctggaggggctggagctaggccacggatactgctgctggtctcaggactcctggtggtccggagctcatgttagcgtccccagctgcagcccagggagggagagaggctgcgctcagtctgagagtggctgcctgagacagctgccacaggctgctgcagagcgtgcagcttttgcaagggactgaattcccagccagacaccccttggactcttttttggaggggtggggagcagagagaggagggagttgtcttatcttggaagatccgagctgggtttcatctcctttttgattttgagtagttccctccacgagaactgacttccaggtgttcaccaagggaaacaaggtggttctcacactggaaatgaggaaggatgacagtttttgagactgactgttaacggctcagaggtgcccctcattcaaaatgccttttaaagcatttgataccttcaaagaaaaaattctgaaacctgggaaggaaggagtgaagaacgccgtgggagattctttgggaattttacaaaggtaaagtttgaatgcgaactttagttcctttctgagtagcttcgtattgccaatgtgtgagagacttggtatcacgtttttaaaaccacactttaatgaggagaggatgggtcagattagatccttctggagccccttctagctccagtagtctatgcctggaggaaaaacagatgcatgaatagtattgggttgtattaggaaaagatcaagacaaatatgctgtttatatagctggattagcactttctggagatgatgatattgcatatggtatgtttggcattgaattagaaaatatttagggagataatattttatgttaactcattagtaatgacaaatatgccttgaactgaaataatttttatgtttttcactgaatccactataaatgaaaattaaatatttgcaatttttagcttatttaataaaatacataaagtggttcctgattgtatagtttgcaaagagaaggatagttacacattaatttgaaggaagtaacttaaaaaatgtctttgaagcagaaaatctcacataattgcagtgggaaaatgttaagtactatcactgaattgaatgagattttagtccaaaccaaaaagtaaatattttttaaagtaaaatatattaatggaaggagagtttgctataaatgattgaattaatgtgacagtttaatttatgaatttttatagacatagtaaatgccttctcaaa

SEQ ID NO: 6167 - DNA, 6000 bp, Homo sapiens
gggcagtgacacacgtctgtaatcccaatactttgggagttccaggtgggcggatcacctgagttcaggagttcgagaccagcctggccaacatagtgaaaccctgtctctagtaaaaatacaaaaaaattagccaggcatggtggtgcgcacctgtagtcccagctacttgggaggctgaggcaggagaatcacttgaacctgggaagcataggttgcagcgagccgagatagcaccattgcactccagcctgggcaacaagattgatactgcatctcaaaaaaaagaaaaaaatgacagagtaatgtgtttaatggttaataatactctaattttgccaagacccaaattgatgatacaaaaccaaagttctcaaatcagattaagtcttgctggaaaggttgggagagggaggaagtcttggagcttcttcacttttatataaaattatctctttttttttgagatgggggtctcactatgttgcccaggctggagtgcagtgtcgcagatattggctcactgcaacctccatctcctaggctcaagcaatcctcccacctcagcttcctgagtagcctcctgcaatggtgcaatcttagctcactacaacctctacctcctgggctcaagccatcctcccatcttagccttcccagtagctgggaatacagacatataccaccatgcctggctaatttttgtatttttgtagaaacagggtttcaccatgttgcccaagctggtctccaactcctggactcatgtaatgcccccatatcagcattccaaagtgctgggattataggcgcaagccaccatgcccagcctgtaaaattatccttgttcaggtcagaaacagatgaggccatagatatgatataacaggctcacaaatgacaaaaggaatctttattttgatttctttttcatctctgctttttttttaagcaacccacattgtctagaatttaaaaaacatcctcaacattatttgccctatattactttttcaagggcattatactaaacagactctgctcacaaaatgtatgagaggaacaaattattgaatggattggataggataacattgacattagtcaatagtaaacaaaaataataatatcatgtatatatagggctaattttgtgccaggcattgttctcaatgcttctttcttatattagtctacttaattctcaaaacaatcctaggatataatccccattgttagtagtagtatcccttttatggatgaggaaactgatgtaaagagattaaataacttgcccaatgacagctagtgagtggcaaacacaagattcccagcctggctccagtggcaatatgcaatattctctttttttttgagatggagttacactcttgttgcccaggctggagcgcaatggtgcaatctcagctcaccgcaacctccgcctcctgggttcaagtgattcttttgtcccagcctcccaaataggtgggattacaggccaccacacccagctaattttgtattttcagtagaaaccgagtttctccatgttggtcaggctggtcttgaacttccaacctcaggtgatctgcccgccttggcctccctaagtgctgggattataggagtgagccaccgcgcccggactaatttttttgtatttttagtagaggccgggtttcatcttgttggccagcctggtctcaggtgatctacaggccttggcctcccaaagtgcagggattacaggtgtaagccaccacacccagccaaaatcctatgttttgatgcagtccactgaaattagttttgatcccactccaccatggaatgatttcctagttgccaaacccaaacccagaggatttttttcagccctaatttttttttcttcttttttatttttctttttttgttgagacagggtctcacaacgtcagccagcatggagtacaatggtgcaatcttagctctctgcaacctctacctcctgggctcaagccatattcccatctcagcttccccagtagctgggactactggcacatgccacacctggctaattgtgtgtctgtgtgtgtgtgtgtgtgtgtgtttatttttttacatattttttagagacaaggtttcaccacgttgcccaggctggtattgaactcctgggctcaagttatccacccacctcggcttcccaaagtgttgggattactgggctggccgtgcccagcccagccctttttacttattttattatttatttatttatttattttttattattatttttgagacggagtctcgctctgtcaccaggctggagtgcagtggcacgatctcagctcattgaaacctccgccttccaggttcacgccattctcctgcctcagcctcctgagtagctgggactacaggcgcccgccaccacgcccagctaatttttgtatttttagtagagacggggtttcaccatgttggccaggatggtctagatcgcttgacctcatgatctgcccacctcggcctcccagagtgctgggattacaggcgtgagccaccgtgcccagcctattttattttatatatttattttatttttttagagagtctcactctgtcgcccaagctggagtgcagtggcgctatctcggctcactgcaagctccgcctctcggatttacgccattctcctgcctcagcctcccaagtagctgggactacaggcgcccgccaccacgcccggctaattttttgtattgttagtagagaccgggtttcactgtgttagtcaggatggtctcgatctcctgacctcgtgatccgcccgccttggcctcccatagtgctgggattacaggcgtgagccaccgcgcccagctaatttttgtatttttagtagagacggggtttcaccatgttagctaggctggtctcgaactcctgacctcaggtgatccacctgcctcggcctccgaaagtactgggattacaggcgtgagccaccgctcccagcctaccctaagaatttctattcacatttcatagctgaggtctctcagcttccttcaaggtggacaattctgtatctctaggtgacccaattttatcccctcgtctttcgtgcacccagtttatgctaaccaggaaccatcacattattgcattgtttgttcacctggaccttaaaaggaaggttcttagtcttatttatcttattattgagtctcctcaatgccctgctaaagtactggttacattagtttatttcattttaataggtttaaatgataaagatcctgtctaggttgctaatctgtgcaatcgcctgggagcttgcaatctcactacttcgagagaaaaaccttattttggctctaaagagggctcctgacttcgccacgctcaccttcagtggtgcttcaccgcactaccacttccctaaccaccgcccctatggctgtcacctagatcaaggacctatctaaggagaaagcccaaggacaggcaaagacaggccacgcactttcaacaggaactcggcccctttcctaaacgtagttcctctgattaccctgtccaacggacgtcgctatgatccaattaagttttgaggctcagagtgacgccctctaacctcacactgtccaataaaaaaaggagtttcagattagcaccagttttgaccaatggatgagaagatcagcgtgtattaacctgtagaagcagcacagagaatgatgagcagccagttcacccaatggacctgcctactgcagcgtaggcctcgcctcaacggcaggagagcaggcggctgcggttgctgcagccttcagtctccacccggactacgccatgttggggtttgtgggtcgggtggccgctgctccggcctccggggccttgcggagactcaccccttcagcgtcgctgcccccagctcagctcttactgcgggccgctccgacggcggtccatcctggtaagtgcttttctctaggagctaacgttccattttgccgccccatgaccttgagccggggaacgatggtagctcgggcctaagggatccgtggtgttaaaaggatgcctggagccgcgtcttgctctctaatggctggagaacaagaatgggacacccataggaggtttcttcgacccagctctgtcccattttgtataaagtcctttgtgtgacggaaaaggtgcgggcaggtgcgttgaccttccggttgaataggggtactgaactctcgaaaaatggggtcttgtgcatgcggatgggaaggctgtgcaggcgctttatcgatcgctgcgcggccttccctcttggacacgcgttccgtacaagcggaaagaggcctgacttcggctgagttttcctctccttgtgtgttaagtcctggcttccgatgacctttaactggcctgaccccagctccttccaatatcttttgtctgttagtcagggactatgcggcgcaaacatctccttcgccaaaagcaggcgccgccaccgggcgcatcgtggcggtcattggcgcagtggtggacgtccagtttgatgagggactaccaccaattctaaatgccctggaagtgcaaggcagggagaccagactggttttggaggtggcccagcatttgggtaagtagagtttgttaggaatagtaaagaccttgtgtagcccaaatatccccaaaaccaagctgtctgccttctatgatgattttatcaaaatgactttcgttcttctgagtttgctgaagccacatttaggtactgagaaggagtcttggtcgatttaggtcttgataccaatttatccttatgtataaccctgcgatgcctgtatctaacaggtgagagcacagtaaggactattgctatggatggtacagaaggcttggttagaggccagaaagtactggattctggtgcaccaatcaaaattcctgttggtcctgagactttgggcagaatcatgaatgtcattggagaacctattgatgaaagaggtcccatcaaaaccaaacagtaagttgctcttattgcatctatgcacaaaggaacttctgttatttgcagttttacacattaaggtgacatgttctcctaaagcagaatttttcttctgatacgttcgattattaaaatcacacagtgcagtttcacctgaagaaattaggatgcagaatttctgattgacaaaagcctactacttgaggtttttttttttgagagggagtttcgctctcgactcactgcaacctccacctcctgggttcaagtgattctcctgtctcagcctcctgagtagctgggattacaggtgcatgccatcatgcccggctaatttttgtatttttagtacagatggggtttcaccatgttggccaggctggtctcgaactcctgattttgggtgattccccccccacctcggccccccaaagtgctgggataacaggcatgagccactgcgcctggctagttgagtatttttaagactcggtcttatggcttaggtttaggagtctccaaaacttgtaggtttttgtatttgctattgctatgtgagggaatgctgttaggttaaggctcagtaaaatgaaaaatttatgacagttaaagtcagggaatgggattattgtttcctaagataataattttctttattgcagaaagttgggttagatcctagatgatagtttatctgatttatgtaagaaaggggaggtaagactgtggttcctcaggtaaagggatggacttgagagttgatagggagggatatataagattatcatttgctttcaacaaggtgaatagatactatcctctcttctacctttacagatttgctcccattcatgctgaggctccagagttcatggaaatgagtgttgagcaggaaattctggtgactggtatcaaggttgtcgatctgctagctccctatgccaagggtggcaaaattggtatgttattaaggggtacat

SEQ ID NO: 6168 - DNA, 6000 bp, Homo sapiens
gcactgccctagcaggtgttctccatgagggccctgcccctgcagcaaacttctgcctggacatccagatgttttcatgcatctctgaaatctaggcagaggttcccaaacctcaattcttgacttctgtgcacaagcaggcacaacaccacatggtagctgccaaagcttggggcttgcaccctctgaagccatagcccaagctgtaccttggccccttctagccatggctggagcagctagaacacaagacaccaagtccctaggctagacacagcagggggtcctgggcctgacccacaaaccatttttcctcctaggcctctgggcctgtgatgggaaaggctgctgcaaagttctctgacatggcctggagacattttccccattgtcttggagattaacatttggttcctcattacttatgcaaatttctgcagcaggcttgagtttctccccagaaaatgggtttttcctttctattgcatcatcaggctgtaaattttccaaactttcatgctctgcttcctttttaaaactgaatgctttcaacgtcacccaagtcacctcttgaatgctttgctgcttagatatttcttctaccagataccctagatcatcttcctcaagttcaaagttccacaaatctccagggcaggggcaaaatgccatcagtctctttgctaaaacataggaagagtcaccttcacttcagttcccaacaagtttctcatctccatctgagaccacctcagcctggatttcattgtccatatcattatcagcatttttgtcaaagccgttcaacaagtctttaggaagttccaaatttccccacattttcctgtcttccgagtcctccaaactgttccaacctctgtctgttgccaagttccaaagtctcttccacattttcaggtatttttacagcagcactacactgtaccagtacaaacttactgtattagtccattttcacactgctaataaagacaaactcgagactgggtaatttataaagaaaaagaggtttaatggactcacagttccacacggctggggagacctcacaatcagaaggagaacggtatgggggaaaccacctcaatgattcaattatctcccactaggtacctcccacaacatgtgggaattatgggagctacaattcaaaatgagatttgggtggggacagagcccaaccatatcagttgggcagccagccatctgttgttgggtgatttttaccaaagtgcatctttctctgtacaatcagaggcttccacctccagagaatgtgttatcttaatcctctggctggatgcttatgaggatagagtaaactggcaatgtgcagtgaatcttgggaggggtcatccttacaaataaagcactacagtttggtagagatggaagaacttcagatgcagtggatgctgtaaccgatggcttttatgatggtatttcatggtgatagtgtgagaacgccagacagagggaacaggtgacaatattgtctctgtccaaaagagtcatagtaaatgcaaatctgcttatcatgctattgagttaggtactaaactttgctatgccatccagttgtaaaacctagagccccaaagaagagaataataagatagaaaacaacacaactgatcttttggctaacactaagtctggaaattacccttccatttgagatgattgccagaaaaatcatcaatatatatcctatgaaaaactcctgaggggcagaggaatgggatcaatgcttcaaagactcagagaaagaaaatcactataaaaattatttgctcctagaatgtaaaaaatattttaagaaaactgcttggcattctaaaggtgaaaagactttagaatgagataaaagggagaagattacttttaaaaattcagcgacattaaaaatgtaatgacagaagtaaaatctacatcgggagtaggaatgtagactcctgtagcattactatgacagacaccagagtcaatgacatgaaagacaaacttaagatcttttcaggtatgtggtaaaagaaaaaaggattcaagtgaatgatatagaggactggggctgggcatggtggctcacgtctgtaatcccagcacttcgggaggccaagatgggcggatcacgaggtcaggagatagggaccatcctggccaacatggtgaaaccctgtctctactgaaaatacaaaaatcagccgggcgtggtggtgtgcacctgtagtctcagctactcaggaggctgaggcaggaggatcgcttgaacctgggaggtggaggttgtagtgagccaagcttacaccgctgcactccagcctgggcaacagagtgagactacatctcaaaaaaaaaaaaaaaaaaagaagaagaatatagaggactggatagatttatttaagaattatacatttctgaggaaggtactagaagaattagaacaacaataattaaagatatcactttaaaaaacaagacctgactattcaaattgaaaggactcaccattctagatgatagtaatgaaaagagggctattctagaaataccctggcaaaggtttgggaatgcaagtataaagaaaaaaatcacatctattagtattctgtcataaagcaagtaatttatgaggaaacaaaaatctagctgttctcagatagctctccagtaagaaatgccagaagacaacagaaaaaatacttaaaattttttgaagaaaaagactatgacctaagaattttctcagctgaattttttttctcatatgtgaagacaacaaatgaacaatcccatatattcaaaggctcaggaaatagagcattcatgtattcttcatgaaaatattatttggagacatacatcagacacccgaaagatgtgaaagaagaatagggtatggattacacatagttcatggcattatgtaaatgttataaagcaagatgacatagcttgggaaaacaaaagctgtgtctaatagcagtacttccaagccataacttacagtagcccaattctcaataaattggaaggcagctaaacaatcatacagtgctagtattttatagtgtcagggtctattcacatataatctcatttaacccattttaattccgtgagataaaaaccaatatccccatctaagatatgggaaactaagacgtagaagaaagcacttggctaagatatcatggctcgtaggtggcagtcaagaggtgagtttgcagtctacagatttaacctcagactattctgcttctaacatgactatagaaatgtattgatcattagctgcctgaagttctgttcttaactctaggtgtccaaaagaagatgaattttgtttagatagcattttcccatatctagggctgttggctttaaagaagttcccagaagtgaatccaattcccagaaggatcaaggtggattcttttgtgtgttactctaacaggttgctttatatatatatataagttatataatatacacatataatttatgtattatatataagtatgtataacatcatatgtaatatataaatatagtacatttcacactggtaggacgtaattccaaaccacatatttgtttaaccaattgaattacttggatttagtttctatttccctctttatttccttctgaaaatattatacaaataacatcagtttacaaaaaataaaatctgatatagcttttttatcatacactaggctagactaaatgcattctgtggattgtttacctaggaccagatggtatattataaagttgtatacaaatgaacaaggactgcctgaaatggattgatagctgagcacatttggctggagcgtctattttagaaggaaaacctgagaatcatattatttgagtgtgattcatgtgttaatagtatttcaagacaagccacttaaaatatgtcctgagtggtgatgctggaaatgatcttttcttcagtgttttcaagtgtcttcatttaagtgtacacattttgcctacctataacacgtatctacacattgtgattaagagagcaaactctgaaatcagacctagattaaagatcttaatctctgccagttgattgggcaagtgacttaatcattcgacagtaatttctgcatttgaaaatgcctatctcaagggtaatgagaattacactggttcaccaaaagaattacactgactaatataaaacgtgccaagcatgtatgtgtcacatgaaggctcattaaaaagcggatattattgttaatcttccaataactactatttccaacaacaggctgaaggggctcagaaacgtttgttgagtaaaaacacaaggaaacagtagcacagatttcctgctctcctttacgatcgatgacctgtctaaggactgtgatctctgttcactacagattgtcacctgcattaatctactgtcacccattaacctatcaaataaggcagtctaaaaactccaggcgtccctttccgtaaggacccggactgttgaactggaaagctaaaattcaaggcgtgacaattgccctttgtcccacattcctccaccggtcgcctgcttatttaaatggtgcgtcccctcgggtaccacttgaacaaaacctgcccagagcgctccctgtgtagattcgctggaagcagctggaggctccagttctcatctgctcaggtgtccccggcgccttggcgaactcggccactccagttcctcacgtggtgagcactcagggcagcgggtcgattttccgaggtcccatacctgggtttgaggggcgcggctcgcagcggcgggtgcaggggcgactgccagccctcaccccgcctcggggtgcgttcggaggccgacacctggaggacgcctccagtccccgcgggacgccacgcctgcgcgccagggatccgggataagaagtgcgcgccgggctccggctgcgcgccgcggggccaccagtttgcgcgcagggctcaggcgaccgtgcggccatggacacgccacggggcatcggcaccttcgtggtgtgggactacgtggtgttcgcgggcatgctggtcatctcggccgccatcggcatctactacgccttcgctgggggcggccagcagacctccaaggacttcctgatgggcggccgcagaatgaccgcagtgcccgtggcgctgtccctcaccgctagcttcatgtcagccgtcactgtcctgggcaccccctccgaggtctaccgttttggggccatttttagcatctttgccttcacctacttctttgtggtggtcatcagcgcggaggtcttcctcccggtgttctacaaactgggaattaccagcacctacgaggtaaggggcagggtgggctgggaccatgcagggcgcgggggaaggggactctgcagacctctggaggcgttttcttgggggcagactgtcactgccacatcgaaatctctccccgtccatcgtcatcatcaccctcccttcactcctccccgtcccccgatcttcacctggcatctttcccttctactgagaggcgtcctctaagggtgaaaaaattcttgggatttactctcctgggcttagtgaaaaaaagaggcttccaaagtgaacggattgcaacagtagtgctcgctatggtcctttctacctttagcatctttgattcccaggcaaggggaaagatttttggggaaggtaagttcttcaggtctcaggccctgcttcttgaaaggaatactcttgttccaggtcctcagccccattcactcttccaagatagttggtaaagaatttgtactccccttccttccccttccacacccaccccctttccactgaaacaggcacccaagtggctaaggtgtaccagtacctgtatttcggaccagattctaccacttactagctgggtgaccttgggtgacttacccaaccttttgtgcctattcctcaaaaataaaataa

SEQ ID NO: 6169 - DNA, 6000 bp, Homo sapiens
tttattttgatttctttttcatctctgctttttttttaagcaacccacattgtctagaatttaaaaaacatcctcaacattatttgccctatattactttttcaagggcattatactaaacagactctgctcacaaaatgtatgagaggaacaaattattgaatggattggataggataacattgacattagtcaatagtaaacaaaaataataatatcatgtatatatagggctaattttgtgccaggcattgttctcaatgcttctttcttatattagtctacttaattctcaaaacaatcctaggatataatccccattgttagtagtagtatcccttttatggatgaggaaactgatgtaaagagattaaataacttgcccaatgacagctagtgagtggcaaacacaagattcccagcctggctccagtggcaatatgcaatattctctttttttttgagatggagttacactcttgttgcccaggctggagcgcaatggtgcaatctcagctcaccgcaacctccgcctcctgggttcaagtgattcttttgtcccagcctcccaaataggtgggattacaggccaccacacccagctaattttgtattttcagtagaaaccgagtttctccatgttggtcaggctggtcttgaacttccaacctcaggtgatctgcccgccttggcctccctaagtgctgggattataggagtgagccaccgcgcccggactaatttttttgtatttttagtagaggccgggtttcatcttgttggccagcctggtctcaggtgatctacaggccttggcctcccaaagtgcagggattacaggtgtaagccaccacacccagccaaaatcctatgttttgatgcagtccactgaaattagttttgatcccactccaccatggaatgatttcctagttgccaaacccaaacccagaggatttttttcagccctaatttttttttcttcttttttatttttctttttttgttgagacagggtctcacaacgtcagccagcatggagtacaatggtgcaatcttagctctctgcaacctctacctcctgggctcaagccatattcccatctcagcttccccagtagctgggactactggcacatgccacacctggctaattgtgtgtctgtgtgtgtgtgtgtgtgtgtgtttatttttttacatattttttagagacaaggtttcaccacgttgcccaggctggtattgaactcctgggctcaagttatccacccacctcggcttcccaaagtgttgggattactgggctggccgtgcccagcccagccctttttacttattttattatttatttatttatttattttttattattatttttgagacggagtctcgctctgtcaccaggctggagtgcagtggcacgatctcagctcattgaaacctccgccttccaggttcacgccattctcctgcctcagcctcctgagtagctgggactacaggcgcccgccaccacgcccagctaatttttgtatttttagtagagacggggtttcaccatgttggccaggatggtctagatcgcttgacctcatgatctgcccacctcggcctcccagagtgctgggattacaggcgtgagccaccgtgcccagcctattttattttatatatttattttatttttttagagagtctcactctgtcgcccaagctggagtgcagtggcgctatctcggctcactgcaagctccgcctctcggatttacgccattctcctgcctcagcctcccaagtagctgggactacaggcgcccgccaccacgcccggctaattttttgtattgttagtagagaccgggtttcactgtgttagtcaggatggtctcgatctcctgacctcgtgatccgcccgccttggcctcccatagtgctgggattacaggcgtgagccaccgcgcccagctaatttttgtatttttagtagagacggggtttcaccatgttagctaggctggtctcgaactcctgacctcaggtgatccacctgcctcggcctccgaaagtactgggattacaggcgtgagccaccgctcccagcctaccctaagaatttctattcacatttcatagctgaggtctctcagcttccttcaaggtggacaattctgtatctctaggtgacccaattttatcccctcgtctttcgtgcacccagtttatgctaaccaggaaccatcacattattgcattgtttgttcacctggaccttaaaaggaaggttcttagtcttatttatcttattattgagtctcctcaatgccctgctaaagtactggttacattagtttatttcattttaataggtttaaatgataaagatcctgtctaggttgctaatctgtgcaatcgcctgggagcttgcaatctcactacttcgagagaaaaaccttattttggctctaaagagggctcctgacttcgccacgctcaccttcagtggtgcttcaccgcactaccacttccctaaccaccgcccctatggctgtcacctagatcaaggacctatctaaggagaaagcccaaggacaggcaaagacaggccacgcactttcaacaggaactcggcccctttcctaaacgtagttcctctgattaccctgtccaacggacgtcgctatgatccaattaagttttgaggctcagagtgacgccctctaacctcacactgtccaataaaaaaaggagtttcagattagcaccagttttgaccaatggatgagaagatcagcgtgtattaacctgtagaagcagcacagagaatgatgagcagccagttcacccaatggacctgcctactgcagcgtaggcctcgcctcaacggcaggagagcaggcggctgcggttgctgcagccttcagtctccacccggactacgccatgttggggtttgtgggtcgggtggccgctgctccggcctccggggccttgcggagactcaccccttcagcgtcgctgcccccagctcagctcttactgcgggccgctccgacggcggtccatcctggtaagtgcttttctctaggagctaacgttccattttgccgccccatgaccttgagccggggaacgatggtagctcgggcctaagggatccgtggtgttaaaaggatgcctggagccgcgtcttgctctctaatggctggagaacaagaatgggacacccataggaggtttcttcgacccagctctgtcccattttgtataaagtcctttgtgtgacggaaaaggtgcgggcaggtgcgttgaccttccggttgaataggggtactgaactctcgaaaaatggggtcttgtgcatgcggatgggaaggctgtgcaggcgctttatcgatcgctgcgcggccttccctcttggacacgcgttccgtacaagcggaaagaggcctgacttcggctgagttttcctctccttgtgtgttaagtcctggcttccgatgacctttaactggcctgaccccagctccttccaatatcttttgtctgttagtcagggactatgcggcgcaaacatctccttcgccaaaagcaggcgccgccaccgggcgcatcgtggcggtcattggcgcagtggtggacgtccagtttgatgagggactaccaccaattctaaatgccctggaagtgcaaggcagggagaccagactggttttggaggtggcccagcatttgggtaagtagagtttgttaggaatagtaaagaccttgtgtagcccaaatatccccaaaaccaagctgtctgccttctatgatgattttatcaaaatgactttcgttcttctgagtttgctgaagccacatttaggtactgagaaggagtcttggtcgatttaggtcttgataccaatttatccttatgtataaccctgcgatgcctgtatctaacaggtgagagcacagtaaggactattgctatggatggtacagaaggcttggttagaggccagaaagtactggattctggtgcaccaatcaaaattcctgttggtcctgagactttgggcagaatcatgaatgtcattggagaacctattgatgaaagaggtcccatcaaaaccaaacagtaagttgctcttattgcatctatgcacaaaggaacttctgttatttgcagttttacacattaaggtgacatgttctcctaaagcagaatttttcttctgatacgttcgattattaaaatcacacagtgcagtttcacctgaagaaattaggatgcagaatttctgattgacaaaagcctactacttgaggtttttttttttgagagggagtttcgctctcgactcactgcaacctccacctcctgggttcaagtgattctcctgtctcagcctcctgagtagctgggattacaggtgcatgccatcatgcccggctaatttttgtatttttagtacagatggggtttcaccatgttggccaggctggtctcgaactcctgattttgggtgattccccccccacctcggccccccaaagtgctgggataacaggcatgagccactgcgcctggctagttgagtatttttaagactcggtcttatggcttaggtttaggagtctccaaaacttgtaggtttttgtatttgctattgctatgtgagggaatgctgttaggttaaggctcagtaaaatgaaaaatttatgacagttaaagtcagggaatgggattattgtttcctaagataataattttctttattgcagaaagttgggttagatcctagatgatagtttatctgatttatgtaagaaaggggaggtaagactgtggttcctcaggtaaagggatggacttgagagttgatagggagggatatataagattatcatttgctttcaacaaggtgaatagatactatcctctcttctacctttacagatttgctcccattcatgctgaggctccagagttcatggaaatgagtgttgagcaggaaattctggtgactggtatcaaggttgtcgatctgctagctccctatgccaagggtggcaaaattggtatgttattaaggggtacatattttccaaacctaatatgggaggaaaaactcatacaatgttatgagtggatattgacatctattcctcactgatgagtacgttctgactttcgttcttctgagtttgctgaagccagatgcaatttctgagaaggaataggatggaaggaagcaattactttttttgaagtttgcttatttaggaaagcagaactcttaaatattctttcttttcaacctcttatagggctttttggtggtgctggagttggcaagactgtactgatcatggagttaatcaacaatgtcgccaaagcccatggtggttactctgtgtttgctggtgttggtgagaggacccgtgaaggcaatgatttataccatgaaatgattgaatctggtgttatcaacttaaaagatgccacctctaaggtaagcattgagctaattgatgtccacgtggtagttacgccaggaaactattgccaactgaagccatgttctatattttctatttaatttttttttctttttaagaaaatgttaatattttcattttcgtgtcccagggcctacaaaggaaacctgttagtgttttcccccccaacttccaatacacaaatggacattttctttcctctttgatactgacattaaataacatttccaggttttctttttggtagatagtcccatcatttgaaagctaattttgggagggctggattggacgtggtacatatgtttcagttaagcctattttgtacttttcacttaacttgaataggtttttatttcctttctactatagttttgccttactaatataagaagctgtcttttttttttgaactgcatctctaatagggaaaagaaacttgcacacaaaaacgctgacaccttctgagaaaggatctgtggtcgtttctcc

SEQ ID NO: 6170 - DNA, 6000 bp, Homo sapiens
accagcctgggtgacacagtgggactctggtctcaaaaaaaaaccaaaacaaaaaaaaaaaatgataagctatataagcacctggcataaattcaataaatacatactatcctaaacacacccccttgcccattcttctcacaaagaataggccctacctaacttcttcccagtgagtacttcaagcaacatccacagcaaaatatttgtagcatacaggcctaaggtacattattgtctctttaaaattatgaactcatcacacatacaaatggctctttaaaacagtccagtaaactgctacactatgccttaaattgctgtctattatgtacttaaaaatatttactagcaattggaggttaatatggcaactattaccgggtggcaattattgctattaaaaatatataaatactgtaacaccatgtgctactaacaacaaaatgctaaaccgaaaacatacattaacaaattgtaaatattttcattacagaaaatgatagccaggcgtagtggctcatgcctgtaatcccagcactttgggaggctgaggcaggtggatcacctgaggtcgggagtttgagaccagcctgaccaatatggagaaaccccgtctctactaaaaatacaaaattagccgggcgtggtggcacatgcctgtaatcccaggtattccggaggctgagggaggagaatcgctagaacctgggaggcagaggttgcagtgaactgagatggcacctttgcactccagcctgagcaacaaggcgaaactccgtctcaaaaaaataaaaaataaaaagaaagaaaatgaaccatcatggaaaaaaatgctttaaacataaattataaaatcacaatgaactggtacaaaaaaataccttgtgtattttggcactttgaaaattagagaaatcattcccttttcctaatttccattttatagtccaccctattttgttctagcgcaaaaaaaaaaaaaattcagactttctacatttacaactaccttcccattctgcaaaaaaatcccttaagacaaaaagaaagtaggtcaacaatagattaccttaaaagcttcaaatatagaactaatggtcttcaataggaattatgtactaatgggtgtactagtgtctcaattcagcaagaatttgagattatcacccaattatccatagtcaggaagattctaagcaaataaaacatgaaagtggagcatacatatctaagaactagagatcactccctcatatcaaagagcacatatttaaatctagttaaagggcacaaaatcactttctccatattaactcaatagagaaaaataaatgtctacttaacatccagaaattatgtcttctcacaagaatgagttcacataccatagggtgcactgttacacttttcaaaaaggcagatttaacacacttttaactgaatgattaactgagtgaatatataaaaagtcacccagaaatgtgatggacagcataagaaaatagttttgagtcagaaaggcacaggcaggcatgcacttaatgcagcagctacaaatctcacagcagttagaataagaaacttatacaatgacccatatcatatatacacaatggcatttttcacacgttaggaaaagggaatggatgctgaaaaattaatttaagaaatttgattccgtgcagtaaaaaatcagaaaataagtaaaagactagcagaaatcttaaagtgtctgattgattgcacaatcaacttttggtaagccataatgaacacctcaaggtaatggaaactgggtgggtattaccacggtacagaacttaatctcttatttcaatctaactaatgagagtatctaggtaaattctttataaatacttttctctgcaaaaaaaaacaaaacaaaaaaaaaaaaaaccctgcaggccaaaagaaaaaaatgcatgctattattaaaccataaagcgttcttataaaaaaacatgattttgaacaagtgattacatctccttcagaaataactatgatatacaatgtactttgggcaacatatttttaatattccaggttgctactgctgtatagcattttcaaaaaaaaaaaatctcaatttggaatcagaaaaatgtacaagtcagcagtttaattaatttacatttcttcaatagcaccttatccacactccacgtacaagagaatgaagacattctacgttcctttaaaaaaaaaaatcaactaagcatttctatggttctctagttcaaagttgctacttaaaaaataattctttttaaaaaagcatattcaaaaatcaatcccttggtttaaagaggtttaggggagaaatatctcaaacacaaacctttagtcattcaaaatcaaagtacagaatcctctcctacaaaattgcttctccaaaagaatctcaagcattttatctctgtaacgttatcatccttacttaagctttaaaaaaaaaaaaaaaagataaaagaaatgatataccctaaagactggctatacatatactttcatttgtctacagaatccgtatatacacagccattaccagtcagcataatatatgataatttgggagatcgctctacttggttattttaattacctgtaagtgtcaatgtggtcaccagtaaccacacaaaaaccattttaaataccccttgatcaatatgtttgctaatctatggaagtccctgaacctgactgatactaaatgataagactgaggagggaaaaagttgaggcaaaagggggttttactcccacataccaaaaaatcaagggaaaattatcacaatactaagagaaagaattccaacttataaatgaattttaagattaaatatctggattaaaatatttcatttaaaaaaatttacctgattttactagagtgggagcaatgatactatgtctttgtaggtaaaaatcacgtgttgattttttggtctgcattgtaacacatttaataaagtaacactttcatttgaaaagttggcgagaatttgcatttctccattagtctcatagcaaaaaggcatctatgccacccataattaaatgtaactaattacaatttgaacactaaattatttatccagtgtaaacaaggattaagagggaaataatgcttctatctacagcgggggttacagaaaataatttccaaaatgcatgctctccaaaagggactcacctcccccccaaaaaaaacagggtacacaacttaaaacaagttgggtgtttttaaggctaaattaaataaaccgttcagccaattttccaattatattctacgcttgaaacgtaattgccttacatctgtttacaaatctttgctcaatatttaaacaaattcgtactctcctgggcacatagctatacatacagtaactcatgcacaaagcacatatttaaagaccacgcactgcaattattagcctaaacgccaggtttaacaacgtgaatgttttcagaggtaggtaatacgacccaataaaaagcaaagatggcatttaccaccaaatgtcactgacaccgccaggaaaagagttgctggagccctatacatttttaatttcgatgaatctagacaccgtcggcgggtgccaggcttccacgagaacaattgacaccctaactgcttcaagattaaggcaggcgattcaaatccgaaggaaaagttgtcaattatcagaaagagagagcgcgagagaggcgaaggcagataaaagcgatgttatcaaaccgaccagcttgttgcttttgtgtgtgtgtgtgtgtgtgtgtgtgtgtgtgtgtgtgtgtgtgcggattcgttgttaggatagagaaaaacagtttttaaaagacacaggaggagagaaagaagaaaaagctttctccaccttccgtcggctcggtgcaatggctttacggctctccagcatagtaagccccgagaggcaggcggctgtcgatgtttacaatcgcgggagcttcgggtgcaagagtcctttcctgacacaatcgcattcaatcaactattttagggcgaaattgcaggtgtcattatggaatttaaaaaaattcaaaaggcaggcgggcgggcaggcagctgatccaacaacgggggaagaggttgccgatcggaggcgcggcagcacaaggcaaagccttccacatttacggggggaaaaaaaggggggaaaggggaggagaaggggagtgcgattgcaacagagggtgggcgttcgaagtgcgacccagaatccgcagctccgagacttccacatgcaaattccacgccgagcgccgcgctcacaaatgatttttaaagagccaaataaacactggatgggatccaaggcgagagagagacgatccaaaagggggagaatcggcgagaggcgaacggcggggagacgcgagggaggggcgaagtcccggcggcgggaggagaaagttggtcggcggcggaggtcggggacccccccccttccccggcacagccccctccccgcagcccggctactcaccagcgaaaagaggttggagtgacaatcctccaggctcgccccgttcgccacccagttcgctgccgcagtcatgatcctccgcgagcccggccgccagagcggggcatgtcggagcgaggcgtccgaggcgaggccgggccgggcggcggcgcctcgccggggagcgcggggcggccgggccgccgccgccgccgggggagggcgcgagggccggcgggcaggcgggaggcgccgcggcgacgccgcgccgggggcagcgggcccgggctggcggggggggcgcgcgccccgggccggcgctgcgggccggccaccgcctccgccttccctgctcctcagccgccgccgccgccgctgctgccgctgccgccgccttgtttatctccagccaccgactccccctcggcccccgccggcgcgcgaggggaggcgagccccggagccgccgccgccgcctcggagccgccgccgccgcggagcgcgaactcgcgaaggggggggtgcggacgaagccagcgggcgaccccggcagccgagcgacgtcccctccttcctcttcctcccccacccccccctcctccccagtcagcctcgcttctcctccctccccgggctcgcttgctctgacagcaatggcggccgccgaccgcggctcggcccgccattggctggcgcttggtcacgtgacgggcgccggccgcgcggggggagcgaggggcgggcgggggaggggtccggagtggcggcggcggcggcggctcgcgggaggcgctgctgagctgagcgcggccgggtcctccggccgggaagagggagggagggaggcagagagggagagaaagaagtgcgggcggccgggctccccggcgggcggcggactgccggcccgtggctgccgtgggctgcccctcgtggccgccccgccccctcgcggtgcactgatcgtggcggggcgggaccgtgggtcccgggcgcgcccgtggtggccgcggaggagggcgcgggacccccggcctgtgccctcgcagcccaggccggctggcgtggcgcggcggccgcgatgtgggccaggcagcgggtccgagtgccctggggaatgtgtcctcagaggctcgcgccgccgtccgccttttgcagaggagaaaactaaagcacaaagggattaaatcacttgcccgaggtcgcacacttgggaagaggagtccagattcgaacccgcgcacagtgaagccaagctcttggacaaggtttcacaggcttcgcccagggatattcacggctgccatagacggagcgcttactgtgttccagacactgtgcgtttaatacagaaatgtttattgagcccttactcctagttactgtgtgcactcattcattcattcattcattcattacataaatgtttcctgagctcctgctgtgtgccagaatctgttataacttccaggcactgtgc

SEQ ID NO: 6171 - DNA, 6000 bp, Homo sapiens
ttttgtgaatgtcagagtcagccatccagaacatgccctagctttccaggtggcctctttgtaacaatgtttctttctatttatcaggtgagctggtcacctccttagacgtggcagcaggaagcaagcagtccttaccacagcgatatttgctcaagttactcagaggagggctcaattacaagtttctttggaaagtgataactgtcaccactcttaccacgggcacaggtgtgtggagctagacatcatattggggagggggcaggttaatttcacactactgttgggggaaatggggctgagaggctgtttggccaaatgaccgtcctttcttcctcataagcactttctctccatcaaacacagcactcatctcaagtcctctgtactcatactgtgaacagaagagcaaattatcttctccaaagccctcctcccacccctgacccttttgatcacagaatgtgggaggtttttatttttccccgtaattacaccttcaagacacttcagcttttctccaagactcaagctgcaatactgtggcttattttcccaggaagatacgctgaaaattatttctgtagctagtctgtcaagttcccccaacatatcaaggttcattttatgtttgcataatttttttttttttgagatggagtctcattctgttgcccatactggagtgcagtggcgggatctcggctcactgcaacctccgactcctgggttcaagcgattctcatccctcagcctcccgggtagctgggattacaggcgcccgccaccacgtccggctaatttttgtatttttttagtagagacagtgtttcgccatgttggccaggctagtcttgaactcctgacctcaagtgatctgtctgcctcggcctcccaaagtactaggattacaggtgtgagccaatgcatccagcctgtttgcatgatattttaagcttaaattacccaaacatggattttctattgaaaaactcaacccaactttgctcaccactgtatacctagagcagcgcttggcatgtggtaggcacttggttaatatttgttgacttattccaagaaaaagtcaccaaaaatcaaaataatatgccaccaaacaggaggttcaacagttcacaggtttttcactggagaccctgtaggcccttccaggtggggcaggggtgtgcaacggtttatccctaggagtgcagaagtggagggagggttccaggtggagatgaggtgggattctctaatcacctagaagccttggtgacaacgagactgggcttgagggggagagttgggggaaaggacagagaagggacagggaagtgatgagaagggtggaagacaggaggggtattcccgaaggcctcttgggccagtcttcaaattgggaagggggcttaatgggagagactagaattgaatttttccttttctcctcatcccccagtctgctcttggctgcagaactttcacccggggccactggctactcaatgtaccatcccctgggctcagggtctgtgcccagcctcctctgctagccagcctgcccaatttccccattgctgccagaagcattgaagtccgtgaaacaagccagcccctgtcccactctcagacaggtcgtttttaatcctgtctcaatttcaggttcaccccacacccgctcccaagtcctgctgattcattccctgcctccgggttcctcactgtcctttctgctttcaaaaccttcatttgaaattgggcctttatcaactagcatctggaggatcagcaggagctgcctgccagcctcctttgcctcgggcccctctctctctttcacaatcaggacagccgtattcatattccttgagcactgtttgactgtggcagaaacacagaggggctggccgggttgcttcctgtttgctgctcaccctcaagcccaaccagatgcttggcactcactggctatcttttcttcctcaaagcctttcccttatattcttgctaagcaagccatatttcttttctttcaaattcttaccagagactcccctctttcaagaaggcttcctagactaaggtgcatcttgctgcctcagtttctaggtgttatttgttcccaagtttctctactacccgtgctttccttacgtgggatttccccactaactatcatggagaagggagaaccaacaggcctagacggtagaccacctagatcctatttccttctccttcccaatccttgagtcttggtccccaaacttctgtctccagaatgttcttcctgaccaatctacctggccttccaatccctgtcgcatctctctgccttgagatgtatggcaatgctattttgctagtctgttcttcattctctattacgtgcagagttgaggactgggttgctttcttccttcaaatctctacctaggccttaggaccaagttgttcagggtacgagagaataagctgaccccacagggctgtcaggtgccacaaaagtcttctaacagtccttctcctccctggagtgagctcacccttgttcaccacacaggccttttacacagcacaattacaacattgagctcgacacagagacaggcactgccctgcacttaacctcctgcttattcaaatcctcactctcgttcctatcaaatgagaatgaacatttgggctttcccagaaaggggcagaggactgtgtaaagagctgagttcacccaagctacggcatggacacacccaacctggtcttcagcatcccttccagggctgagatgtcggaacacatccgtgggagccagaaaatgttaagaagaataccatcaccattttaaatattactgcttaccatatcaaatcaagttacagttatcttctctgttttacacagaaggaaactgaagcacagggaggtcaagtaacttgaccaaggtcacacagctagaaatgtggcagaggcagaatttgcattcaggcctatgtatctccaaagcccactctcttaactatgacatcacattgtcttgcatttgactggtgcttggagctttgccaaaacacttcatatacaccttctcatttgctccccacccagggagtgtttatgtgttttggctaagattatatatcgaagttagtgacagggctgagtcagctgcctgccttcatgatactcactgcctccctgcactgagaggccctcagccctagggttagctgcccctcctggtcctgaggtctgttcgaggcaatggttgcatggactaagttcatgctcatatttcctgtccccacttcttccagctgaacttgggcaaatatgtttctgacctcacagggcacctgacacacatcagggcctccccttctctgccctgagttcttccatgctgctacaggtaggagtcagctgttccacccactgtaggactgtgggcagcattactgaggtgaggtcatcttgagcagcccagtctcctgcacacttccctctttcttttgagggtcttgtcctgttctctgccctggtgcccctggaagcaactttctctgattacctctgggttcctaaagtgcatggcaccattaaggaactggagctagggaaatgcctgcaatgctactggctcctgctaggcaattggaatcaaagcatatttctttctttctttctttctttttttttttttttttttttttgagacagagttttgctcttattgcccaggctggaatgcaatggtgcgatctcagctcactgcaacctctgcttcccaggttcaaacaattctcctgcctcagcctcccaagtagctggaattacaggcgcctgccaccatgcccggctaactttttgtattttttgtggagatggggttttgccatgttggccaggctggtctcgaactcctgatctcaggtgatgcaccagcctcagcctcccaaagtgctgggattacaggcatgagccaccacatgtggccggaaccaaagcatatttcaaacccctcacctgacctggttttcatcatcacatgaatttccctgtctcatccttcttaacctttcctttgatgggaagggagacagctcatctgtctggagcggagaatagggcctgtgtggtgcacacacatctctggtagaaggcgcaaaagtcctcgaggctctttggtgtgtccagaactatgaacctcacccagtgcctgtaaattgtgtgtgtgggcctgggggcgagctcagagcacagagttaacatcctttctgagagtgctgcaatgggttgtcggctgctagaaggggtctgctgtaagctttgtgggcaaactgaccaccctccacccccatacacagaagagccccatcctaccctctgcagacgtctgggtctgcgatgattggccctggatgcaagtaaaagctgtttctcctttttgtcagcctgggaatctgaacaactgaggaaatagggaagtcggtgacagtcacagtcatgaacacccagcagattccatttccccacagcaggaggcagatcccttcccacccccaaaagcccccaggctctggagggaattcaaccaagcagggctcagaccgacctccaccagcgaggcttctccttgctgtccccttctgctcaggcgcaacgtggcagggcaggaggaaacctctctgcaagagttgccgtaccagagcacatggggtggcccgatctggggagacggggcacagaaggaatgcagggcatgggtgggtgaggggaagagggtgtggagccctggctctggcttgtccccctctcacccctccaagttccagaggtctgggctcctcattcatctcgtaagcgccaaggtggaggggggtcctaccgagggaggagctacaggccaccgcgaccagcagagagcgaaggcaggagggaccagcctggcccagccccttcattttactgtcgggggtagtgaggaggaagaggaagaggcgaaggctggcggaggaggaggtgagagcgaggactcggcagaagcgagatccgccgaagggaagtccgagcagtcggggagctcaggggggccctcccggggagagggtcgcgggctccttctgccgcttacctgtcgcgccgaggcaaagccgcagccgcgccgcggggtggctcccgggtttccccaccggacggccgggagggtgggaccggggcgggacctcccccagctgcactaacgcgcccgccccgcccctccctggccaggtgcagcgggtcccgccgtgtcctcagcctgctgcgggcccgggaactcccggcggaccggcagaggggcgccccggcttctctgcgtctcagcccgccccgggggtgcggtctttgcggccaggctttcagcgcggaaaaagattggagggtcctagtcaccccaaagaggacaggcattagcagagccgcgggcggcgggtgcatggaaccggaatgtgctgcgcgccagcctggagcgctcggagcccggaggcctgccccggagggggaaacgcggcggggcggccatgggccccggggtcctgccccaggtttgcttctcatttgtgctccatccaacaagagctcgtattccgtgtgccatgaactgtgtcaagggctccaagtgccaggtatcaggtgaatcccagccccagcaaactttaaacctactatgattattccgaatgtaccggggaggcagctgctcacacagcagagggtgtttctcaaagtgggatcccccaccagcagcgccagtcagaatcacctgagaacttattagaaattttggccgggcgcggtggttcatgcctgtaatcccagtactttgggaggccgaggcgggcggatcacaaggttaggaattcgagaccagcctggccaacatggtgaaaccccgtctctactaaaaatacaagaaattagctgggcgtagtggcgggcgtctgtaatcccagc

SEQ ID NO: 6172 - DNA, 6000 bp, Homo sapiens
gcactattcttgctggtctcttcaaggtgcacacagaagaagcggctgaatgacatggcaaaagtctccatgtatctatggaagtggggaaaggaggccccaaaccaaccttttcatcaggcccctggcaagcacctccccataccacaccaaaagcagaattagtagcgttgaatacagtgcctgagggggtcaatacatgctgattatacacaactacctgggaagtctgagaatagttatataaaggatgctagaagagtgcttaccctagtttctgtagccatggtgatccatgtattggatatatgcctaatcgtccaggctgtctcaacctcggtacattgacattttgagctagataatttttggttggggatggggtggggaacgctattttgtgcatcgtctgaggtttagcatcatctctggcctccacccactagatgccagtggtgttcctccccctagcaaaaatgtctccagatatttccaagtgtcccaatgtccccagggaagaggagccaaaaatcacccctagttgaaagccacttatctagtctgtatattcatgacatggaccagaattagaatgattatactctcctctctttttcctgaatcagtatttcttcatctacttattgaagtattatattctcttaatctgcttttattcagttttctctgttctcatacacctgagggttggggggagcctttcaaggtattgccacataagttaagaagagctaaaaagagacctgtttctcccttaggagaaaggaatattaaagagaaaacattccacatagaaattggatcagtagctaatgaggctgttttgcagaatgagtttaagatggcctaagctgaaattcatgtgtctgtgagcccagaagaacctttgtatgttaaaagaaactactttcatttgtttgctactgtcatacaaaagtatccttctgtcaaacagatttttttttctttcttggctttgtttttatttacttcctatttatattaacactatcaggaagatacccgtgtgggctccaggaacagactgtctcagtaactcttcccccttcagaagcacagtaagtagtcccgagaactgaagcaatgaggagcctctagagtgatgatttgtgtctgctcttttttatatgtgaaaaatttgaatcttagaatactgacttaaacccagccagtgggcaatctgcttgaaaatgactacacattcatatgtaagggtaagaaataatttatgacaaataaatctcatgaaaaattctaatttcattcatgttgctacaagtatagcttcatgctttaaaaaaaaatgcgggctggtaacatttttctatcttacttacagtgtagagttaaacaggtgcccttacctctcctccagtgcatggaaaaggactggagtatttagaagtacaaatagcgcccttcttgacaacatcatcttccaggccaaatgtagcggagcagttagtcgcaaagtacttataaggcttccatgttttcccaaagtcctgggagcggtccagcaccatggcagccggcctgggggacttgaacatcacaattaggtgagtgaagtagaattcagcttccaggtctaactggatcttttctctgtgcacatcctccgcagactgccaccatgtgcgaggaaaccggaaggatgagtctgccatggcagatggcaggtgagccaggtgaggataggcagcattgcacttgtcacatttgggctgccgacaagtcagatccgtgttctcactgtagaagcagtacagttcggtagcattctgaccgcaggtggtgtctgcccagagttttcgccccaaagccaaatttcccatccgagggttgcaggctttttcacagcgggaactcactccagctactccactcagtcctaagaaagggaaagcatgcatgatgcaagacaaacccatctggaaagctcttttggccacctagtccatcaacaacagtcaaggatctccccaaaagcgcttgagactttcgataaatggcaaattctaccatgctccaccatgttcctgtttgagcatgaacactgttctgcattcacaatgcattcgtgtatgcgtgtgtgtgtgcgtgtgtgtgtgtatttgcttttcatgttcagatgtaaaattcacatcacagaaacaaacactttaggcagagggcaagaggagggaaaatagaaccaccagggtgaagattattggcctaaaacttttcaagtactttgccttataaatgttttctgtatttcaaatacattgatgtgtttttgaagtcatgactattgaaaaaccataatgtttttaagaccacctaagttagtctttcaaatttaatgtgagtccttcacatgatttaacatgtttattatgagaatgtatttagaaggaaatgtggaattctattttctttatatttttaagccagggaagggataaattccctaggaaaagcaatatgagatatttaataaatatacaatgggtcctcatttagagggaggcaaagctagagacctttggagttcagatgtgcactatcagtttctaacattacataaacataactaagaaaaaaactctctgaactgccaaatggcagaaaagcttattttacatgctgtctcttcagggtttctacctgtgacaggttatagagtagttaactgtttgcttaacaggagagtgtctacagtctggcagccactaacagcacctttaaatattatctgtgaactacaagaccttctttaaaaaacacacttttcctcccaaaggtccaacagactttaatgttttaaaatgacttaaaatgataaacattatccacttattaacattctgagtacatactataatcctttgatttgcgtttgtcattttaattgtgaataccttaagcaaaaatcatctattttaaaggttaaaacagagggggaaagagggaaaaggaaatcaacccttaaattctggctaattgaatgtttctgctgcttaagaagcagtacctctgaactgttgtcatagtaaggattggaggaggccaaatgacagcttaggctgcaacagagacatttcacacactgacaatggccaaccccacgaagccttgcaactaaagggcttccttaggcattattttttaaatgtcaaattaaagtgtgcattatgcctgggttctgtttgccacttttctcattagctggggcaacagttgcttgtggccagaagcacacaaacacacaatgtgctatgactcacctgtaaaaaatttcaaggaaaatcatatactgcctgtacaagtatttttgacttgaaacacttgccttgtgatgtttatttacaacctttcaatggcttgcatgtttttgccataatatggtttgagaaggaaaaggttttttttaaagctcatattttaagagtgcaagaattaaagtaaaatcttaggcctttaataggtccctgggaaaaatatccaataattttaaatgcccctaaactcctaagtccagaaaagatttgagccagataaagaatccatggggcaaaatacttggagtcactcaagggactattcaatgatactaaggatgctcctgtgacttggactggtttgggatgcagactggaaagcctggattttgctgggtgccagcggccctcagggaagagtggaagcccaagggaggagatgcgtgctacaatgttctgtagccaccagcgcatccctctagcccaggcgcccctttctgaagcagtcaagatccgcacgagagactggatgtctgcagactccctcacatctctccccctcacctacagggctgcgcttacgcctaactggaaaccaggtgacccgcaagagggagggagaggagcagaaggggctcccgaatacagaaaccacgagccaggagccggtggcctagggcagcccaagaaagccaggatgggagtgggagggagagggcatctgccgacgccgacgccggttgtccagttaccgagccagggagcagacccgcctccgacctcccgcagagtctctgccagggtaccaattccccaggggcggccagccagctcaatgcaagcccggggtgatcaccacctatcgtccaagccaggagtcccactgcgttccagtcactgctccggggagagggcgctcagccctgccccaggtgtccttacctggttctctagtacccagcaccaggtcagggacaccagcgatgggcttctaccagagaccggccccagcccacgcgcgcccagggtcgctgggccacccctcctcatcattccttaggccatgaagtgccgggggatggcgagctgggtcctttgttccctcaccaagtggaaaagcagttttttaacaagccaaaccaagaaagaaaccccggtcgcagtatccccggcagggcgcacccaggatagctggttatccaagcgcatgtgtatcccagttgtaaaaataaatcaatagtatttgaaactgcggagccccggggaaaggaggcggaacatggccactcatttcaccctcgggagcagcgctctgcgctcgcagccctggctcccctgcacccccgagtcccgagatgggttagagaagcagcgagggaaggggtgggggccccgccgcgtcaccacccacctgcggccaccaccgtgcagccccagagcagcagcagccgcgcgcagctccccatggccgggaggagccgggagcagccgggccgggcgggtgccggagggagccgagacctctgggctgcgggatgaagcgccgccgtcctcgggagggaacggggccctggtttcttcctcctcctggggcgccgggctcggtcagcggtcgccggcagctgggagccaggggccgggaccgcgcggggaggtggggtgaccctcgcgcaccggcctggcgggtcccgggcacctggggggcggcgggagccccgggaccatagccggcctggctgcgctgccccgcggagcggccctgcgggctcgtctgccgctagcccggggctcggcgcccgcagccgccgctgaactttgcgagacctttcacttcccggccgccgccgccgcctcctcctgggcgtcctcctccgcttttcccacctcttctggctgccccggctccgtcccgtccttctccacgggcagttccatgcgatgcatttttattgcaccgacgccgcggcgctccggtgccagccctcctcccctcgcacctccaccccttcctcccgcccgccccccgcgcttgacagcccgggcggcgcagcccgcgggatcggatcgccgctgccgctgccgcccggggggggggtcccccgcgccccgaccgacgcccccgacgcccggctgcccgctggtcccggtcgcctcagcctggcccccggctgccctggcgcccctcctggcccgcgccctgcatctccctagtgacccccctggtgccctgcagcacccacaggcctcccctgggaagcaatctcccaccttctcccggaacattcctaagagcagtagactccctctagatcaggtcagggcatgccaaggggcttaaaaaaccgcgaaacaggctagcgcctacttcccacatcccccagcgaaacaagccctccctcctcctccagccaccccctctcggggagtcccacgacccggggacggaacaccccaacccagccccgcgtcacccgcactgagagcgcgccaactgctaagcggcgttcgccgcttctctgctgccttttgcgggggtagggggatgtctcggctaaacaatcgctgcctacatgatccgaaggtgtgcccactttggtgtaagaggtattgcctaactcaaactcaaggtgctgaaagaaaagggtcacaggattagctagtcggcagtgtaagaacatcgttgtccaga

SEQ ID NO: 6173 - DNA, 6000 bp, Homo sapiens
tcactacggtactccctgtgcccagcacggtatggggtgcattgttggtgctcagaaggcagttactgttatgaaataggaaaggagagggaacaaaggaagaggggaatgatgaatacgaaactgcccaggtctgagcttacaacttaaagcaacggagtaatggtatgaggcactttgacatctagaggaatgactggcactaaacatccctacctaaggacgctttagtacctgtcctgtgtcctcacaacacttagaaatagttcctgctgagctctgtgttcactgaaggcatgtggcctttgacatttgttgaatgaatatgcagatggatggaatgatgaatggatggatgaaatgatagatggatagatggaaggatgggtggatagaaggatggaatgatgaatgaatggatggatgggcagacagacagatggaaggatggatggatggatggatgcacggatggatggatggatggatggatgcatggatggatggatggatgcatgcatggatggatggatggatggatggatggatggatggatgatggatggagggatggatggatggatggactggtagatggatgggtggataatggatggatgcatggatggatggatggatggatggatggatgggtggatgggtagatggactggtggatggactggtggatggatgggtagatgatggatggatggacggatgaatgaacgggtggatggatgggtggatgggatgatgggtgaatacatgggtggaaagacggataacacctggattaacagaaaaattgatagataaattctaaatattgtgtagcatagcttctataataaaatatttttgaaatttttgttgtttactcattttttcttggctcttagaatataactaagttaaacagatcctcaaacttggaattctacctttctatgcacataaatatttttaataaaatcacattttgatttaactctttaattcatacaaaacaaaacttagtggtctcttcattctttgtcttttcaatttgacagaatttgaatgtaagcaaaaagccacactctctctctcccccactaactggctcccttctgatattctttcctctcccaaaaagttcctgacccctaaagaagttatcactgtactttgaagctctttttggtccacagcttccttcaataagggtggtgctgtcctacccagaagcttcactctgacccaattaacaccccagtgtcatcaaattgtgtcaaatggaatttcatgatgcagatattatttataagctcagggacagttcagttcatgtcgcaatgtattcatatcacctctcctctaagattctctgatcccttgaaagttctcacccagctggaaatcgaatatgaactatatttaacaggattttaattggaagtaaacacacagacacaccacacacagacaatgcaaagtgcctaaactgtctggggctgattgaaaaagaatattaccaagtattaaacatccgtttcagcatattattagaggccagaagctctacatatggaagcagtttcaggaaggcgctccaagaagcccactgcccaggccattggctgcactcagctggaagcaggcagagcacgtgcccagcgccaccctaggcacagggagcacgacactgccgcagccccgctcgcaatgttgcaggtctctcagcgtctgcttctttcctaccagcatgtgcaagggaacataactgggaaggatgcacgtgaggactgtaacaagcaacctaaatgtggcaaccctcttgactttgtatttaaaaatcaccttgccctctgcccaactccaatctcctcacccatttttcctctcagcccaccctccatacacctgccccctcccataaagttcacagtaatgcattaaagctcatctgcaggctagcaccattgcaaactacatcaagctgccagcaaagctagaccttaaacatttaaggccattccccagaaaaattaggggccataggacaaggctgctggggaaactccgtgtgtcataccatacttcctaggtcccaggggcatagaaatacaagcaacaaaactttatgtttatttgtttttaaaaaatatctacaagagggtgggtttgttctataactaatcattttctgcttatgaaatataaacgtgtaaggctcaagcatattaacctggtattaaaatctgccctttgtttcattcaaaaattcctatttggaaagacaatacagtagaaatgataatatgtggaaacagatatttaatacttgataatattctttttcaatcagccccagacaaatgaggcactttggggtatgtgtgtatgtgtgtgtgtctgtgtgtttactttcaattaaaatccttttcaatatagtccatacttgattgcaagatgggtgagaactttcaagtgatcagagaatcttagagggaggtgatatgaacacattgggaaaagaatggccctgtccctgaatgtataaatcacatctgcatcatgaaattccattttatgcaatttgctaataggggtgttgatttttttcttgttctttgacatattgtgactaatcctgaatcatctaccatgtgctcagactctgctaattgctgtacaaagtctccacacagaactgattcacttttgaactgtctggctgacttgcttaagttcaatacacaaaatatgtcatatgctaggcttatcgtaaacattttacgtgctaatttttggccacctagtaaagaggcttccacatcacacaggacctcatttaaggacatgttcagtgttcccagttgaaaaagttcacaagtattaggctaaatacaattctcttcaacactgctcagtctaataaagaaatcagtaacagacctatgtacctaagtgaaaaaacacaatagtgaggtcctatttccaaagctattctgtacctttcttaatacaaccttgttattgcagcataaacacaaagaagtctggacctattataaaaccaagtgagaaccaaccccccccgccccaaaaaaaaaatgctgggctgttgttgctgtggattttggtttttttaacctcacgtctgcctgagtcaggttcactgaattcatcaaccttttctttggtttcctgtgcacattataaatccagaaggctctgatcccagggattgttctaactcataattaggaaacgtgagcccatttcaaccacacttcaaagacagggaaggagggggaacgtaaattcctctttctaaatcgaaccatcacagaactcggcatttcaactgtcttcatctattatcagatccaaagcaacataacctcagtgattctggaagaactcagagaacagacaattcatgtaattaaaagactttgtgcgtgataattggctttgaagtttctgagagagatctcatctcaaaaatctttgcagaaaaatatgggtacagggttcttgcagcacgtattagagactgctgagacgcttcactctcctcccagtgtatctatctgcaggaaaggggcacgggtgggggaaccacacacaagcagcccaggtcaatcatgagaaagaatctcccgcacaaatcacaccatttctcttcaaggaagaatgactgtccagagcttccaaacttgctcttcccatgacagacagggatgctggcagaagagaagaggaaacattgaggaattcctgccttgacacatggcttcaagtcagggctccgctgggaaaattcgggtcacaacttgtagctgaaactccacgtgcaccctgcggggccgctgctgctcccagcaccctacggaagggtgagcgccagaccctgtgcccaaacctcacagcggcagacctggagaaacccatcccccttcttcagagccgccccccaggctatatttttggcagcctataatacacaaaatagtattcccatacaacaggagtgctccaaaattatttccaaataggtcagtgccaccagggaaagtcaatcccaaattccagaaatctccctggtcatctcaatcccctcctcccccgacagccggctcggccctccagaggccacctttcctctcaagggtccccacgccctctccctttacagaaaaggctttcaggaaacagccttcctttcctttcggctccttagtagtctcacctaaggcctcccacccaagtgctccaggacaagcaccttcggccaaggggcgtccgaggagcttggctgccgcacgagcgcacgttcacacgcgcgcacacacacatgcacacaagcgcgcacacacacttgcacacgagccctctctcccggccgcccccatcctccacacactcccacacactcactccaggcgaagttagtccccgggccctggcggccgcggcgtcctcacctttggaaaacagggcggccaggctgatgagtaccggcgaccagtggtgccacagcgtccccatctcagacgggcacatcctggagacccggagcgcagatcctccgctccccggcgccgtccaggcgaacaagagaccgtctcagtcccctagaggcccgcagcggggccggtggcgagggagcgcccggctaggggcccgagcagcccgggcgccctgctccctcttcccgccagtccatggccaggccgggaggcgacgaccgcgcgggctcctgagttgctctccggagtccaacacgcgcgcaggcaaaccccacctccctccttcgaccccaacagaattttttttaaattttaatccacagggggtatttcctttcctgtttacccgagcgaagagtggcccccggtggcccaaggaggggcgcctccaggcgcagggctccggcggctccagctgctcccgggctggctagcgggcgctggcgcaggcggcgccggggtggcggggctgcggagcccgggacgcgggcagaggcggctcggagccccccgggcgggtggccgggctcgctgggcggcccggggctccctggcccgcagcccccatcccaggccggccgctgcgcctcggggctcgggcgcgcgcgcgctccggcacccaaagtttggcgggtgcggctgctccccggccgccgcctcggcccgcccggccccgggcccggctggggctcgcggggctctacgcgcgccgagcgcactgcaggctccggagacgcggggctcccccctgcgcccgggggaggcgggccagatgtgcgcggaggagggcccgccggctcggggacgcggccgagcaacgcagctgcctcctgccagcaggcgcgggggctccgctccgcaaggaccgcatccggaacggaacggaggcgatcgccacggtgcccggagccggctggggctttcgccttaaaaatttgtctgcttttaaaaagccccaccctttcggagtgacagctgtgagccccaatccgcaaagtaaatcccacctccccctggccgccccacgcccagcctcccggccaccctccctgcgagcgcggacgcgcggtggcggcgggcgagggctcccagcgcgggcgcaccccggggacggagccacccactctcccaacaggtgtccagctggccaccggcctctcgtcgtcatcaaaacctcaggcccaggggaggtcctccagcccgggggcacctgaggctcttcgccagggagagcgcaaggatggctggagaagggccctcgccccgccctgcgcatctcccagggatcgcagtgaggaagtctctgacacgccacactgaggtcatgctggccccaagccccttcccagagcgatcccccaagttagtgtccctagaaacatgtcgtgtgctccccagggctcactgggaaaggaaatggatccattaggagacaacattgctttgagaagataaaagacatgattctcaacaccgcccg

SEQ ID NO: 6174 - DNA, 6000 bp, Homo sapiens; identical to SEQ ID NO: 1760

SEQ ID NO: 6175 - DNA, 6000 bp, Homo sapiens
atgccgccaatattgtgtgtaattggaaacatttcaaacagaattgttaccaaagtcaaagaccataattgcaagcccagggatctctgcctcagataaaagaagggcagctgagcaagagtgctcggcatggaggagtctacttacgggtctgcatctcacagcaatattttcattgcattattgacagatctttcttccggagacccaatgagaaaaggacacagagagaagcacacgcaaagcagaagctggtgggtgctataaatcagcagctgggacaaaactcttagaaaggagtccatgacttcagtaccagaacaactgaaataacacagccctaacttttttttttttttctgaagtgtaatccactagaaatgaaaggcatctctcccaagagtttaccccaaatctaccagtgagaaaaatgcaactgctgttgaattggtcagttgacttttaggctcacttaggaccaaacttaggggagaagaaagttaagtaaaggcaaatgatagctgcttgctagtttgcagcttacattttaaaatgtttacattggcttctgcctggctgacatttttacttttattttatatgtaaaatctctctttataggagaatgaagctggaaaggtctaatcggttcaggctgggcaatcattcttgttcctggagaggtcccttcaaaaataaccaaaatgcatttagagtttagtctaaacaagtgcataaaactgagacacaggaagaattattacattctgagaggtttgatcaccctccccaccccccacaactggaaatagtcaatgccagtggaccagtggctcaggaatggttcttggaaaaattgtgtcattctggcatacagaaaagtgatctgattattctatcatatctctgtgccagaagtgtcatgacatcagcgtgctccaacctgtaaagcctgtctggttcgccatccctgcttcaggagagaggggaagtggggggaaatagcagcttactcagattccccatacaattttaggccaggcttttttcactgctccaaaatgttcattcatcaacacgtaggtaattaacctccacttcagttcagcatgaccataaacaaggggatgtgattaccagttactggggcagatgaagcgctacatttctgtgtgtccagagatggggaagtcagaggcttggggctgctccagattcctcaatgccatcttggtccttggaacgtgctgtggagcgctggctccataggctgcatgaggtttcgaggaactgcaacaatgcaggacttggtgcccagattactgtacttccctctctcaacttgcttgctcacaccaaccttctaaagatattattgtgcaatccaataatcctttcttctgtgaccagaagaaaaagaagtaatggtcccttaaaacaccaatcgaccaaccaagcaacccagaaacacaatcctttcactttcctaactccttctctttattgtggaataatcatacatagatttaggcaatcttaatattctctcactaataagggttaaacagttggtattattttacataacatggagatgagagagacagctattttttccaagggggaagagtctatcctagtcaaatgatacttttaacatttctattcacagatgagaatcactttgattttttaaaattacctttttttttttttttccccagagatggggtctaacaatgttggctgggctgaacttgaactcctgggctcaagcgatcctccccagtagctggggctatagagccaagcaccactacatgtagctttcctgtctttctttaaaaggaaaaatttgctctttataaactattttaaccaggaaattaactgcagtaagtagaatataagtaatgataatctttactgaaaattgtttcccatgatattagagagcccaaaatataggtataggccattaagagagttacttaattactggaaaatactttgtaaagattcttgttccatttcatgagtattatagacaatcactcataatacttaattctttgtattttgctttcaagtaattataagagattttagagaaattatgatgcaacttttaaaacttataattcagcttactttttaaaagccttaatcaaagaaactgcaaaatttaacttttttggtcttttcagaattatcaaaagagagaatattaggaacaactagacttacctacatctgactctaaagttaagagttcagctattaaccctataggagatctttatttctccctagctaatattagattttatctgggggactcaagctgacttattacaccaccacacaccatggacaaatagtgcttccatggaccttgattataaaaacataataagctttttaagcttcactggtgttactggcagaactgattgaatctgtcactttagtaaaatatatcatttttctttttaaaacctatgaaccaacaggctcactcggtgataactcgccaattagtaccaaattaaagatggaaaaattaatttactaagcccattcagttgcatcaatatgtctatctctataaactatccagtttttccttcctttttccctccctctctccatccctccctcttttccttccttccttccttttgaggcttatttataagaatgaatcatactacattagccatgacttattaaacttggagattttcaagttcatcagcaagtgtgcaaacccttaactgtgggtaacatccatttatttgtagcacctttcggttttaatatgtagagcacatgcattgttaacctctaaatcctttgtataaacatttctggaagagctggtaaaatatctccttctgtgtttcctgactcgccagttgatggcatttagaaaccctctggtaccagcaggtgctgtattttgctttcttcaggctccagctgggctacaatgacagattcctgtcccaggccaagcctagccaccaaggctaggaccacattggaggcaaactgaaccaggctccaccagacagcaagatgaatggctgctgtttaagtttaaaatcccctggtgggagtaaatattgttccagagaaaagccttgacaaatactgcgtcatccttacagaactgtcttgattaaagcagaatctttggattaagttgatgctcaattcaaaatgtatctatcttgctgtcatgggatttttttttgttttttttttcctttctagagtctgaaaacagacataatgttggggacggtcaaacaaggctgccggctcccaaggggctagagtccactcctgataatagaaggcggctgaacactgacacttcactgaggataatggagacagcaaaggcttagtgggaaagggccagttgtcacctaagtgacaggcaacagctgagctcacacatctggagccggactacggcaaacattagcaaccctcaccagtctacaccttgggcctgtctgaaaagacagatggaagttccctctactcctaaagtacattaaaaaatgtctgatggtgaaccacatcaattatataacatcaactgcaggcacagccttccaaagtactgattaagacgaggcagtagacaacactgtatgcatgaacagatacaagataccatttcagtgatttgtcattcataaaacttatcctaaaagacacatatacatgcatccatttgatagcacaaatgcatgttaactctgcaggagaggcagatttttacatgtttttttggttgtagttgttggtgctttttttttttcctttaggctggttcccgtggtgtgtttgccttgttcatggtctcagttctgccgctgatacccttttaaaaatcagcaaccaaacgcgttcggcttgtgatcctgaaccctccttaggcaagctggaactaagcgtgatgcagccgtcctccctctctcccaacccccaacctcgttcttcagcctcctgaagacaatctgtgaacaattttcccaaagtcccaagaataacacagcactgccaatagtcactggcgatgccgtttgtttttcttagagggtaatgaaaatttaacagctttctgctgcatcctgagtcccgctcctaataactattaacatgcctagtttcttcaactttttctacctcaagagaggaagacgctcccattttttccctatatctgtgctacattcagcaaacaccatcgcggggcagggggttggggagagtggtgggagttgattcgcctctgccaaaaagccaccagcccctttccccagcgctagaggagagaatcggtaccctccctccggacgccagtaggtgacaggcgatcctaagcggcgggaacacgccaacgcaccctcgcctcccggcgccccgcatcgcctcgaccctcgggctacagaacctgtttccacgccggagaaaaccaagggaagagttggttgtgatgcagcaaacaggagccatgcggagagcctctgcggagccctggcgatgctgcagccaatatctgctttccctgtctacacagcccaacaaaccgattatgaccttctccctgatcttctgcgacaccgacccagtctgggtgtcacagactccggcggtgccagcgaaggtgcccggccctacccctgcggcgctcgccccccaccaccgcgccgcagccccctctgcggaatccgccgggatccaggctgccactcacctcgcgcgagggagacgcaactcggctgcactgtcctcggcgccgctgcggggctgctgggctgcggggctgcggggctgaggagctgcggtccgcggcgtcaggggtgggcgagggtgagcagcgcacgaaccatccagagcccagaaagtctccgtgccgaccgcggcgcgtctcggggaagtcagcgcaggctgcgcgaggctggcatgttccgggcgcgctgtcgggcggcggcggccgcgggagacggcgctggcagctgggctgcaggcggagtgcgctcgggctccggagccgcgcgctgcggcgccgccgcgcaccccgccctcggccgcggggcccggcgcgagcgaaaacgcggagcgcggacgccgccgcgggatcgaggccgctgggcgcgcgcccacgcgtaccccggctcggccctgaaagcgaggtcgggcccggctcgggccgcgcccgggggcagggctgcgagcaggcctgggaccggctccacgcgcagccagtggggcagagcagcaggcggattatgcgcagggagaaaaaagttcaccaaccgcggtccagagtcgcaagtgcggctcgctcggagcctctgccccgcccccgattataagcctttttttttttttttttttaaccaacaatcccgatggactgaaacacaggaagagtgaagggacggggtggggggtgggggagagacaaacccaatttcctctgatcaaacgatttgggtaggggtgcctatttgagttccttctccttcggggggtgtgtgaagggggcagttaattaaacacttagattccttccggcgcgccttgccgagctggggacccgtttggactcgatcctgtctcgtgtaatcccacaggctggtctgagtctctgccccggaaccggaggagtgatctttcagagcaagaagccaaagttcagcctctagtccgttcccttccccgcctcgacggccctggtcgtctccatgaaaactcagtgtgggggatcgtgcccgcgaaaacctcagcccaccgcaatgtccagagcctgacccaagtgaacgtggcgcacttaaaagcgggttcaaagcattgatccgaacacggtgacaatttttcactggccaaactactctccacattttcagtctgctcaattcccagagctgggctctcaggcgcactcacccacgttgaactggggctcagcctgtt

SEQ ID NO: 6176 - DNA, 6000 bp, Homo sapiens
gattgatttctccagtgagtttccacttctcgcaactatataataaaaaatactaagtggcttaaaaaaaatcagttacatagattattacttggaaagaaaattatataaaaggtctcagtgagataaattttaaaagggtaagttacttttgttcttatatttaaaatatatgtgatcaggctcctataaaaaaattggtacatccaagaacttaaaattctacatcataacattcagtttcatacttttttgatcaacagcccttcctacttttgctcaaaacacagctttgcttttcagtatttgggattttctttctgcttttgtttgtttgtttgttttggttataagtatcttagtttctatctcagctcatcctatccttttgccagaaagccattccttactcctagcactgtccatatttccctggcaaatgcaacacttactttcataggatcaaggatttgaggaatggaagaaccttagcggtcccttccgaaaaagatttaatttaggaatcctctctccaacttccttgtcagaggatggtcctagctctattaaacattcccggaatatcacattgctggagagctttcatggatcaagaggtttcccttgtgtccagactagctgtatgatcctaaacaaatcacagcatctcttgagtctgcgtttctataaagcaagaagaggtgatgatttccaaggtcatacaagtcacagaattcttcctaattattttaatggcagtaagcagaataaaatgcttgcttgtaacatctttggctctgaaggatattgtccaaagggtgaggttggtgtttaaggggcagggacagtaatttttaacaccatccaatagggacttttcaatgctaccgagcagcggatctacatactgttccctaaaaggacacctcctggctacttgttccttaacttcccgctgcccagtctgccactgaaagccccacatggcacttagggagctctcaccatgcatccctgattatcgttattactattactattctgatttgttcacagaaaaccattactaccagtcagtggttgatcttctatccttatctacttatctgcaatatttttcactgttgcccactcccattctttaaaaattatcttctttcttagccccaggacaatcaatctttgattctcctttgcaatgttttgatcacttttttatgcccatcccttaaaaaggagtcatttctttggacctccaatcttcaccagggagaatgctaaaccccagctctccttctttccctgccactgtttgaccttacacaggtcgtattctctctgggcctcatttgtccctgagaaaagagaaggagctggagtgatgatgtggaacatctcttcaagctgtacactgctatgctagtcatcttaatcccattcctgtattccttcagtatgtggtagagtttcagaaagcaagtataggtctgtgatgatgctaataccaccaagaaatcattcattccagtatggggagaaaccttaaacaccatctggtctgaaacctttgttttacagatgagggaacctaggttcagagagggtacttgattgcctcaaagcagagacaggataataaggaggtctcctgggctctcacttgttgcaaaataaatttgagtgttttctggatctggctaaagtgcacaatgatatcagagtaaaacgtcatacggaaggtataaattgatctagaacacattaaagccttcccctccccctttaaaaaaatcaactttaagaattttggagagagatttgctatcagtggtgctttatacaaaatagcataatctgataacataagacattttagatttatgtttttaaatagccaaataaaacaaaatatcaagtcacagattacatatatttacattaattcaaatgtccaaagcacagtacagtagggtctatttaatagttcacataatttaagatttacatatacacaagcacatgaaccaatattagtttgctagaacagggatttaagaagttactcagacattttggtattgacacttacatatttatggcaacaaattatgatgactttaaattttcaatgagatcttttgtacaagaatacagaatgggaagaatgtacaaaatgaaaagacaggcaaacaaatgtactttccttgcactatttctataacaccatataggatgtggcattatccagtacattttatcagtgtagtctattcattctggtctaaaacggtaattttggctgaataacccccaaatctaactttgctttaggctttataattaattgatgcttgattcttctttctacatcttttaaaaatgaaattggacactagtgtttttctttaaaataactctggtactagtaagttagcaaagtctatttttaaaggacactaatacataaagtttattttttctttcaatatcctaaataaagggacaatgggagtcatatcacctttgggcctactctgaaattaccaatagtgctaaaagctaagatattgtgatctagaacttaaactttggaaaacaaccccatctttctatggcacattgaggaactgaagtactttacctcatttcctaccaatcattttaagagaatttggttgtatttcaaagaacaaaacaacacaatttctgtcctgctgtttattttgcagaccacacacaaagttaaatatgaacagattaaattatgacatcatacaaatataggcacaaattaagtggacgccacaaaaggtgtgtcagaaaacactgaattgactgaatctgagtcagatttccccctcgtggactttaggatgccctcagctatcactgcctcgctgggaaagagcctgactttcccgttctgccctgctgcagtatccttcaggggttccaaaaacaccactcttttacctgcacctgccttccgttcatcagcggaggcatcactagcggggccaggactgagaatcgatgaatgggcattgctttggtgtagcatatttttctgtctcttggttttacacttgcaggggcatggagtcagatagaggtacaaaagtaccaaaacgatactggccacgcaagcagcaagagtggtaaaagctgtgttaaatgcctcatgagcatgggatctgcttacagtgaaattgctcacatttattgtgacgtccacagtttcatttaacaggcgttgcttattcattgcgatacaagaatacactccagcatcctcaaaacgagggctttctataaccagacttccattgtgaaacacgtaaaagttttccatctctttatccggctctagcagtctgttatctggacccacccagatgaaatccgtatttgcattacctgtcttgctgtcacagtggaccatcagtctttccccgacctgagcctcatgaataaagccaagcgcacgaaaggaaccattgatgatgctgtcagagcaattcataaagctatcctggagcagaagtacctgacgcgagtgcctggagtcagaccacaggcgacaggtgtaatcgttcttaaaatccatcactgagctaaagtgcctacgataccaaaagaccagcaaggagtacagggaacagtcacagacaaatgggtttccatgaaggtagatgcctctcagctgttttcctggcactaaatttatgtggtgcattggcatggaaggaattcggttataagaaacatctaaaaacatcagttctgccagcttgaaccttccaacatacaaatccatcggaaactgtgtgagaaaatttccacttaagtagagtttctgcaactgggagagccctccaaacgctgaaggatcgagataggatatgtgattgttgtaaagcagaagcacttccagaaccttcaactcttggaatacagcatttttcaccgtcttcagcttattggacgataagtcaagacacttcaaatttggagttgtggaaaaactgcccgtggaaatgctggtgatgttgttatgacgaagaattagggtgttcagctttgcaaacgatactggaatccactcagaatccagaagcccaattctgttataactcaggtccagtctcttaatcagtctgaaaaggttcccaggcaccttggacaggtttttgttggtgcagctgacgatgtcagtggcacagatgcaagcggtggggcacaccccagaggcaccagggcccacagtcactgtgatcatcagcaaacacagcagctccctgcagcccggtctgacgacggctccaagcagggtgggcagagtgtgtacacgtaacgacattatggtcgcctctgagtctcttcccggtgtcttttccaccggctcagcctcccaccagtgaacctggcaaacaattaataattcagagggagtaaaaagcagaaactgactaccactagttaacccataagagccataccttactttctttccaataacttttgaaatgggttttatttcacaatagggagctctgtgttgcctcttcactgttaaatgtattttttcctctttcctgggttagtcctgcttataaaaatgtacagtcacattctctccatacaacccaccgtctcacccaccatcagaaactcaattttttcctaaggtgcatcctgcgttgttgttgttgttgttgttgttttaaactccctccaacagacacaactatacgcaaacgtacgctacaaacaattaaacggaaatacttagcaaccacccatccaggaaaaaactcacggtgctggggagcctcgtgggctccggggaggctgcctacgcagtgccttccgaaggtctgcgcgtccgtctgtccgtgtctgtcactcttgcaccttccgacttcctttccctccggctcccggcgggcggcaccctctagccggctctcaactttgaggagtttcaagcagccgcggcggcagcagcagccctggacgcagcagccaagctcttcgctggctcccgggggctctcccgggttcctctcattgcaggctgaaggtaccgcctcggcgctctggccgccgtgtgcccgcgcgcggggcgccccgctcccagagccggggccgcgggagggggcgcaggcagccgggcggcagcgggcggccccgcctctccgcactcgggaggctgcaggacccggggttcccgcgcgcccggggccgggagacgggctggggcgccggtcccacccctgcgcgtcctgcctcctgcgggcagcagctcggagcctgcgggagggagcaggctgggcgcgtggtggggggcgcgcgatgcggagggggcggcggcgcagccaatccgagaggcggccggcgccccctcataccgccccgcggcctcgccgcctcctcccgctttcctcctccagctcccacccggacctctagaacggccgcgcagagcggggagggggcaggggtccacaccagaggcccagactctggtccttgagtcaagatgcccaacccactcgcctaccaattacgtcccttcgtccagctccaagccgggcggtaatggggtccaggaaggctaaaggggacacgcccagccaccgagggaggggtctcacccttggagacccacttcgcggcggccgcacaggtcacgtctctctccccacccaggccaaggaatccccggacctcttagagctttgctttggggcaagggccaaggaggctttgcctgcgccaagtgcagttgactgtctgggtttacaaaataaacccagaagcagcctgacgtctccgctcgtttctagggaggaggtcgcggggagggaagtcgggaacgtttcctctccacagggatatctgctgggaggaagtaaccgggaaatcgccacggggacacccctcacctccctgggaaagttctatccctttcctgactcaggaggcggcaacagggat

SEQ ID NO: 6177 - DNA, 6000 bp, Homo sapiens
gagcagagacaaatggtaaaataatagtaaaataactgaagcgcgcattctcaattgcttgttaggcatattacttgtgtaggaagcaaccctatgcaggcctcctgctctgttacttttttttgagacagggtgttgctctgttgcccagggtggagtgcagtggcatgatcttggctcactgaaacctctgcctcccaggctcaagcgattctcctgccccagcctcccgagtagctgggattataggcacgcgtcaccatgcccggctaattttttgtatttttaatagagacggagtctcaccatgttggccaggttggtctcgaactcctgacctcaagtgatccacgcccaaagcctgggattacaggcatgggtcacttctgttcccttcttaggggcatgtttacaaatgatgcccattggtccaggagggtaccagcccgtcattggtctcaacattaaaaggatccattctgtttctctgccctgagcctctggaaaatgatgttcccaagctttagctgtggcctttgtgacatgggcacaaggaaaggggtttcacgctggagagcccctccgcttaggtaaaccagagtccacggggacagctgctgcccagtctgccctccccatgcccattcctagaagtgggcatggagaggctggtgactaactccaagtgtcatcgtcttcctgttttccctcctcccttcacctttgcacattgcctgacacggctgagtctgggcaaaacctcttagcagccaggggtcatttctgggttctcactctctgataggcagatcagaaatgtacacgacacccagagagaaagcagagacatgagtgacaattgtgatggaggaggactcggcttccatctgtttttgtttatttccacatcacatggtgaaagttctggatccaactggctgggtggcatcagctttggggacctctttctaagaatataagttaaggcttggcccagtggaattgggggaggattcagtttttagggtcgctagaagatgaggtcagacggagggagggagggccacccaaaagcacagtgtacatgctaaattttaagttggcaattctgttgggcaagggctggcataatttgtattgtatatatagtccagcacactattaatacaaaacagatattggataattgtgtgcaccagttaactataggaaatttgctttagggaaatagagaagaagcattttgcaagtgtcaaaagaggaatttgtaagaggtgtcaggacagtggccttcctagtgtttggagggaacccactacgttatcatgtcctaaccatggcctcccggttccacagttggcccttgccagatcagacagcaacctggctatccaaaccatacctacccaccttggaattggatttgaactgagaatacagaattaatagcatgtagtaagggacacttaattttcttctgcttcagcctgagtttgtcaccagcctcatttggcatcctcctcgtctctggcatgaagcattggagcggtgcagttgagagcccaggctccagttgcctacagagtcagatccaggtcctttcccttcctcgcggcaatgcgcctcagtctcctcatctgtcaagtacccaccttatggggctgtttaaaggaataagtgagatcatgtctacagcagacttaccactggtctggccctttgaacatgcttaaagctgctgttattgcctgggcccttggagggaggtctttctctggatggtattatataagagactctggtcttgaaagccactccctaattttctttgggccttcatttcctcacctgtgaagtgaaggggtcaggagagacccccttctatctctgaaatgatataaagggaggaagggagtttgtgttagcggcaacttttttgtttgtccgcacttttcctttccgctctttgagccatgatagttgagaattgtgtttttttacttccttaaattcagaagtgagcttttgagagtcctcaaaggaaatcaacctcaagataattcttttgctcctgattggtaatgggaaaaacctttgagaagaattcctgcttacagacatctctctctctctcctttttttttttttttgagacagaatatcactctgttgcccaggctggagggcagtggcacgatctccgcccactgcaacctctgcctgctgggttcaagtgattcttgtgcctcagcctcctgagcagctgggatcacaggtgtgtgctaccatgacctgttaatttttgtatttttagtagagacggggcttcactctgttggccaggctagtcttgaactcctaacctcaagcaatccaccctcctcagtctcccaaagtgctgggattacaggtgtgagccaccgtgcctggcctagacatttctcttgatgtattatgttatttgggtgactctatacccctgtaggcttgaccaatcacaatgaagtggaagcatgattggcatgttatgagcccctcctctttctttagaggctcctactgagtagagtggccagcaagaggtcagatacaaacttcagacaacaaggtagcctttttttttttttttgagatggagtctcgctctgtcgcccaggctggagtgcagtggcacaatcttggcccactgcaacctctgcctcccaggtttaagtgattctcctgcctcagcacccccacgtagctgggattacaggtgcgcaccaccacaccgagctaatttttgtatttttagtagacactgggtttcaccatgttggccaggctggtcttgaattcttgacctcaggtgattcaccctcctcagcctcccaaaagtgctgggattacaggcgtgagccaccgcgcccagccatcaaggtagcttttaaaaagctgagacctttgggaatggagtgatgtggggtggggtgggggggttagggtgtattcttttgcttgttgtttctgttgcaactttgagaagattctgaaaaataagaggggagtgatggccgggcatggtggctcatgcctgtaatcccagcactttgggaggctgaggtgggtggatcacttgaggctaggagctccagaccagcctggccaacatggtgagacccccctctttactaaaaatacaaaaattagctgggcgtggtagcgcccacctgtaatcccagctactctggaggctgaggcacacgaatcgattgaacccaggaggtggaggttgcagtgagccgagatccactgcactccagcctgggcgacagagtgagagtctgtctcaaaaaaaggagagtaaggaaggaaactcagaacagatacgtttcggcaaagagcaagtcgactgggattttttctatagtgggtgtgtaaatttcagactttaaaatccactcagtaaaactgacatccctgcttattcacttttgccgactctgctagaagcctcctgagttttgtttacaaggtctccggcacacagcctgccttctttgaaaggccaggccaggaccagcctgcccatcccttctgttctcactggatttcgtggccagtggcctggacgtgactaacagatggccattgcagagctgatcacctgatttcatggcttattcttgggaaagcctctgatctttttacagaaggttatccatcccttggtaaatccttccccttgtatagatggagaaactgaacaggtacaggtgtgcatatttagtgttaccttggacaggtggatgatatgtatgccaagtcctccttagcttgtgtttagctttggttttgatgcttataacagctttggtcgttctagctcatggtcatgagctctttcagagaggctgctggcttaagtgcccgatagactttttttttgaatgaatgaagatctatctggatttctagcaacacttttcttcaggagtgggctgcagctggagtgagcactaggaacctttgcagcttaagaattcagaaacccacacctccccagccagcctaaggggcagccagtctcctaggagagctgggttctggcctgcgacgtcctccacctttcggaggtcaactcagaaggcggtacctgtccaagggagggggcgcccacctcagggtagagtcagggcgttctgacagcccccgtcaggcgactcgagtggaactcccgcctgcactacttgaccctgcaaaggcgaacccgagtgccggaggtgcagcgccaggaggccggcccagcccaaccgcccgcgtcgggggagactgggctctcagagcttatccaggccagcggtcctgcaggctctgggtcgggggttcccgggttcgtgcgcttcaggtcctggtcctgcagcgagtgcaaacccggcagcccgtgtgcctgctgcaagggacctggggacccgctcctggcgtcgggtgcagagtcgtcccccacggcccgggcgcccccgggcttccgcgagacgccccacgggaccacacaaaggaccccaccccaggccgggcgcgcatttcctgttgcagcggtggcggcgtgcagccacccatgtgcatcccgcggcgcgcgggccaggccgggccgggcggggcgcggggcacgcccccacgcagccccagtccccgcgctccggccgcgagggaccgccctcggcggcccgcccccgtgtcaccgcaggccgggctccctttgtgtgcggccccagcgccgcggccgcgccattggcccgcccgcccggggggccagccccttcctggctcgcctcatgcatatgcatggcgccccggccctcccccgccggcccctccccgccccctccagcgcgggcgtgcgaggcgcgcggcgcggctccctcctcgcggcagcgggagcccgagcccgagcccgagcccgagccagggcgagccgagcctgctccgggcgggcggcggcggcggcgccgctccagccatgtcagcgcgcgcgagcctgggcccaccatgagccatggccatgtccgtgagcgccgaggacgacgactatgaatcggagccggaccaggtcggcggcccggggtggggctgagggagggacccgccgcacgacctcccgaccgcctgtctgacgcgccgagggcggccgcgacgccgccgccgccgcgatgaggagaaagttttgctgccgctgccggcggggcggccggggccgggcccgagcggggcgtagaggagcgcggcaggcccgcagccggcccgggcagggggcgtgtgcggccgagcgagcgcactgggggccatcgggcaccgcggggacaatgtgggccgccgggcctcgccgtcgggcgggcctgccgggcgccggccacggcccggggcaagttgccggcggccgcggggcgcgccgcgccctcccccggcgccctcgcccgcggcccacgcgcgtgccggctgccccgggagcacccggaccccgcgggcgccggcacctcctgcctctgcgttcgcaaagttgtgccaggaccctcggcttcggggctggagcgctcccggggcccgtgggcccgacggcccgagcttttgtctgggcgccgcgcgcccgccgcccgccgtgggcagacggagacaggaaggggtgcgagccgcgggccggcgcgggccacccggaacccgggcgaatccgcacggcggcagcggcggcggcggcggaggaagccgcgaccccagatggcaggagttggcctcggtggattcagaaggaaaagcaacctctctcgggaccagggggagaaatctgtgtgtaaaacaaagccctgggtgtgtttacggcgtgaatttactccgggaaggttcgtgtttaggaagaaggcgaaaaaagttgaggttttacgaagtataatctgcaaaataatacttggaacaggacgcaggccaggtagacctgtccgaggaattaagaatgggatggattgagtt

SEQ ID NO: 6178 - DNA, 6000 bp, Homo sapiens
gtctcaaaaaacacacacacaaaaatctgttgtttaagctactctctcaagaaaaaaagacagaaagaaagaaaagaaaaacataatgacgttcagaaacaggaagaaatggtttccttcatcttgctaaagtgaaaagctacttgtcacaaagctcaatgccattttaccagcttctccaggatcatcctcacgtaacataacagcactgatagttacatcttctgttatactgtggggctctgtgtttgtgaacagcccggaacgctgtgatgaaaatgcagctgcccagttactgtcatccagattagtaaccttaaaaaaaaacaaaaaagtaaaaatacagaaaagtgatggagttattgtcactgagtggatactttaaaaacaaataaggtttctaaaaattatatgtatgtatgcgtctttttttttttttttcccttcttgagataaggtctggatctgttgcccaggctggagttcagtggcacgatcatggctcaacgcaacctttgcctctcaggctcaagccatcttcccacttcagcctcccaagtagctgggactacaggcacgtgccaccacgcctggctaatttttgtatttttggtaggtatggggtttcaccatgttggccaggctggtctcaaattcctggcctcatgtgatccacctgcctcagcctcccaaaatgctgggattacagatgtgagccaccatgcccggctactatagtgtatttttaatacttaggtgaagtcattctgcatcacagcttacataacatttcttttgctatttttaatactgttccatagtgattcctaaagagtatctcacctactttttccaattttctcttttatcccctttaatacattttatctcttccttaagatattcttcatctgttaacctctgattcctactcttgtatgcttcaaaacagggatcagattttatagccatcagcaaccaaccacagcatgtacttcttctggtcagcaaactgacagattaaaacatcttattttcatctaaaggttgctggtgtcacagtttccatctgtgatatcagatgcataaggttttcagtttttttactgtctaattatttcaatccatataacctaaagttactgttatgatgattctgactcaatatttgttaaaagacttttacatcaaatatcatatttttataaaaagggagaagttcttttttctcttttttttttcttttgcaatcacaggtcactgcaacctctgcctcctgggttcaagcaattctcacacctcagcctcccgagcagctaggattacaggcataagccaccactcccagctaatttttttattgttagtagagacagggttttatcatgctaagcaggctagtctcaaactcctgacttctgggaggccaaggcgggagaatcacttgaggtcaggagttcagggagtgctgagattacagatgtgagccaccacactcgacccaaaaggagttcttagccctatttttctacataccatggagagatttccaaagaaccctgaagactgcgtaagtcggggcgacttccctcctgttccaagaatgcaggaaatatctggctgccttagtaagcttcggcttgttggggtaactataaacaaaaggttggtagaaagaacctaaagtgcgtgagcattcattatcaaaacaaagtaagcaaacaaacaatgaagaataaatttttcagttttccattatttagactctaaccaaataaatactttaaatgttaacatttccatgatacaaggatttaacttatttttctaaatttgagctgtaggtactactgagcctaacaggaaacattttactgcaattacagatgctttcattatagaataactgagcagttaaagacactaatcagtcaacggattcttcatattttaattttataaggcatactgaggcagtgcagtgtagtgggcataaactttggagtaaacagatcattgtttgaatcccagttccattatttacatactcttttttttctgtctcagaacaaaaaaagagtatgtaaataatggaactgggattttttttttttttgctctgtcgccccagctggagtacagtggcacaatctcagctcactgcaacctctgccttccgggttcaagcaattctcctgcctcaccctccggagtagctgggattacaggcatgtgccaccacgccagctaatttttgtatttttagtagagatagggttttgccatgttggccaagctagtcttgaactcctggccttaagtgatccacccaccttggcctcccaaagtgttgagattataggcatgggccactgcatccagcctatttacatacttattgtatatattagttaacttctctaagtctcactttcagttttggtaaaacagggccaacaatacccatgtcatagttaccgtgtgtttatggaaagtacagtaccttgtacatggcaagagttcaaacgaataataactgcaatcattattattagtgcttattgatatcgtaaccaaatactatactaattatgttacaataaatgttagttgctattataattaccgttattattaaatgctttaaaagcaaaaaatcttacaaggctgtcgaaatgagctaggagttcgagggataacctggtttcttggtgtagtattaccaaaattttcatcttgagatgcctgaactgtacaacgagttaagaaaagttttccatgtagaaaagagatcactaaaatgagaattaaccatctttttactatacaaattatgtgaatacatttttcaagaacaagtattttagggctaccatttttcaatgcaaagggtaaataattcattgcttctgccatttaaatgatcagatgtcagtcttagataactacacactgaactaaatgtttttagtcagttttcaaataataaaaagaaatctaatctcagcagaagctgtcagcagtaagaaatatctttatttttagggaaatacgatctcattaaatttttgcattatatttaccaaatgacagctctgtggagtgaaaaaaagtttctacaggattttattatagctaccatttaatactcttataaaaagaaaattctacaacactgattccaaacatgttacaatttttataatgatgcttaaatcgcaaaggatacgtaaaactcttttctgagcactctgtttccgtgcagtccgtgtcacctctgcctcccggattacaggggatgatatctctccaaagccactcctaaagtagtataatcaagcttatataagtgaaacgagaatatagcatttataaagaattttatcatcacagttggagtaaaggaccctgagtaagttaaggtatagtcattctagtagccaagtcttagatcttttgttgagaacgcactcctggctccaaatcctgcttattcttcaaagccttactcaaatcttacctgcacaaagacttctctgactttctagtactcactatgttattttctcctaaggaattatttcaacacttggaatctatattataacactgttttagataattgcttcatgaaagtgaatcttatttcccttgttggattgaggagttacctaactgcaggaattctctcttaaaagattttctgcagtctccaaaatgctttaaaccatgggtactattaaaaaacaaacaaacaacaacaacaacaaacagagcttgcaacaacaacaacaaacagagcttgtgagatagaagggtaagtaaaagaattgtggtaaattggagcaaaatgacccttcaagttatttcaacccaggaggtctcctgtcccatcacaacactccctgtcagtttcactcaaaggtctagaaactaaattgtgcggactaaaaggcctgtgtttaagacaagaatctaatatgcttttcctccacttaaaaccttcagatattccttcagcaggaaagtatgggaaacaaccacatagaaacaattttaaacgtttaacaattaaaattaaaaacaaaaaaaaaaaccttcagatagctctctggtctatagaagtaaaaatttcctaaaatgatatttacaatgtgaccccagtttaggggttcagtcttctattcagccacaaacatcactttaaacgtatactgcatgtgaccactgagctacacgtacttttttttcatatcctagcacctctgaatatgcttcttttacaaagacctacatttgcccccttgagcacctggtcaacaactacttactcctcaaagagcctcaggtaggctggagacacacagatgcaggttggcaatttggttcttgtatttattagcttccgaactttcagcaagttccttaacctcttttagtctcagtgttatatatgaaaaaaggataacagtacccatctcataggatttttcttgttctgaagattaaataagctaataatatatattcaacgcctttagaacaatggcagtcacatagtaggtactcaatgtttggagtacgaataatgtactcttattattcaaagaccagctagaaagttaccttctttgaggggtcttcctgatagttacagtgacaaggagacttaatcgcccccaaacacttaccactttacactgcttggttgtctccattacacaactaattccccgaggggaaggatcttgaataactgatctttgttgtaggcggctagcacagtacccagatcatagagggaactcagaatctgatgctggcacttgtaatcagaaagtctgggctgagatcccagtatcttcactgactggctttgtgatctcaggctggtcacttagcatttcgaacgccgcgctacctaccccgcccaccccaggagcgaacagtgttgctgccccaaagcgccgaatagatcgcagaacgtagtgggaaagtaagggactattatgatctgtaccccaccccgacgcacgccaagcggctttttccccatttgtggccaaatttcccggcatggggaaggagccttaggggaagcacccgggacctccttggcttcttctgggagtctagtttcacctatttcgtttcgccaacaggcgagacgggcaagacttcgggctcagctgccaccatcagtactgacctgtccatggctaaagccttttccacacacaaccaaagttggctgcagtttagctaccgcgttttagccttcccgctctccggaagcaagcccttcgacccggaagcagtctgtccctaaaacagacccacagaaaaggggtaggggagaagaaacaacgttcccatctagcgcatgcgcgacttcagcctacaggtgcacgcccggtgggcgcaggcgcaaaagtttgccaatgtgttcctggttgcgtttagcccagacgccctgcggccgctttgcctgaccaaagtctgtgggcgtggaacaggccctgggttctcctactgggaagaatgaagtatgttgatagtctggaaaaatgtgaagtcatttcctggtattctctgtcagaaagcgcctgttcttggaattcagatgcgtgggctctgccccacacctcggggatctctatctctctgcctacactcagtcctttgttctgtagccccctgcagtttttgcaactattttccataactgctatttgttctttacttggtgttctttcctattaaggagaaaaagttcacctgtattaaaaagtagaaaggcaagcgtgaaatatgatggtattgccctctatttcaaagtgccgtctaggcaaaaagtggtgtattttggtcttgaaggagtcagtcacatttttgttttggtttttgttttttccagtttgaaagtagtgactggctattaactgaccagattacaaaaataatgttagatgcttcagtttatccgtttaataagcctgt

SEQ ID NO: 6179 - DNA, 6000 bp, Homo sapiens
tcatactaaaaattccacaatgcttttatatagaaataaagagattctaaaatgtacatggaaagaaaaagaactcgaatactcaaaaatttttggcaaacaacaacaaagttggaggactcaggctttttgacttcaagatacactataacgctaccataataaggactgaggttttagccaaacagacgcacagaacaatggaacaaaatagagtccacaaagcaaaccacacaaacatactcaactgatttttaacaaggcaagccaaagaaatttaatgaagaaaagatagtaatgagaggtgaagccggctggacttccgggtcaggtggggacttggagaacttttctatctagctaaaggattgtaaatgcaccaatcagagtctgtgtctagctaacagtttgtaaacgcaccaatcagcactctgtgtctagctaatcgggtaggggacttggagaacttttctgtgtagctaaaggattgtaaatgcaccaatcagcgctctgtgtctagctaaaggtttgtaaatgcaccaatcaacactctggcaaaacggaccaatcagcactctgtaaaacggaccaatcagcactctgtaaaatggaccaatcagctctctgtaaatggaccaatctgcaggatgtgagtggggccaaataagggaataaaagcaggccacccgagccagcagcagcaaccccttcgggtccccttccatgctgtggaagctttgttctttcactgttcgcaataaatcttgctgctgctcactctttgggtccgcactatctttatgagctgtaacactcacagtgaaggtatgcagcttcactcctgaagccagcgagaccacgaacccaccaggaagaacgaacaactccggacacgccacctttacgagctataacaatgagctgcaacacccaccacaaaggtctacagcttcactcctgaggccagcgagaccacaaacccactgggaggaacaaacaactcaggacacgccacctctatgagctgtaacactcaccgcaaaggtctgcagcttcactcctgaagccagcaaggccacaaacccaccaggaggaatgaacaatttcggatgcagcttcactcctgaagccagcaaggccacaaacccaccaggaggaatgaacaatttcggatgcgccacctttaagagctgtatcactcactgcaaaggtctgtggctttgctcctgaagtcggcaagaccatggacccaccagaaggaagaaactccagacacatctgaacttctggaggaacaaactccggacacaccatcttcaagaactgtaacactcactgcgagggtccgtgccttcattcttgaggtcagcaagaccaagaacccactggaaggaaccaattctggacacagtaagaatagtctttttcaagagatggtgctgcaagactggggcatccatacacacacacacagagagagaaagagagagagagagtcttgacccctacctcacactatatgcaaaaattaactcgaaattggtcacagacctaaatctaaaatttaaagctataaaagttctggaagaaaacataagaaaaaaaatctttgcaacgttggattaggcaaaatttctcatgataaaaaagcacaaatcataagagaaaaaactgataaactggacttcaccaaaatttaaaacttctgctctttgaaagatactgttaagaaaatgaaaggacaaactacagactcagactcgaaggaaatgctgtgaacatatatacgataatgaatttgtatccagactgtataaaacacttgcaaaccaataacaaacaaccctattaaaaacgaacaaacgatttcagcagacacttaatcaaagaagatacacagatggcaaataatagcacaggaaaagacgctcaatatgttagaagaaaaattcaaattaaaacataaatgggttttcactaaacgcatattagaatagctaacattaaaaataaaatgacaagtgctgaccagaatgtggagcaactggaacatcaaacatcacttgcgggaatgcaaaatgaaacagctaccttggaaaacagtttggtaatttccttcttttttttttttttgtttttgagacggagtttcactctgtcaccagtctggagtgcagtggcacgatcttagctcactgtaacctccgactccctggttcaagcagttctcctgcctcagcctcctgagtagctgggattacaggcacccgcaaccacgcccagctaatttttgtatttttagtagagacggagtttcaccatgttgaccaggatggtctcaatctcctgacctcgtgagctgcccacctcggcctcccaaagtgctgggattacaagtctgagccactgcgcccagctggtaatttcttttaaggttaaacatgcacttgcacacggcccaagaattccattcctagatgtgtaaccaaaagaaatgaaaacatatgtctacacaaagacttgcaccttaatgtacaaagaacagcacatgaatgtttacagtaccttcattcctaaatgccaaaaattgttcatcaaatggcgaataaacatactatgatatattcacacaatgaaatactactcagctgtaaaaaacaaccaagcatcaacaaacatgcatcaacatggatgaatcaaagcattaagtgaaagaaacctgaaacataaggctacatactgtatgattccatttacataacataccagaaaagacaaagctatagacagggacagagaacagatcagtggttgctaggacctatgagtgaggggaggaaactttagaatgatgggaatattatttgtctggattgtggcagtggttccattatatgcatttgtcagactttatacagcaatataataaaaattacttttttacttataaatcatacctcaataaaacttgattttttttaaaaaaagcaacatatgccctttttaaaaatatgcatcagtttaaatgagctaaaccaaacttactgggtatgggaatagggcagggaggaacagtaaggagaccaaaaatccttaaaatactggaaatctaaaatattaatttatcgttagtaaataagaaacagatatacataaacaccaagagttaatccaaagagagatgcctttttcaattaagttctcattgtttggacagaaaataagaaaatttgataaactttcaaggaagattaaaaatcacaaggaacaggttgacaaaggagtgctgtaattatgacctacagtttgggaacaacttatctaaaacattccccttccattttacttaatggaaccagtcttatccacccatccactctactccactcccactccgtcttctactatcttcattcataacaatcatatgtaatgcatacatctgacacatatagataagagtacaacataaaatgcctattacaccaaattcctgtttgtccatttaagctccagacaagctcatttttaaacgtcttttttctctattttaatgccacccaaaaccaaagtgatgtccctctggaatgattttctgcagtttcttttgtgtgttattaagtactaagatgatcaaaataaacaaaaatgtctcagaagttttgagtggatcactccaataagaagctacatttttccatttaataaaagttaagaggtaagttgtaactttcatcactttgttttctttatgtttattccattgggcttatactgttgctaggaaaccagttcataagatttcccagcccacagaacaccctcctaggcagcctggaggataccaaacttcgtaaccagggcaattctctaccacacagtttactggttagccaacaccatgcaggtgcactctgcctggcatgacccttactacatttacctaataggtacagacagtataaccaatcccctcaacgcaatagaaattgtagcagagggcaatcaggtgatcattaagtgtagaactctccgacagcagggaacacaacagcgaatttgttgtcagtccctgtcaccccacccaactaaatattgtgggggggggaagggttgccttaaattgtgaagtaaaatgtcagcccactccaataactccaccacgcaacatgcaaactgcttccaaaaaccatcatccaactcccacccggattaatatttggagagaaaggtggcatcagtatccgcacagctgagaggggagggaaggaaagagtcagaattcataaggggccgctgagtcacctaaaattgtggccaagactttaccctccaggaaatcgagctctgccccaactctcatcaaggaagcaagtgagagtagcagcagcaacatcatcctaccaaaaaaacaccagcgcagcttttaatagagttccactccttaaagtgaagccaaaaataggtttcatgtccaaagctttcctccgcagtaggcgacacgcgcagatggagaaaatatctttattgttgggaaagggaggcgtgctaacggggacgaaggatacctcaccacttggcaaagttactggctcctgccttgaccctgaaatgccacttttattgcaacatgtggcccaagaaactctaaggaaatgtggctggcagacgctgtagagcttttaccccaatgtacttggcaaagtaaaaggggatacataaaccaggcgcgttctgtgtaatctaagcaagaatcaaggtctccgttcggtaggcgcttcggtgacacaataatcacgtgttcgtgggcgtagactttcgaaaacactcgattctgggacgtgcagataccggtacccaccggcgagcgcaggaacgagtgggcactcccacccccgggagctggctccgttcccgcaggaggttggtcacgccccctgactcctggtcgctgcgacagccaagggcgaggccgcagcaggcgggctgcaggcggcggaagctcgtccgcgctcctcccccggtggggcgctctccgctcgcctcgcgcggccccgaccccaagacccaggccccggaaggcgagcgttcacttacctgctcccctctctcgctctccgctgccgccgctgcgccgctcacccacgctgcccggtgagccacccccagcacacagacccctacgcgtacacccgaggcacggccccaggcccttgaggggagaccgcggcccagccacacaggttggggtagcccacgcaccacccggcttcgaacacctctgcccccggaagttgatttccgccaaggcccgcccaacacagcgcccgtcactcaacgtaaacacgcgcgtcacgtggccccaggccgaggcccgggtcggggccccatgttcagagccctgccaccccagcttgagcgtggtctttggagcgttgccctgtgaaaaggggtgactttgccatgctccttcccagtctacctcctgttagttacagtttctcattcctcttgagtagcaggccctgtttctccacctaatccctgcaagtaaaccgtcccccaaatcaaaatgagttccatctggaactttgtaggattggtcctaagaagatcccgccgaatctcttcaccacttcctagcagagcacagtaaaaccggggactaagcaaagtggctgacatgtagtaagtgctcaagaaatggatgttgactagatgctacctctcatctttgcctgtctgaactctcaagcaccggatgcaagtagactgagagcctccgccaaccagtaagatgactttggtcaaagaattctgctctagagttacttttgttcttgtcttcaactccagatcacagcaattcatacgtgccatctctgttgcagagttttcttgcaaagcctttcttaaaagctttctgtcaaatagcttgtcctgaagcaataggaaaagaatagcgtaattcacagattatttatttgaaaggaaggaatg

SEQ ID NO: 6180 - DNA, 6000 bp, Homo sapiens
gagcaggtgagcacagtaccttcaacatggcaggctttcatccagtgttttttgatggaatcacataatgagggaattcaagcaaagcctgatgagctggtccatgtctcctctgatccctgtcagccctgacctgcgctggctcttcacaaatggttaggaaggagactagaacagaaattatatccaacccccaacactataaaaaagaacatggtgttcccctactgaggggactatgagttgtgcatctttatgtgcaaataattcattatcatcaatatgcattggaaatatctgttcccccaacaaatgtgggatgcccactaagtggtaggcaacaggcaagatgccagagatgaaataatggctaggatccttgccctcaaggttacaccctagggtggggggactgggtgttagcagtggttgacattcaaccggacacttgtgatggaccaataactatacaaaggacttcagacacatcatctcattacaccctcaccataatctcatgagttggtatctcccagtgatctccattttactaatgaggaaactggtaagtggtaggctcaaacgttaaaatcccaaaatgcttgatttcagaacctgagctctcaaccagtatgtgatatgctcaggcaggggcactgacttcaaagtgccctgagtacctggaagagagactgccaactcctgaagccctgactccttagccagagaatctagacaagaaaacaaagaaatatgaccagggagctcactcttccacaaataggtcctagtctcattaaactgtccctaccaggcctaagcctactcctaccattgctttatatcacgctggatctgccagggcaacacaggctcttcagagggcctagagatgaactgccaacactttctgaagcccaggacccacttgtgcctgctgaatcctctgggtaaggacaggcctgcctctctgcctgtgctacagtcattcagaagatttgagccattctccaataacaagaacatctggagaacaagagacaggtgggcacccaactccagctacacaacttatggtctgtgtgtgaccttgaatgagttacacagccagtcctcagctgccccatctgcaaaatggtactactaaatgatacctgcctcagagggtggctgggagaacagaaatcatggctataaagcatttaatagcatggctgacccatagtgaacagtaattatgaatactgtaagtatacttccctgctatgaaccaaactccaccccccaacaagtaaccaagagttataaaagggttcaaacttaggctgtcagagaaccaaacacaactggttcctcaatgcaaaataatttatttactggccaccccaaagatacagacagagtggccacattctatggcaaatctaacactgttctggccatgttctgagtctcaagtcaatggaacatttattgggcacctactatgtactaggctaaatagtggagtggttaatagtgttccaggagttagacaacagtttggatcctagcccagccactaactagctatatcaccgctcagttacttagcctctcacttttctcatctgtcaaagagggctgataatagtacttacctcttggggttgttgtgagagtcagcagatgatgcattttcaaatgctttgcatagtgcctggcacgtaataagtgcaccataaatatgacacattaaattatagtttgattacactactaaattaaaagaaaagtggtcagccaggcgcagtggctcacatctgtaatcccagcactttgagaggccaaggcaggaggactgcttgagcccaggagtttgagaccagcctgagcaacacagcaagaccctgtctctaccaaaaattttaaaaataaataaatagctggacgtgcttgtgcatgcctgtggtcccagctacttgtgaggctgaggcaagaggaacacttgaggccaggagttcaaggctgcagtgagctatgatcacaccactacgctccagcctggtgacagagtgagaccctgtctctacgaaatataaaatatgaaataaaaaacagagaagtcactatttcaattattttagagccatgaggattcttaaaagtctggatggagccctcttctcattgtgtgggtgggaaaactgagccccaaagaagaaagtgatctatatacatagctgtgatggagaaggggtgagaagcaaaaagaagggactaagtgaggggcagggagaagcacagagaattaacctggattcaagaccttccctattttggcctcaacttccaacccaccctctctcacaatttcctacatgtgactctgccattggcagggtagccacctcctctctctcaaacatgctcaaaatagtgcccctgccacggtgttcatcacagtccttctctcaacatttatcgatcaccagctagatggctggcactaccctggccaccgggatacaggcgaaattccacaccctccctcttctgaactttcacaggagttaccctcaactgacacctccttatgcgctgcacaagtgattcgtgtcttttgctccttcataccctcccacaaagcctacacagagccatgcaactgtcagactttaataaatattatgattgactagtaagtaggaggatgaaagagaagaaacagaggctagtcattatactccagcagtatgtctattttttaagaatggtttgacattcaggataggcaaagcagcactgcctacttaattcccttagaaaagtcacctcccttggcctgcagcgtttagcaggctgactcattccagttgctctgccagtcttttttttttttttttttttttttgagacggagtctcactctgttgccccggctggggtgcactggcaggatttccgctcactgcaacctccacctcccgggttcaagcaattctcctgcctcaacctcctgagtagctgggactacaggcatgtgccaccacaccccgctaatttttgtatttttagtagacacagggtttcaccatgttggccaggctgctctcaaacttctgacctcaggtgatccgcccgcctcggcctcctacagtgccgggattacaggcgtgagccaccacgcccggccgtgctctgccagtcttaagaggaaattcctggtcctgcacactcaacaaaagcagagagcaacttggcaggacagacagcatgctgggaaaaggaggcagtggctccgggatcagaagtggcgggattttttgtttcagtcttgcaaccaactttcattgagcaatgacatagtggagggcgaataagatcaaaggggctgtacttggtatggaaaaaccacagaagggtggaagctaagcaccttcgccttgagagttgggtccatccatacctgaaatggacccctgtggacccttgacgaacagggcagtggcctagacattctcgtgtgtctgtcactcaccagctggggactttgtcaactcattcctctgtctaaacctcaatgttctgctctgggaaatgaaatcaaaactgttagtcctccctcccagggtagttataagaattagataatatgtgagtgagtaagcattctaaacaccatataaatgtggctagaagtattattcaccagtatgatctagtatttttggccctcctcttcccctaaagcggaagtagggccgggcgcagtggctcacgcctgtaatcccagcactttgggaggccgaggcaggcggatcacttgaggtcagaagttcgagaccagcctggccaatacggtgaaactttgtctctactactaataaaaaattagctgggtatggtggcacatgtctgtaatcccagctactcaggaggctgaggcaggagaatcgctggaacctgggaggcagaggttgcagtgagctgagatcgtaccactgcactccagcctgggcgacagagccagactccctctcaaaagaaaacccaaaaaagctgaagtaggactacgtcaaaggcccacctgggcaggctggtccaatacaggacaagggacctaaagatagatggtatttcatttggacctgcaaatgagtaagaatgccagctccgggtctattaaaaaccccgctcggatgtctcccacaggcagagctgaggtggggccttgcctgaggcttccagggatgcgctggcttcccttccaacctccttttcagacagctctgcccattcagcggttcctaatgcagaaagaatgggctccccggagcctgccggcttccttacaggtcaccgctaatgccctgtgacaggcccttggcccaccctgccaggcgggcctgggcatcctcgcggcggcccatccctcggggccgattcctccgcagccattaacaaagggggtctggggactgcctcggaactagggggccgcgtggagtgggatgtctaggccagggcccgccaaggaggagcggccggctcccgcctccgggcctgggcaggcagcgctaggggccggtcgggaagcacgaaggagcccggccgtgggtccggaggccgcagtcgatggggacagttgcggggccgggggtacccaccttctgctcgacgccctgcaagccctggcccagctcctccctctgccgggagaagtcctggtggctgcgccggacctgctggacctcctccaggacgtggtggacgcaccagcccgagaaagcggccgccgccaccagggcgaggtagaagagaaagttgagcgccctgccgagcctgcgcgagcaggacgccgaggacgaggcggcggcggcggcagcggcggcggaggcggaggaggaggaggaggacttgccgccgccgccgccgccgccgcggtggccgcccttgccgtgcgcctggttctgcgggtgctgctgcgggtgctgctgcgggtgcggcgcgggcggcggcggcggctgctgcggcgccggcggcggcttcttcgccacgtcatccgcgccgcccgacgggtgggcacccttctccgaggggctcgcggcgccgtggccgcccttggagcccctttgtttggccgagggcatggcgggcgcggcggcggctcgggccgcgggctgggaggcgagcgagcgcggcgcgcggcccgggaaacttgcaggggctcccccgggactgggcgagcggcacgcgggcgctgctggcgtcggagcggcgagaggacgcgcggccggggaaggaggccgggccgaggaggcgggaggagggggcctgcctccgccgccgcggcgccgaccccgcctcccggtaagggaggccgagcgagccgagccgggagagcttgccacgcacgccggcccggcggcccctcctccccgccgccacgaccccggagagggagggccgggcggggtctacgggggccgggaagccggcgcgggggtggctgggcgcggggcggggtcccggcggggtctgcggaggccggggtgggcaccgaggtggccgcgaggggaggggagaagagcggagcggaggggaggggacgcggccgaggtggggctggcggcccggcgggttccacgcaggctgggggcggagggccagatcgaccccagccggggcggccgagcagggtccacgggggtcggggatgggcggccaggcggggtcggagggacgaaagccggggtgaacctgcgccgcgggccaagcgcgaccccctcccttcccgacctgtgcggagaggagagaaatgaaggggggcgcccaaggagccctggccccgggagtgggagtcagcgggtgggaacagatcgcccttcctttccgctgggaattgggggactccccctgctttcactctcccagcccgccatggggttgggccttgtcctttgccttgggtttgaaggcggagacaaaaaaggctgtccaaaatccagccagcttggg

SEQ ID NO: 6181 - DNA, 6000 bp, Homo sapiens
ggtttttttataaaactaactatgctcttactacatgatcaggcaatcacactctgtgatatttacccagaggaagtaaaaatttacgtctacagaaacacctgtccacagatgtttatagaagctttatcattattactttcgagatggagtctcactctgtctcccaggctggagtgcaatggcatgaactcagctcactgcaacctccgcctcccggggtcaagtgattctcctgcctcagcctcccgatcagctgggattacagaagcctgccaccatgcccggctaatttatttatttatttatttgagatgaactcttgctctgtcacccaggctgcagggcagtggtgtgatctcggctcactgcaacccccacctcctaggctccagtgactctcctgcctcagcctcccaagtagctgggattacaggcgcatgccaccacgcctggctaatttttgtatttttggtagagatgaagtttcaccatattggccaggctggtctagaactcctgacctcaggtgatccacctgcctcggcctcccaaagtgctgggattacaggtgtgagccaccacacccagcctggaagctttattctattgaatgtttccaacacgaagaaatgatagatgtttgagatgatatatatgctcatgaccctgatctgatcactatgcattatatgtattgaaacatcactacataccccatgagcatgtaaaatgatttatcgactaaaacataaacaaaaataaaataaaataaagctttattcgtaattgcctaaacttggaagcaactatgatgtcgttcagcaggtgaatggatgcactgtggtacacccagacaacagaatattattcagtgctaaaatgaaatgagctatcaagccatgaaaaggcacggaggaaccttcaatgcacattcctaagagaaggaagcaatctgaaaaagctccctactgtatgattcctaccatatgacattctggaaaaggcaaaacggtggagacagtacaaagatcagtgtttgccaagggttagtgagaaggaaggggtgagtaggcagggcacagaggatttttagggcagtgaaactactccatatgatactgtaatggtagatgcatgccacatacatttgtcaaaaactataggcctgtaatcccagcactttgggaggccaaggcgggtggatcacctgaggtcaggagttcgagaccagcctggccaatatggtgaaaccctgtctctaccaaaaatataaaaaaaaattagccaagtgtggtggcacacccctgtaatcccagctactcaggaggctgaggcaggaaaatcgcttgaacccaggaggtggaagatgcagtgagctgagatcatgccactgcagtccagcctgggcgacagagtgagactccatctcaaaaaaaaaaaaaaaaaaaatcaaaaacaaacaaaaacaacaaaaaaactatagaatatgtttatttaatttttaatgatttttttgagacagggtctcattctgtcacccaggctggggttcagcagcatgacctctgcccatgcaacctctgcttcccaggttcaagtgattctcccacctcagcctcctgagtagctgggatcataggtgtgccaccacaaccagctaattttcgtatttttcatagagacgggattttgccatgttgaccaggctggtctcgaactcctgagttcaagcgatctgcccacctcgacctcccaaagtgctgggattacaggtgtgagccactgcgcccagccaaaaactatagaatatatgaatcctaatgtaaactgccagctttggatgataatgaggtgtcagtgtgggttcactgaccataacaaatgtactggctcgtgtgggatggtgatggtgggggaggctgtgtgtgctgtggctatacttgctactcaattttgctgtgagcctaaaactgatcttaaaaaaaaggaaatctattaaaagtggttaaaatggtaaatttcgttatgtagatgttatcataataaaaagaatgttcatagcagcttcattcataatgtcttttttttttttttttttttttgttgagacagagtctcactctgtcacgcaggctggagtgcagtggtgcaatcttggctcactgcaagctccgcttcccaggtttacgccattctcctgcctcagcctcccgagcagctgggactacagacgccagccaccgcgcccggctaattttttgtagccaggatggtctggatctcttgacctcgtgatccacccgccttggcctcccaaagtgctaggattacaggcgtaagccatggcgcctggcctcattcgtaatgtctttaaactggaaacagcgtaaatgtctgtcagctgtagaatgggtcaatgacttgtggaatgttcactcaagggaatagaaagcagtcgagaaaaataacaggggcgcttctacgggggctggaatgttctgattgggatctgggtgctggttacatgggtttgtccagtgctctatgttgacttttttgtttttgttttctgagacagagtctcactctgtcgcccaggctggagtgcagtggcgcaatctcggctcactgcagcctccgcctcctgggttcaagtgattctcatgcctcagcctcccgagtagctgggattacaggcgtgtgctaccacgcctggataattttgttatatttttagtagagacggggtttcaccatgttgcccaggctggtctcgaactcctgacctcaggtaatccgctggcctcagcctcccaaagtgctaggattacaggcgtgagccaccacacctggcctctatgtcaatttttaaagtatgtgtaaatatacacatatacagacatatacatatgattgcacattcatatacatatattcacatacacatatacatacgactctggaatcaagatactctaattctggagcgttctaattctggtctgctactcactaggtttatgactctagacagattcctgtacccacctcactttccttatctgtaaaatgggggtaataataccttaagcagtcaacaaagatacatgtcagcgctggctggcagcacatgttgattcagtacttgctggtaaatattcttcttgctgctgctcccttcggtgactgagcccagagtgtctggaaggaggagagggtccatggagagggccaatctaaactgataagcaggccaggcgcagtggtctcagttctagaccagcctggccaacatggcgaaatcccgtttctactaaaaatacaaggccgggcgcggtggctcacgcctgtaatcccagcactttgggaggccgaggcgggtggatcatgaggtcaggagatcgagaccatcctggctaacaaggtgaaaccccgtctctactaaaaatacaaaaaattagccgggcgcggtggcgggcgcctgtagtcccagctactcgggaggctgaggcaggagaatggcgtgaacccgggaagcggagcttgcagtgagccgagattgcgccactgcagtccgcagtccggcctgggcgacagagcgagactccgtctcaaaaaaagaaaaaaaaaaaaaaaaaaaaaaaaaaaaaaacaaaaactttgggaggccgaggcagggggaccacgaggtcaggagatcaagaccatcctggctaacacggtgaaaccccgtctctactaaaaacataaaaaattagccgggtgtggtggcgggcgcctgtagtcccagctactcgggaggctgagccaggagaatggcgtgaacccgggaggcagagcttacagtgagccgagatcgtgccactgcactccagcctgggcgacagagcaagactccgtctcaaaacaaacaaacaaacaaacaaaaaacaaaaaaattagctgggcgtggtggcgcctgccgataatcccagctattcgggaggctgaggcaggaaaactgcttgaatccgggaggcagaggttgcagtgagcggagatcgcgccactgcactccagcctgggtgaaactctatctcaaaaagtaaataaacaaataaataaactgataggtacaacacactcatcttgcaaactgctgcaaacggagagggggtgagggtggggtggggtgctgcatgtgccaggcctgcctggtgggtggctggggagccgacctgccctgggcctcctggggaaaaagggcagttaggcgggtaatgaacattgatctggggaaatggatcctttcctagatagcagggcctctcactatcactgggcaatcaagacgactgtaaaacgttaaacaccttctcgggccgggcagctctgcacgagaaaaccccaaatcccacatacttccaccactcccagaagccctgtggtggttaactggggaactctgtagggttcaaacgccatatttgccccttactggatgtgtgacctgcggcgggtccctgtgcctctctgggtctcagtttcctcatctgtaagacggtgatataatagtacctagctcaaaggtttaatgctggtagattcctgagcaaaggtccggggagagaagaggctcggtctgcaagagttgtcatttgttggctgcggtgagaccacgccccgtcgccctcccacacctgaccccgccctcccgcgtccattgggaacgccaccggaagtaatgcgagacggagcgttttggtggagacactcactggggcaatctgaggtaatccaacagactgtggcggagggaccggaagcgccaggcagggacccggggtagatgctaaatccaaactgaaacgtacagggctggatgattgaagcaccagcgggaactagtcggacctccgagctctttaaactgtcctcagctcggctggttctccacgagctccgggcagacggcggggggtgggtcggcgtttaagtcaaaggccttggggctccgagtcccttcctctccccgtcctgtgaaggcacgacccagttcagctgtctgtaaagtggagccattagtccctgcctcgtagtgggaaaactgggaggcggaacgaggaggccgccggtcccaacccggcccaggagcatctttctccgcagaccgtttcctggcgaggtgcgtcttcgtccttttccgcccttgggaacttagagcggccccttggccgctggttccgcgcctcccgcggttgggggcgtgcccgaagtctctctacggaagctggtagggctgtgggtgcttcactatggcgacggtgggggctccgcggcacttctgccgctgcgcctgcttctgcaccgataacttgtacgtggcgcgctatgggctgcacgtgcgcttccgaggcgagcagcagctgcgccgggactacggcccggtgagtggccgctgtcgtccctacggagcagtgggcagagaggggtagtggaggagggaagttcgtccccagggtcgtttgctttgcgcacgccgcgcaccgtatcttcaaatacaagaatgacggcctctctctgcctcggttttctcaccgtaaaggggtaatagtatctccctgtgagattgtgaggaaggaatgaacaagcatgtagggtgcttaggacagggccgggctcagcttgccgcctcacagcaacaccagcccggagccctgtcctgagcttgacagggttccgcagttcattctctccatgatcctttgaggtcggggctcctctccccattttaagcaggggaaactgaggcttagagagtgaagggatttcctcaggtcatacagtcatgctcagtgttctttctgctcccagatcctgcgcagccgaggctgtgttagcgccaaggacttccagcagctgttagcagaggtaccagtcccctgcccctgcacagctcctcctcgttagatttgtgtccgcagcttgaggacacagcttgagcctagcctcagtccc

SEQ ID NO: 6182 - DNA, 6000 bp, Homo sapiens
atagcaattttattttttgaaatggttatcctaaagaatttccttaaattcagattttgcaaaattcctactctccaagtcatcaagtgaacactaaaagcaactttactcgtgaatacagtggactctttacgaggcatgcatttttcataaatctaggccaaagtgaactaattgagatttaattctaaattcatcctgtgatttctgcatataatattggtataaaaccagtaaaaatacttttaaaaaaagcgtttacttcccgagtaatttagtttggaaatatttacattcttagtcaaaatattactttcagagtctaaaggttttaaaaacaaaattggttcaacaattatcaaaacgaaacgactatgaacactgactagaacttcttaacccacagaagtaaaccacttcaggtgagttcagctcacttattttattattattttttttttttgagacagagtcttgctctgtcgcccaggctggagtgcagtggcacgatctcggctcactgtaagctctgcctcacaggttcacgccattctcctgcctcagcctcctgagtagctgggactacaggcgcccgccaccacagctggctaattttttgtatttttagtagagacgaggtttcaccatgttagccaggatggtctggatctcctgacctcgtgatccacctgccttggcctcccaaagtgctgggattacatgcgtgagccaccgcacccggcctcccctcacttaatttttaaaacccatttctcttctccagcttcacaactggactgaacattgctcaactgctcaacaacattacctatgtcaaaagtgaaaagataaaaagtattgtaaagattgcacagtgagtcaatctgggaagaatatactgtacaatcagcatttcagagctggaagggatctttaagatccaatccagcacccacattttaccaatgagaaaactaagcccaaacacatcataataacttgaccaaagttacattcctcagctgagccattcattcattcattcagtcattcattcacccacttactgaaagctgcctaagtgccaggctcggtgctaggagattgaaagcaccattcacaattgccaaggcagtcttttttccttgcatttttaagataaattcttaaatttcctgatcagcagaactcgtaggagagttccacagccttggtagaacctagcccactttcagtttcacacattttaataaacatagttgggtttaacttcagagaggcttcaattgtgtttactttaaatgattaagcattaacaaagggaggcatagtattctggatgagtccctttctagtacattcataacttaaggaagtgcaatcagaaaatgccctacacacacaaacacgttcacagagaagacagcttacaaaatcagaggaatctgaggtattaatatatacatcagtgaagtccaatagctcaagtttacaaagtacggaatgtaaatatctccccatttcatttaaatatgggtatgtctgcatgttaaaaaggcctccaaactcacactcaaacaaatgccctcttccaattacacatatctctaaaaccaggccttttgccttaagctcaattttctttttgattagaaaaaaattagattaaaaaataaaatctaaaatttaatgtgctggctaaaaaagaaatacaaattctatgtaatcaaaatagcaatggctcaaactgcacattcatgagttttgttaaaaagtgggatgtgcggtgaacttacacatcaacataaatcatacctcattttacttggacctttacattctttaatattaagtctggcacttaaatgttttgtgtgtttcaattcatagtcaacttcttttaagaagagaccatattgacaaaactcttatataaaacaaccaataagtaaggcattgtgaaatattaaacagcagcactctgggtacccagtttcagtgtgatataccaaaatgaaccccagctttccagtgctccacagatgactgctaggtggcttttgataaaataaaatacaatcttcactgaggctcttaaggctctttgactttcttgacactactgtcagctcatgacgaaagtgctgttgtgctctatttctcaaaactccaaatttgatttttatctagagcatcacaagttctcatttgtacatcaggtcggccctccggtgtccgataagcactaagacacagtcctgagtgtgggtgaaaaatagttccatcttctttaaaatgccaaataatgtttgctggtacagggaacccatctttgggacaattttgcattcccacataatttttttgctcaggtacctctgcacataactctgtcacagaattaaaccttatttctttgtttgaagtatattcaaagaattgattgcctccttgaccatggcatccaaacagtgaaaggttagcacctgtggggttgttgtcaggagaattataatctaaacattcagacgagatccctctactgcgaatagccccatgccagcctggtctatcctctggaacatgtaaattaggaaaaacgtttttcaaataccagtcaaagctcttgcatctcaaccgctctcgtagtaattttctttcagaaatatcaccataagcttcttttcttgctggagggtttctattgtagaagtgctctttgtattcatccatccaaacttctgctgcccgagcagtattctgtaggaaattggggcgagcatatggtgcccgcttggggaacacatggcccacgtgggaacacgggtggatctccaatttgccaccacactgccacaccctaaaagacagctcaaggttttcacctccccacacttccattcctgtgtcatacgttccaaggtactgaaaatatttcttgctgacagcaaacagtcctccagccatggtaggtgatctgatggggtcaattcttgatatccgcctgtccctttcctgtttggggacagaatgccactgaaatgttaaacgccagtcaaacccaccaatcatgggctcccctatctgcatatagaattcaaaagtattccaatcaattgtgtctataacaggacacacaactgctgtttcatctctcccaatcctttccaaaagcggttccagccaaccggaattacactcacagtgacaatccaggaaagtgaggacgtccccagtggcgaaagtggccccaatcagacgggccctaaccagcccctctcgcttattggtcctaatcaagcgtactctatcaagattgctgatgtaagtttcaagttgtgtcttcaaataaactctgtcactcaagtcatccaccaagatgatctctttcaaaagaactgcaggagaagtttctaaaacactgtgaatggtacggagcaaagtcgaccaggcttcgttatagaaagcaatgataacagaggtggtaggaagtgtcctatagttgaacttctgggacttacactcatacattcttttatcctctatgtgtcgatgcagggaaatcctgtcactgaggtaaatattgatggcgtatctctcaatgagttcttcttgctgcttcagttcatcctcgttgagctggagtttgctggctttcccccactccccaagtgcacgggaatctgcagggggcttcttataaagcggtcgagacaaatcctccgtatttttctggaggtctgagagccttcttgaccccagctccctggcacggccggctcctgcggaggcatgaaaagtagagaccaagagctccacgaagatataggccactgttaaaaacgccagcagcaggcagctcttgcctgcccaagtccacctcaccgccatccggattctcagggctgaggcgcagacgcggccaccaagccaccacgcaggggaagggcggcggaacccacagctcgagctcaggtacttcccagcaggttcttcctttcatgcaggcgctaggctcctttccagccacccaggctttccaggggtcacctgagccctctcggtcctcggcctccggcacagcccaactcctctctccctacttcctcctgctcggctcacaacttttcacaaactctccagccaacaccccaccctccccgggccgaggagaaacccctccccttcccactcactcctcctggtggttagtttgcgaaagtcgtccgccaggcccagaccgctggataggaggctcttggccgggccgggggctgggggccgggatggcagagggggccctagctgcgccccgccgcgctgggccctcgtctccgggtgctctcaaccctcatacaggcccttagccgttctcctagggaccctgcccggacaggaggaaaggtttccggcccatggagtttagtctcattacaaaagcaaaacaagaataagacttaccaagttgcttgccgttggggctgaggtccaaggaggtgatcgcagctttgtggcctttgaaataacgctccagaacggggtcctcctggaaaggaaagttgtcaagttttgaaagccgccgcagacctcgaattctggcggctgggatccacgctgccacttccccggagtccggcttgggaatggccacccaggcggcggcttggctgggcggcggggccgggcagcagcccacccacgggcgcggcgcccagtcctgctacagggagacgccggcgccagctctccccgcagagcccgcaaaacgctctgttcgcgcttcccagagtccagcgcatcgcaggaaccgcggcccctttgaaatgcacgttcccgggccccgcccgctggcccaaggcaggcaggtgcgaggatgcgcctcggctttggtactttttttttttttaatacttcctaggtgattctgacgcaggcgctccacggaaaccctccgagaattctgggggccgtggggccgcccagctcagtccggagctccggaactcggggaagagcgtccgggagccgggtctgggttccgcactccgtccgccccgatggcagagagtgagatacggacgccccgggacgaggggctcaggacccggctacggacacctgcctccatctccctccaggtgcggcttcggcccggacctggccccgcagcccgcgggacaggctccagggagggaccccccccacctccaacccgtccttaccgtggctgaggccatcgggggagtggtcggcccaaggctcctgtgggtgggggaacccggagaggggaggggagaggatggggaaggagaggggaccgtgcggctcccggaaccgtctgcccagagcggcagcgcctcccggtcactacaacaacggcggcccagtcaaaccccgcgctccaggcatggccagccgagccccgagacaccgccagccctgtaaagagaggacgggaggtatgcgccgggtcagctgtggccacacaccaagccatgttaactaacactcgcgttctccctggtttgatgtcaggaagtggggtagtaaccaggactggaataagagcgatgaatggaagggcgttgtgagcctgtgatcgatgcgatcagagttctattacgttttaaagagacagcacccgtgacgtttaaggtgatcccctaccgcttattttgttgacgtaaagctttgacatgaagaggggcagcttgctagttattaatatactaaaaggaactaaatcccctgagggcagatttgaatttatttaaccactgttttccacacagtgccctgcaggatattgatatagttgctggatgtgcgtgatgaatgaatgagtgaatgaatgaataaatgttgtgcatgcacttaataattttctgcgatatgtttccattctcatctgcttatttgcgtataccttagagcactaaacttacacagctggatacttaaagtctttaggaagacttggaaacatggttttttttgttt

SEQ ID NO: 6183 - DNA, 6000 bp, Homo sapiens
aattattatccagggtgatcaaatcaaatggcactacaggaaacacagaaagacaaacaccaattgcatagattttctccctgagtgagtcattattacatggtcagagctttttttttagtaaacattgtctagatacggtttactggtggcattttgaattgtgttcaaaatccagcactgaactcagttttgccatatggttatgtgagcctgacacaaaaacaatgagctaagtccattaaggaatcacagaaaaaagtttttacagaaacaaatggttctcaaagatttttttcagttcacagtcctctatagagggacaaaaagcaatatactcctacttgctcatgttaagctatcttcttaccgaagtgaatgggagaaatgaagttgctttcgatctaaaaataatgtagtgaatttcttgtttgtattaaataccatgagtattaattcattctgagtaaattacaaggcatcagatcacacaaataccacagtagagcaaatgcctacccagagataaaatcctccattctctccccaagatttttgcaaaaggatggtcccaattctctttgagaactaccactattattttcccattttacttggagactatagtttctctctaaacaatcctttatagaaaaggacctcatatttttaatgtcgtctcactttggcatgttatagaccctattaaagtttgtcaaagaaaaacagtctcccttttgaaagtgaacaaaatgttctttatcttggctatatttccctttcaattcaaccatctggatctaaattaaggtaccctactttgaacacgggtgcgctcaccatctggctacccaaaagtggcaattatttcaggtaaacggacattttacctaattctaagcaagcatactcttttgtcggagactacagcataaatacacacccatttttatctgcctgctgcacacctagttgatgaaaaagtgagtatgtattctgcctaatttacttattggtgtgtagacatgtggattttaggagaatttattttcaatgttcaacaactgtagtaaccaagagtagagaatttgtctcaacttgggaaaacttgggcttcaagagggagctcgtcttctaacctttgtacattacagtatggaaatcaggaaaagcaagtcttcccagttgtacaaagccaggctacttacaacacccagaggtgggtaaaaccttccaggggtccaaggtatatagcacacagtagaatctaatttccctgccgtcaccaaaattcttttgctcaggtctctgagaagcaagttgaagaatcagactgataggattttaatgagttagtgtttccacataggctaagagaagtggactgcactgtagtattgctgttttaagcatttcaagttgctcaatatgacttcctttatcagattacatatttgtttttattacagacattaccctataattaaattggcaaaattatatctaactaaaaaccaaaatgtttaatcattaatcaaatgaaaattcagtgcttgcatctgcgtcctatttgaaagtgggttttaaaatgccaatttacattgcattttgtggacaacataaaagtccaaccctagctgagatgctgatatgggtctgtttaaaaatgctccatgctccaagtggctatagtaacaaaaaatgtttaataaatagaaagtttgcataactatgaaatggtttattagatttatttcttttgtcttatcaactccagtagaaacatccaagaaattataagatttactctaataataataatgaggaaggaaaaaaaaatgaagaacaaggactttctctaagatgctgtttagaaataaaacaatcctgggattttcagaacactgagttctgcatttctattgggatgaagagtttaactatatgttaactaggttgaacttccaaccaagttgtttacttctttggggaaaactgcaagagagtttgagtacaaatacgcactaggggtacaagaaatcagttacggttcaagcagaaacatctggtctttttaagagtcctgttaatttgaaagcattgaccaaaacaagctcagttctgccaaacatattttggcatggctcaaaaaacaggatttttcaaaagcatttatttcactgcagcaagatgtatcagtaatgatatgcaactcccactattgacattttgacctaagaagcttgttcctaaacatagtatgcaaatttgttttctatgcctttcccccgtatttgacataattctgggtttaaaaaatatttttaatctgtattctttagaacatgttggaggaagtggtagaagggggtttaaaatatccatatctaatgtcaggagtaagaaagtgaataatttatacattcacttataggaggttttaactatcatacagctactaaagcattgggcattttatttataggaggttacttcatagaactctataaataataaaacttttgcttactttcacaacacattgcaatttccccagcctcttacacaataacttcttctgagagtttccaaacaccataagctctgtctggtccagggattagagaaccaaagttcaagtcctaactctccactgacaagcctgctcacctccagggccctgggcttctccgagcccattttctgctgttgtgagaatcacctgagaaaaggagaggctctgcctcattactgatctgtaacctgcctcctcttctaaagttgttggtttaatttttaagctcactttggttgttcatctgccctcagtcatttaattaatctaagttatcttagcaatgtgggaattagagcaaagaacaagaatcacttattcattcaacaatatacctgagagcttactgccacaagacactcatgagagctagcatttatggtggatactctatatgccaggcacaggggtaagtactttgtaatgcattcactcatagacgtctacaccaatcctacaagtagaatattattattggtatccccaagttagaattaaaagtctaggctcaagagccagactccctgggtctaaatccgtgctttgtctgctcactcttggtgatcttgatcaagctatgtgacacacctgtgcctccatttccccacctgtaaaatagggaatgctgataatagcgtctacctcatagggttcttgtcggattgagtacatgggcgtgcaataagcactagaagtagtcatgtcaggaaaaggttaattaccttcctcaaacctccaccagagttagatgaacagcagagattcgaactcagttctattggattatgaggtctgagctctaaacaagtggtgaaaagctccacggcctctcggaaattttttataaaaatacaaaactacacaaatgtaaaacgcggcaaagacactaacaaggcatttgagactgacaactagctttcccaccgcttggccactggaatcatctccagaggcagcaactcataaacaaacaaccggagtcgccctgccttagcacagagctggcagcgcccgcgaggccacttatcgctggctctggccttggcaacctccacccccgtcccggtcctctcagcctatctctggaaaccactcttttcactccgaatctcaacttgaagtttggggaaacttgacgcagccaaagcccatcctctgctctgcacctggcaggagactaatagtcagggaagatgggcatgttgtgggtgggggtggagaacggtgtgtccctgacctgccctgacatgctaacctggatgcgctgttgtcttggccttcagcgccacgtattttccctcgacagtaacttggcaagcttttcatgtcactctggcatcgctcagattatcagctacccttcagaaaaagagccctgcgtttcgatggctaaggaactctgacaggaagaggagaggtcccgactagaggagggggcagcattcatcttttggcaccggtgagtcagtttgcgaagttggcggcagcgagaccccgaggcatctgggagaccccggagttctgactgccctactccgctttcgtttccttccccccacccctggcttcccgggtattggaagccagctgggtccccggggtcgcaggccgcccagaggttcgagccgcgcgccggggtggggcagcgcggggcaccgcctccctccataccttctctccccgtggagcacataggagctgcggaagaagcccaggagctcattctcgatgagcgcgttgtagataatcttcagattgtaattcctctgcgcgtccagtgtcctattcagcaccaccactaagacctgggtttgcgggtagaggaaaaaaccggctacagggacagccccgaacgcccggtcctcggccagctgcactttctccaccgccactcgggaagcgtgcagcactacgtagcgggtggcgttccggcacgcgatctccacgttgacctccccggagaaggtgaagttctccatgaaggcggtgagcatcagattgtagtgcagcggcttcaggtggcccgacaggcgcagctgcgtccacggctcccacggctcccgctcctcctccgacggcggctgggccgacgtggtccccggactggccaccccacccgcctcgggctgccaggagtccccgcctgcgtggtggttgcgccgggccgatccagggaggctcccgttgccgccgcgctccggaaagcctgaggggccaccgtcggcgcctggcgtggcactcgccccgcactcgtcgaagcgcaggctgagcagcacagcgagcattgtgaccgcgagcaatgccacgagggacacagcgaaggccagcacaagccgcttgtgtacggcgatgtggcgctccgtggtgcggggtcgcactcccactgagtctgcccacgggtcggagagccccctgctgccagcccgaagcgcggcgtcgtcttcccccatcgcggctgcgaagggtgagctgctcttctcggccccctcctcctcctcctcctcctccttcttcttcttcctcttctttttcttcttctttttcttctcctcctcttgctcccccagctcgccgtccagggccatcacaccgcctcctcctcctcccccgccccctctggcaccccccgcgggcgggccacccgggccacagccagagcaggcatcggagagctcacgcgggccgagggcgcgcgactggggatgctggcccgggttcttttaagacgggttctggacacaagcgacggcagcttccgcgacccccatcagccccgcctcactctggacaccgggctgtgagctctgggacgcgcccaacttggaaagcgtcttgcttgcccagcgcgcgctacttctcggacgagcacccggcggcggggcacatgctgcccccgcccctgcgcgcctgcggctcccggctctccctcccctgcgccgcgctctcgcctcgctttccgcgggagccttccaaccggttctcggctagggagaaggacgggagcggtgggaagagcgagggtgtagagagggaagttagggctttcgctttctccccccactccagcggcggcgttcggtcctctgggtggaatgtgctcgcagcagcagtgacggcggccacagcacgggaggcacccgagccatacaccctgcagctggagagaaaaggatggccgaggtgggagagactagagtgaaccagcaggaggaagtcccagggccgcgaagctacgacggagatccgtcctggaaaagccttctccaccctgggcactttaagcggcggtggcggcaaacggcaggaggttgcagacccgacagcgagactccctcattccagtcttgctctgccctccggagatgacaagtgagaaagaagtgtccggccgggccatccccttcaggtagatgaagctctgggtt

SEQ ID NO: 6184 - DNA, 6000 bp, Homo sapiens
gtccagcctgggtgacagagcgacactccgtctcaaaaaaaaaaaaaaaaaaaaaaaaattcctcataaacccatgattaaatagaaggtatatgcatgcaaatagttaatcttggccaaatccacattaatgcttgatttgtcttaaaatgttaaaaatctcccttatctgcaactctcaaacataatttggctttctcctataatataaataaatattcttttattcctttttaccactccattatgcagaagattataaatattctttaagaaatatgacctggaggccgggagcggtggctcatgcctgtaattccagaactctgggaggccgaggcgggcagatcaccagatcaggagatagagaccatcctggctaacagtctttactaaaaatacataaaattagccaggcgtggtggcgggcacctgtagtctcagctaggcagagcttgcagggagccgagattgcaccactgcactccagctgggatgacagactgagactccgtttcaaaaaaaaaaaggaaaaaagaaataagacctggtattggccgggtgaggtggctcactcctgtaattccagcactttgggaggccgaggcaggtggatcacgaggtcaggagttcgagaccagcctgaccaacatggtgaaaccttgtctctactaaaaatacaaaaattaaccaggagtagtggtgtgtgcctgtaagtaataccagctactcaggaggctgaggtaggagaattgcttgaatttgggaggcagaggttgcagtgagccgagatcatgccactgcactccagcctgggtgacagagtgagactccatctctcacacacacagaaggaaggaaggaaggaaggaaggaaggaaggaagggaaaaatatggttggccgggcgcggtggctcatgcctgtaatcccagcactttgggaggctcaggcgggtggatcaactgaggtcaggagtttgagaccagcctggccaagatggtgaaaccccgtctccactaaaaatacaaaaattagccgggcgcagtggtgggcacctgtaatcccagctacttgggaggctgaggcaggagaatcgcttgaacccgggaggcagaggttgcagtgagctgacatcacgccactgcactctaggctgcgtgacagagcaagactccatctcaaaaaaagaaaaagaaaaaaagaaagaaagaaaaaaaaagaaatatgacctggtattatttttatatggggctaaaaatgaccaaaacgtaaaatatagtacatataagaggaattgacatgaataattttacacataaattattataaatttcttttcctgtaaacttaaaattattttttcctatggctgataaaaacatcgaacagactcctaattataactcacttgtacttaacgtactttaaaacagaaaatgacgctgactaccaatatttttcttcaagttgttggcatggctattaagctcagtcaagggtaaacacctcttgagttttaaatactccaggtagaagacatttaaacctgtaattatgaagtaagttttctttatatggatgaaataattaaatgaaacgtaaagagcttaattaccatgccaatagacctactaggtactctaaaaaacatgacttctgggctgggtgccgtcgctcatccttgcattcccagcactttggaaagcccagggggacagatcacctgaggtcaggtgttccagaccagcctggccaacatggcgaaaccccttctctactaaaaatacaaaaattagccgggtatagtagtatacgcctgtaatcccagctactcgggaggtcgaggcaggagaatcatttgaacccaggaggcagagatgaaatcgggccattgcactccaacctgggcaatggagactccgtctcagaacaaaacaaacaaaacaaaataacaacaacaaaaattacttcattttggctgggcgcggtggctcacgcctgtaatcccagcactttgagaagccgagacgggaggatcacgaggtcaggagatcgaggccatcctggctaacacggtgaaaccccatctctactaaaaatacaaaaaattagctggggggtggtggcgggcgcctgtagtcccagctactcgggaggcggaggcaggaaaatggcatgaacccacgaggcagagcttgcagtgagccaagatcgcgccaccgcaccccagactgggcgacagagcaagactcgtctcaaaaaaaaaaaacccttcattttactcaaaacttatttacatgatgctaaccaacttcaattaacatatgagttggacagacaagtaaataaacacaattcatttttaaatccccaaagttttaaacccagtagttaagaacacttggtaggaactcaaaattgctggataatcttaattaaaaaatttttacatttaggtcttcttaccccccaaaagaacacaaggtagatggggacataaactctcttttaccaagtggctgataggaaaacattaaaactgagatggttgtttctgtgtaaaagaaatcatcctcaaaataaataggaaccaaggctgaggcaggattgcttgaggccaagagttctagaccagcctggacaacacagaaagcctgtgtaccaaaaaaaaaaaaaaaaaaaaaaaagattagaaaattagccgggtgtagcggtgcatgccccgttgcccttgctactcagggaagctgaggcaggaggctctcgtgagccaaagagtttgaggctgcagtaagctatgatcacatccctgcactccggcctgggcaacaaagcgagatcccgcctaaaaataataaccagtaattctattataaacatacaaccaaaaacttcacggtttaatacttttgcacagaggaccaatgaagggttctatagaaaattaggttttttataaagtgtgctgatttaaatattattttcaaacaacttttttttttttttttttttgagacgaagtctcgctcttgtcccccaggctggagtgcgatggcgcgatctcggctcactgcaacctccgcctcccgggttcaagcgattctcctgcctcggccgccgccaccaggcacggctaatttttgtattttttttctttagtagaaacggggtttcaccatatgggccaggctggtctagaactcctgacctcaggtgatccacccgcctgggcctcccaaagtgcggggcttacaggcgtgagccaccgcgcccggcctcaaccaactctacttaaagagtttaaatactaccttctttttcagagcagggaaacataacgggtaagcgggtacgcttttatttcaaaagtaaatttgtttattaagaaattaaagaagctttccgcaaaacaagatgtttaaacaataaggtgtgattggtcttttatttattgtacaaatatttggcactactatgtgccagacaccggactgaagacgtttggtaaaactttcaacttctctgaagccgagaataagattttcaattaaatttacatgtgtctattacatttgtctttcatttctgcctgagtagccgggaaaacacattagacaggttccttaaaaactaaagtaaaatttgaaggaaggaataatttcggtttaaactagtgatcattcccaacaactccaaacaccacattcactgtctcttacaaggcattttatgttacaccaattactagttttagcttcatcctattacgatttgaagcctggtaactcggcaggcataagcaaacccacaaaaagcatattaaaatccacaggtaaaaaagcaaactattctgaaacaaaacatgctttgctggagccgatttgagatttaaccaggatcagacattccaaattgcaatactgatgcaccagaatgtcatgaaataaatttttcctgaatcctaagtctttcgtttcctcaagcaaaatttaccaatatgtggggaaaacgcaatccaaactgcaattttcaaatatttgtttgcagggccgggcccggtggctcacgcctgttatcccagcactttgtgaggccgaggcgggaggaccacctgaggtcaggagttcgagaccagcctgaccaacttggagaaaccccgtctctactaaaaaatacacaaatcagccgggcgtggcggcgcatgcctgtaatcccagctactcgggaggctgaggcaggagaatcgcttgaacccgggaggtggaggttgcggtgagccgagatctcgccattgcactccagcctgggcaacaagtgcgacactccatctaaaaaaataaataaataaaaactaaaaaattataataggcgcctaaaaatatagtttaaaatgctccttttaattcggcatgaacctgttccgccaaaagatggcctgttgctgggaaaaattaaaacaaactagaaaacataaacggttcaaaaagccctccacacgcaaaagtataaaaaggcgggaatttcctcatttcaaattttggttagaaattagagtgtcatcagttgccctccagggagcgctctgagactctgctgcgagtcatttcagttaataaagcgggaaaacgctcgaacttaacctatagcattttggggccacccctccagagctttcgaaagggcacggaagtccccgtctaaacgcccgctgcaggcggctggtggtccagggaagcggcgtcgactgcgtgcaaaacaaccgccgccaacgcaactccacacctcccagacccacacgtcaaagaacgcgaaccccgcggccccaacttctggcctctccgctccggcgcctgcagccccgcggggaaggggcgacgcgagggggcgcagggacagccccgcacctgggaggcccgagggggcgcccgggagggaggggctgcaaacggcggcgagcgcgcgcggcaaccgccaaacgcccgcctttgtagccccggccccgcgtccttaccctgccgacggctgctcggctccggcccgcggcggcggccccagagccgaggaccggggtgggctcgcgctcttcgtcactggagaagtccgggggccccttgctgttggtgccggcggggagcggcggccggttgcgagccgtgaggtgctgcaggtagagctggacgtacacgtctttgcgctgctccccggccggcagcgtcacattgttggcgaccaactcactcttcaacttgtcttttgtcaggaccgaggggtcttccaggaactccggcatctcggggatctgcgaagccccctccccacagcctttgccgccgccgctcacgccggcgcgcttgctcctggccggggaccgcgctgccgcctccgagcctcacggctcctgcccgggaagagcgctgcggagcggaacaaaaactcgcggacacaaagccaagccagacccggacacaaaagaccccagagccgaactacgaaccaactgcggccaagctggaagctcgcaccaaccccagcccacacactacaggcaggaggcgagcagcctgcttcgcccacgccccaagaacgcgcgccgccattggcgggcgacgggaggaagcgcggcggtgattggcgagacggctcgcgcgggttccattagccgccgcgctgagcgagaggaggtagaaacgcagtttaaaaggcgctggggcgggagccgaggctcccggcccgcttctgttttcgttttctccacccttccccttagacgccgataagggacaggtcgtactgcttttgtgcgccgtttcctctccctcccccagcttgagaagcagctttcgtctctggggtcgatcgcctacgaacgcgccgaattccacgccagtgtgaggacccttggctgggcctttcttcctcccgggacactgaagctccaagagtagccgcagccttgccttccccaaacgctagccctgaaggggaagaaaagaagcga

SEQ ID NO: 6185 - DNA, 6000 bp, Homo sapiens
taataaacatgttatagtataaaaacaagtgcataaaaagttacagcagaaatttaaagaagaaacttttagtacagcacattttatttttattcaagatttaagacacccctaggccaacagttctttgaaatcaaaattcctaacttaaaaaaatccacaatattaaaaatatagtatttcagatacgttcacattcactcagctgttaagtaaatcaaaacacaaactgtttgtattacaccaaatataagtaatgattaaatttataaagctcaacccaaacaaacccattcatatttctctattaaatttactctgatcaaaactgattttccatacataactttcataaacttacataaacgtgtataatgagaagagcaatgagcaaaatctagaagccacctaaagtccagtttgggctaaaaaagctgctagctatatgaccttagggcctagacaaatcactttgcctaccagaaaaaaaacaaaaaacaaaaaacaaaaaaaagtacaattgtctgccttactcaccacacaggattattgtgagaatcaaatgaggtcatatgtaaatacattctgaaaactgtaaagtagttaataataatacctgtgatttctgaagacagcaaaatttgagagacactatctttgggcacctgctgtaaaatacacaaactaccaccagaaaaattaaaatgtatatgccactaaagaatcaacgaagaacataaaaactgaccattcagatttaattagatattggacactattgagtataccgtattctgaaaaatacaaatacaaaaattcgattcgattacctgtcctatgtccccatttataacagaaccatttcttgtgttaagatataaatgaaatgtgatggaccacgagagttggtaattgtcaaaactggccagtaagtatatcattctctctactttcctatgtttgataatttctataataaaaaattttaacaagacaacaatatatgtggtatgtatagataacatttctaaaagctaaaaagtgaattttttaaagttatttatctttatgaaaattattcccataaccattgtatgttattttcctggcaatgtcacctcagattccacctagtcccaaataagctactattagtacctttattacatatcatgacagctactagaaaataattattcccttccatctggtcaatactcttgcccgagatgcaaaaacctaaatgtttgtttctgctttctgatcctcagtccttttattgttttttgctcatccattacaaaattccagaataaaaaagtgaaaacatcaattttactgtattcatgtgtaaaatgtaagggaaaaaaaccaaatattattttgttcaatattacagaagaccaatagttataagtggccgttccttttaaaactcatttcccatggtaagagactgttgcatctgaaatgaagttaacatgtctgtcagtcaaaggaaattagtaaatcttactctgaaatcaaggaatctatgaaagtatatataacaacatataattactctacatgcaacaatctaatagctcaaataatgtcctttatcccggggccatattccatagttcgacagagaacacatagcagtaaggggataaaacacctttcatctcagagtttttggctaattttagtttaataaagacttatctacagctcaatagccaatgctttacattgtctatagagaaattgcaagtgttgaatgaaaccttaaatgcagatagaagggcagtaatattttgcggtttgtaagtaagactatatgtaataatatccacatcttaattcattacttgggagctaaatcccttttctcatgttacatcaaaaaaggaggctgtgcctaaagagacagtgttccttatacttatgatttgggaaggaagggaagggaaagaaatctcaactgtcactacagtaactcttttctaagtattaaaatctccatttatttttacatgagatgcacctgagaggagccatgtatacaaaccactttttctaacatggtctttattaaactttgaatataagtacacctgctcgaagtgttcatctatattatttaagaacaagcaactgtaaaacagtaaaatcacaaaaggtaagttgttggaagacaacaaaaaagaattactatatctgatcctgcgtgtttattttagaatctgttaataggcctacagctaaaaaaaaaaaaaaaattgtaaagccactgtcatactggtaggtacctttatttggtggcaatggctagttcaaaccacctattaaaagcagctattactttccttcttttaccaagaatatccagaccatcaatattattataaacacaaatcaaaactagtttctcatctcatctcagaatgctaaaatcccaagcttcaataaaaaaaagatttcccatacaattgcagaaatttctctcaaaagagaaatgagagaatacagaaaaatgaagacaattcccccttacacgtcaaaatggggatgccaataatgacagctgcgataaaaatcaagaaggcgtaccccgaattttcaccattttaataaaagaaaatcacgaaattttaaattaaaggtggcgctctgtcctcaactcacccgaatgtgactcacttttgcagactatatggtaggaaattaacagttacttttcaaagatctttgcagttacacccaagccaaaatcaggacagagatccacccttaattacagcaatttagctgtcttatctaaagcaaggtaaaaactaaaacgtcctcctgaaatcatagctaaataagcccatttcatatactagctatcaaaggttcccaattaaaaaaaaaatgtttctatttacttcaaatttgaactcaccaggaggataaagaaaaagagaggggaggaggaggacccaaatgaaacgcacaagtacaaaaagcagattctcctccaatccctcttaattcccccaatccacccctgccacacacaaggacagggagtctcgggaaggctggcatcggggcaagtggtgaaggccctccattcactcacgtgggccaccatccaaagggttacacaccctctgccagatgagagcctcatacaaaccaggcccttacaagtacttcttattataaaatacacccacgctgaacaaaagccttattttaaaataagactgtcctcaggtgggggaggttaaacacaacaaaggcttccatgttgacaggcagacaagttcagatatatgcatatacctacacacgtatgaaaaaaatctatgtagctaatttatcacgaacagcaatcgataccaacagaagccattagattattaataaaccaagaaaagtagcgggcacagaagcgaaaggtggctgtctgcagcgctctaacccaaagaaaaggtaaatatcagcctgtcgaggagggtcgagccctccaagtacctgcagacccctttaacccacccggacgccctgccctcccctccgagccaagcagcgcacagggtgcgagcactcccagcgctgcgagtcccgcagaaaactggtgaatgaaatgcgcacagagaccaacctggctggtgaccgcggcgcagaaccaggggtcgctaaccagcttagccacaggattctcccgcaggatgggataaagagagcacagcccccaccccacacccctgccactggaacgcggtcctcctacagactccttcctcaaaaagggaggtgggggcgcaggcttttttctcttaaactaagtgaataaacacgaatcggaaacaactgtgaacatcctggggggccagacggaaggcgtgaggagaaagaccaggcggctctccaactcccgaggaatcaccgtcctgacacgccaacaatcaaccaccagggccaggggccgaccaggggcccccgctcccctcccgcagtgcgtctggggggccgaggccaaggattagaggggtgaccctcccggggcgcggggagagggagtgccgggcacggtgccctcaaggtcaccacgcgccgtggcgggggcgaccggtggcgggatgggctgtggcgcggccgaggcggcttcgtgaagccgaagacctgcgggtgtagaccagaagccccaacaagccccatccctcgggcccggagcagcgactcccagactgacccggcgctgaggtgcacggcgagaagcccgctcaccttcacaatctcccggcaagaggcaacctgcgaggggccccgaccgcccccgtcagcttctcccgaatccggcgcaacccgctgcgcacccagctatcaggatccccgccgcgacgcccgacctccgtgctccgcctggcctcccccgcaggtgacctgccccgccgcccccggccgcgggcgggcggcggccgccactcacctcgcccggcagtgggaaccattttccgagggggaaggaaaggcaggctgcgggagggtcgcggggcgttaaggggcagcgggaaacgcagaggatgggggctccgtcctcagcgcgtccgcagccggctcgcagggctcggggcgccacgcggaggtgcagctgcacctcggggatggggcggccaaggagccgagaggctcggcgtccaccagccggggctccctactcacgctgcactgcgaggaggcggcggcggcagcgaaggaggaggaggcggcgcccggccgtccccgcccagagcccggcagccaccgagtggccgcccgcgtccccgcaggacccgcctcctcggctccgcagagcggcacacagggcgcgccgcgctcgctcggcacgggcagctcagccggcctcacgccgccgtccgcaacagcagccgcgggcggggtgcagccacctccgtgagcgccgcagcccgccccactcggggcggggcccgcgggcaccggagagcggacggccgagcacgagggggctgcgcgcagctccgggcagggaccccgtctgcaccgggtggcctgcaagattgccggggtaggcagggggaggagaacgctcacccgttccggtctggcgctcccttttctccacacccacacgcctcccgctccacgctggcggcgcagctgctcccgctgccacagccgccaccgccgccgaagctcgcgccgccgccgctgccgccttggctgagcgcggtcacgtgacgcgatccgcggggagcctgggggcgggcgagtgcgcgcgcgcgcgcgcggaggaaccgcggctcggaccgggactgggagctgagcggcactgggagggcgtttaaggggaggacccggcgagcgcgccctcggctggcgagcgcgcgcctggcgattagaacttgccgcgcggtcgggaaagggtggccggagtgaggggcggaggtggggacttgcgcctccgcacgcccctccctttcttccttcccctgagcgccttggcttgccgctgcccccgccccctccagcgcgccccttccctcctgccgcagcctgcgattggctgagaggctctgacgtccgtgtttccatgacgtgttggtgcaggagggagcggcgggggaggagggggtggccaggcgcgcggggaggtgactccgtcagtcacagctgctgtttcggcgcggggccgggccgctgccgcgacgtgtggaggcaggagagcgatgattgccgcaggagaagtgcgggcgcccttcacctggggcccctcccgaaccgcccccgggcccatgcccctccagggcccaggagcgagccagcgggagggcgagggcgagcgctcctggcgaggacagattaaggcgaacccccagtcagcggacatttgagcggctcctcgccgcgtctctgcccccactccaaaccggactcgacgcctgtcccgggccgtgacgcacgcaccggaggaaaaagtgcttctcggctcgctccctcttt

SEQ ID NO: 6186 - DNA, 6000 bp, Homo sapiens
aaatgaatcgtttctatgttggtttagtttctctctaatagacctgactagagtcattaaaagaggtcagaactctgtgtctagtggcggcaggctaccccctactccgttgatcacaggtccccaggaatctggaagagtggagatgcggtcttggctgtggttcagttgtctcatttgtaaatgggaataacatttccccacctcgtaggtttagtgtcaatcctaaaagacctagtgtaaatgaaaacattgtaatctgaaaggtgtaaacagacattaggtagtattacacatacaaagcatataataatagtaaacatagtcctagctatgttccagcatttttaaacagtactttaaatttaatttttattttttgagatggagtctccgatctgtcgcccaggctggagtgcagtagcgcgatcttggcttactgcaacctctgcctcccaggctcaagcgattcttcttcctcagccacccgagtagctggagctacaggtgcgtgccgccacacccgactaatttttgcatttttagtgaagacaggggtatcaccatattggccaggctagtctcgaactcctgacctcgtgatccgcccgcctcagactcccagtgttgggattacaggtgtgaaccaccacgctcggctaaacagtactttttaaaaaattgtttatcttgtaataattcaaacacacacaaaagtagagaaaataagatttttttttttttgagacagtctcattctgtcactcaggctggagtgcaatggcacgatctcagctcactgcaacctccgcctcccgggttcaagcaattctcctgcctcagcctcccgagtagctgggattgcaggcacctgctatcatgcccaactaattttcatatttttgtagagacggggtttctccatgttggtcagggtggtcttgaactcctgacctcaggtgatccacctgccttggcctcccaaagtgctgggattacaggcatgagccaccacgtctggcccagagaatagcattttaaaaaaactgttgtaaaaagcaacattcgttcaatctttcatctatcatctgtactcctctcccccattacttgattattttgaagcaaatttcaggcatttcatgtctaaatactttagtattcataaatattcataaaatggtaattccattagcacctaaagtatacaataattgtttgatatcgccctcagtattggaattttaccagttgtctcataatattttttccagttgctttgttttaatcaggatccctcaaaaggtctacatattgtatttgatggacatgtctcttggtccacatatattgcatttggttgataagcctctcagtctctaggtccttcctccttcaggcatttaactaaatatattacatgtataaaggcacataatcccttcacaacattatgaaataggtactattattatccccattttactgatgaggaaactgagtcacaaagcagttaaatgacttacctaaattctcacaattattaggactcacagttgagaaccactatttttgtttcacgtaatacacagtctctaataagtgcttccaaaacgtgcgttgtagcatattagtctccaattttataaagaatagttttgctcaaggtaaattaacactcatgaataattatataacatgttttattacaaagaagagtggatccttacattttaatttctgtatgtttcagtgacttaaaaaatccttctccgtattacccgccttaatagaaagtaaagtgagaatgaatgtaagtgcttccccccaatcttagggcaaaaccataccaaaccagccttgtcagtttcttttaattttaaaaattacataagcaaatctacacaaacactaattatagatacattaaaaaatgaagtaaattaaaataatccataaactcacatctttggtgtgtatccatcttctatgtgtctattggtatgcacacaaatatatgcatgaacatatatatattttaaaaagcaactatatgattgcattatacaaattttaaaatattattttctcactcaaataagtcagatatataaaacaatggttctttaaaataatgtatgcctactgcaaaatatctaaatgataaagaacattataaaaataaaacaactccactcactctacctttcagagataaatacaattattcttgcaaatgctaaatagtactctgttgtacagatgtgccataatatatttaaaattaccctattttggatatttaggtcttttctaattttccagttacaaaaaatactgcagcaaatgtcttgtaaaaaccaaataatttcttgagctttttatttttccaaattgccaggaagattctaatccttccctcatgtttccatttttagtacaactgcctgtcactcaagccctccaatttccatacacaggaaatgtcaaaaacggttgaaacataacaaaacatctaatacatagcaagaaagatttgccgccaaattatctgcgtgtgggagaattatttaatgcctcaaagagaggaaaaatacatctttaaacctgaatataggaagtgtgagcaggaagaacaggcttgttttggtttactgcctttaattttgaggatgactttaaattctgatcgctccggacaatggtatagaagtcaagagctgggcatcggagtcatttggatttaagtcctgactctgctacttactaattaagcgaactcacacatagtatctgtaagtcacaattttctcatctgtaaaagaagtataataatagtgtcttagggaatcgctagaatcatcaatgtgacaacacatgcagaatgctcagtgcaatgcctggcatattgtaaatataattattcatataatatatacatacaacttaagtatgcagtcttttgggggcaattcaaatattttgcaagcaatatttttgtattcgtattatctttttttttttttttttttgagacggtgtctcactgtctcccaggctggagtgcagcggcacgatctgggcttactgcaacctccgtctcccagtttcaagtgattctcctgcctcagcctcccaggtagctgggattacaggcacgcactaccacgcctggctaattctttttttttttttttttttttagacggaacctggctctgtcgcccaggctggagtggagtggcgcggtctcggctcactgcaaccaccgctttccgggttcaagcgattctcctgccttagccggcactacaggcgtccgccaccgcgccgggctaatttttgtatttttagtagagacaggggtttcaccacgttggccaggctggtctccaattcctgacttcaagtgatccccccgcctcggcctcccaaagctttgggattacgggcgtgagccactgcgcctggcctcctattatcttatgtgctataaagtagagagtaggccgggccgtgtttcctgcctgtaatcccagcactttggaggcataaaaagggagaatagtttaaacccaggaattaaagaccagcctcggcagcatactgagaccctgcctctatttaaaaagaagaaaaagataaagaaagaaaggaaagaaagtagggtagtttgataaaagtttaaaaagcctgagtatgggccgggcgcggtggctcacacctgtaatcccagcactttgggaggccgaggaaggtggatcacgaggtcaggagttcgagaccagcctggccaacttggtgaaaccccatctctactaaaaatacaaaaattagccgggcgtggtggcgcgcgcctgtaatcccagctgctccggaggctgaggcatcccagctgctggggaggctgagacagaagaatcgcttgaacccgggaggcgtaggttgcagtgggcccagatcgtgccattgcactccagcctgggcaataagtgaaacaacacctcaaaaaaaaaaaaaaaaaaaaaaaaaaagccagagtatgaaatatatgagaatttgcagcagaataatatgacttcaggatgtgacagctgtaaagggtaagcaggccaagtatcaaggtcccttcttcgctgagcaagattgcggagaacaagggccatgcacaagtttaggaagctgaaacaaggaacaggacccagatcttctgatgtttatttcaccgttacacgctcatttatcatgtatccactcattcaaggagcatttactgaattccaggatgatataagggtaacatataaacttcaccccaatcttcacctcaatgctcatgatcctttataaattatctcgagggaaagagaagcccatcaaagacagtcctgagaaagctggggctgttcatctgtatacggagtttaacagaatgaaacgccggagttggggtgtcagctggaattgacggtatacggtgcgcactagggactctcccgacggggagcagtgagttgtcatcccgggtagacggcgaactcccggagccacgcggccgcaggtgggcgagggcggcgagatccctcgccggcgtgagagcggccgtggctctccaggcggagcgcacaccgggtagcgaggctcgcggctcggcgctgcccgcggctcggcgtctcccggctcctccttaacccgcgccgggaggcggtggcggcagcggccggcgggcgggggagggggaggggcgcggagcgcggcgcggaggccggggaggagccggggcctgcagcggagccgagccgagcccgagcccgcgccgagccctgacactgtctgcccgccttctggctccccgggagcccagactggtcggagcccgagcggtggcagcgcggggagccccacgcgccgaagggagcggacccgacaggacggccctagaggaggtgctgccgccacagtagcagggaccggagtctcgagccgcggcctcccggaccgtgctgcccaggccagctcagggacagccgggagtacgaaagccccaccctctggggcaccccgggagcggaggcgggagcggggacgcgagcaacctctccccctgttggagagaaaagacccttaccactcgggtgagggaaagaagagacccctggaggggacgcctctctcctgcctagaggcgaggaagacccctgtactggccggggaggagacccccagaagtggaaagaagggagctttccgtagggaagcagagtgagaccaccctagcgcgcccccgcccctccaaacacacactctcaacagttcaggactttggaggcaaagagagacggggctgtgcctgtggagtaggcaccctcggcccaccactattcacaggagacaggagtccttacgttcagaagccactccagggaaagaagaggaatcggctttcagccttctggagaggggaagacctccccctcaacttcctcgtgcctagacagtggaacggggtggagcccctccgctcctatctccagcagacagaaagagccctccacctcagaaagatccagtttgggggggaggggaactcccccaagggggaggagacaactcctggttgggagaggctcctcccctcctcccccgggtaacaagcagggtgtggggggtgtgccaccttccccaagtaggacctccttctcctccccctccccctcctccaaccttgactcctcatcctcaggggacccagttcccctcaccaacttgggaggctcagcctcgtccaggaagagccactgaggatgagagccgtcacctgcctctgaagaggggaatccctccaaccccaaactccagtaccaggtggttccctccctttgccggaggaaccttggagacaggttagtgctttctttcatcttctctctgtcattgtctggcactagtgggtgtagggggttgagctggtggatcgtgggtttcactgccggggaagac

SEQ ID NO: 6187 - DNA, 6000 bp, Homo sapiens
agggattcttggagtgagggttcttttggctaacgaaggtacaaggcggaatcttgtaagataggagagggtcacgaggggggaggatgcagggccatgacatcgggagggtcactctgccacctgcgtcatggggctggggagaaacgccctgcagatcacaggcctggagtacctggaccgcctcgactttcctccgcagcatgttctccatgtcctctgagaacttcctcaccagctccaagccatccacctcctcgatcttcagactggactccacatccttgtacttctgtttggggaaagtgggagagatgcgtgcatgtggttttgtaccaggatagttgcacctgtgtatgcatggcctccaacctctccacagatgcattccggcacatggagcctggtttactcaactagggtgaggcccagccctctcctccctggacaacatccccagtgatagaatagctgcctctcctcaaatatcctctctgttccaggtgctctagacgcattgcagttatagccttaacaggggagtagaccgaggctcagagaagtcagtgaacttgaccaaggtcaacagccaggtgagcaggtgacccctgatggggccaggtctctcaggcatccccagccatgtcctttgtgcagagccacgctgcatcccagggcttgtgaaaccacccctggcatcagttcacctttcctcaatgtcccagaagaggcatcttgctatgaaagtgcccccgtgcacatggatgtgaacctcagttcccactgtcccagcagagctcagcagctccaggcactgaggatggctgcctgacaattgccagtgagcccaggaaagcctggaatggggtttgggttttctctctgggcccaggggagaccagctctcactgactgtgtattgtgaatgtctattcacccagctctgcaatgtattggccgtgtgaccacaggcaagccagtcaatcactttcctcatctgtaagatgtgacatttacatagctttagtgaatgttctagaatgcacagattttacagaatgtttttaccccaaacggccacatccgtactgctctatgctcctctccccgggctgtggtgctctgaagcataggagcgtgctgtgaggggcaggcggggcctcagctgtcatcgctacagtggcctgtgggggcccggggagccgcccaccctggctcctcttacttccaccagggacaggcctgggggctgtgggcagggcagttgagcagggacatgtggtcacatgcaggcataagagcctgggattcaggatctttgtgatatggaaaaggtgcctcatgaattggtggtgggaatgaaatcatgacaatgaagctcttagtgagtggcaatgatagagaagggtgagctgccattggaactgctctggggagttacaaatattagagaacagtgaagttgtttataacctggtaagaagaccagccagccataaatcggcacagaaagcaatgcatattaagggggcggatgctggacatggctcgggggctgacagctggaggtatgggaggtctccctgcgcagaggccacagccctttcaccttctacggcccgagcagcttccagggccctgcacgtgccctccaagtctccgctggcatcacaggtgttaggcctgcatcccactgcatccactccctccgtctctcctttattcttcaccccacctccacccagtacatctgcaggtctaattccaccttggcctctgctccctgaggacctgacacaatgctcttgaccacgcccccgaaccacccccactgccctgctttgggagttgagaaaatcattcacctccctgggcctcagtggccccatctgaaataaaccgatttgatgggatgcccaaggcccctcacagcaccggcatttgggggcttcgatggctgactgccctctgccacccggtgggctctctggaagggggtgactgaccttctgcagcaagagagagcctgagtatttggtcacagtgttatacaggtccccgccgaaggtgtcagcccatagcttcactctgccaggcaatgaaaggacacgcgtatacacacacgtacacgcacaaatacagaaacacacgcgtagacatatgggttcacacacatagaaagccagtgtctacacacagacacctgctgatgcatgcatactccaacacacagacacataatgcataagaaatgcacacacacgtacacacacatacataccccccacacacatgcatatgcatacacacacgtgacatatgcccagaaacacacaaaagagcacctgtccctcctccttgtccctaaagctacagccatggcctgggcaggagacgcggagaaccctcaggacccagcggctgcactgctgtgtgctgaatgtcctcggcaggttctcctgctgagggttgtggggccgggctgacgagcccaggactgagcttgaccccaagcttccagggcctctggttggagagtggcagactgagaggagagaaggaggggagaggcagtggacagcctcaggccagggccggaggaccctgaggacaaaggacaacctgcctggccacagctgtggcctctcaataaatcgttccctccagtgcactccactcaaagccactgggggctgccgaaccctctgttgaaacctcagagaacgcgtgaggcaagggcacagcaggaaaaggctctgagctgccactgctgagcctgagggcagggcaggccaggagggcataaggaggccacacctcaccctctgtgtaggcagcctagtggggagccccgacctctcgcccatgccccagaaatgcaccacaatcccaccatcttggccaggctggtggggtcctgggggcaggtacacagggctggggctgagcctctccagatggagcggaagtggtttgcctgtgcgatcctttcaagatcagcagtcatcactcaaccaatgtttatcaaggtcctaccatgtggcagcctggagccaccccacagtccccacccttgcagggacagctttgtcatgcgggtagcatagtacatgtttgaaggtgcccatgaaggttggggaggggtagtggtataagggaaggcttccctggggagggagatctgagctccaggttagaagtttggtagaggttagcctgcaaaggggtctgggagaggattctaggtcgggagtacagaagagcttggaggagtaaaacgtgacttccgggcttccagtgtgggttgttgacctgatggtgttgttactgaatacaattaagactatcaggaagggcagggggaatgagctgaggagggtgaaaagtgatgtgtgtaccttgggctctgctgaatgtgaggttcccgttgtagagctaccaagtaccattgggaaggttgtgcactgcacaactctagaaggcaccaattgtgttttaccttgaaagacacaaatctgaatttaaaacctcacatgatgtttaggaaaagctgcccataagcactgggtatgtgtctagtaggtagagacagggctgggagtcattgatgcaaaggtagggattgaaattctgagggcaggagggctctctcaaggagagtgtgcagcgtgagatctctgagcgtcgacagctgctggggagcaccccccacctccggggcaggcagaggaggaggagcacttgaggacagcagagataagccgtgcccatgcaggcccagcggagcgcagtgccacggaagtcaaggactgggataaaagaagacgggggcttgtgtgtcccaagcaacagggtctggggtgacaaggccaggaatgtctcctggattgggcatgaggagggctttgggaaccctgtggaaacagacttgggaggaggtggaagcccggctggagggaaagactgagaagagaggttcggcgggagtgaggacaggtggggccaagtcctgggcaggcagatgaggctgtgtgcaggctgttgtctctggcagcacccagggcttctgcatagatggccgctggggcccccctccctgaaggcctggattccagccaccccgacttggccctcagcccactcctggagttggccctctcctatcagctggtgtgtgttctggggatgaaaattgttctgaacatctcctgcagcaacagatagcgttacgggctggcggcgggtgtaatggtgaaagtgcagtccaggctgacaggagttcaaatcccagcaccttcacttcctggccttgtgaacttggggaagtcacctgacctctcggggcctctgtttcctcagctgcaaaatagggataaaaataagcccccactgaatggctctgcaaactaacggtgtcatttgtgaagcgcccagctccgtgccaggcagggaacaaggagagctatgcggctcgatgggaaacgatgctgcctaatccactggtcagcaaaggctaagcacaggcacggtgtgtcatttaggctccctgtccccactcctgctaagacatgcagttggcaggtggctctgttggtggcctggctatggtgctgggctcaagcggctggagtaaacaggatggggtctgtagcacctacagtctagaaggctctgctacccacatgtattggaaatttccttcctaggaccacctgagctagggcctaaaacacagacaccccagagaggttgcacagtaatttacatgtacaccaaggtgcacatgactgataccgggttctttcctggagccggtcttaatggccggctagagaatcaaggttggaaggaggcagaaaggtgtagaaagggaagactgcggccaccaaaatccatttttttccccagttcctggacaagccacctcctgtgcgcatgagacgttctgtgggttcagaactgcttcccctttttggaatgtcaaaatacgcatttcctgccaaatgcttcggggagctgcgatgctgagataacccggctcctccaggctgcctcatctcagcgattatcctgaaggagcacccgcccttcaggtgtcccagaagctgcttgtcaggccaggaagacagcagccctgatgatcagttcttcctaaagccatccggctcctggggagaggcaggtgggactccagaactcacagagcttttgggaggagaaagaggaggccggagaagcaaagggctttacagcaagagagtggtcagtcgcagccactggggaaaagcccagagggagggcaggggcgggaggagtgggcagaggatggaggcccagcccgggaagaaagtgggaaagggtgaccgggtttttggggtggggttgaacgtgatgcttacgtttccagaggaatcttggcctgtccccacgcaggggacagggaggtgcctagaagcagcagccacaggagggccgaggtcttctgcacaaaggcccaggccacgggcattggctggaggggaatccagcggctgctggagctggggtttgcgaggaagttgggagttgcaggcatggtgggcctggggttggggaggggaaggagggcagagcagccacagaccatgagctctgtctgccttcctcccagaccccaggacgccccaggcctttgtcttccgtgccttggcgagcctggggtctccagcctctcagtcctgggtggggagggcttctctctgccccacagctgcagctcacagaagagtcgccccacctagcaagcaggcctcggagacagggactgggggagaggctgtggcaacatgaaaccctttaatccgctggcctctcctctaatcctctcctgacagcagggagggggtggcagggggtggggagctgcctcccaagattaccacaactgcagctggttccctcagggctatagtgcacccctctgctttaaagaggcagccccgttcctgtggaaccaccttc

SEQ ID NO: 6188 - DNA, 6000 bp, Homo sapiens
actaccatatgatctggcaatcccactactggtggattatatatccaaagaaaaagaaatcatcatgttgaggagatatctgcaacatgtttattgcagcattattcacagtagccgagatacagaaccaacctaagagttcatcaatgaatggatggataaagaaaatgtatacatacactaatgaaataccattcagccataaacagaaggaaatcctgtcatttgagacaacatggatgaactggaagacttcatgtaagtgaataagccaggcacaaaaagacaaatattgcatgatctcagtaatatgtggaaactaaaaaagttgacctcactgaattagagagtagaataatgtttaccagataataagaggttaggggaagaatggagttgaggagttactggtcaaaggatatataattacttagaaaaaaggaataagttcaagggacttattgtaaagcaaggtgactataattaatgacaatatattatattcttgaaaactgctgagagtagatgttaaacattctcaccacaaaaatagctatatgagatgatgcatttgttaattaactacatttgttccaaatgtatgcatacttcaaaacattagattatacaagataaatatacacaattttatgtcaattaatttgaaaaaactgtatatttaattattatccagggtgatcaaatcaaatggcactacaggaaacacagaaagacaaacaccaattgcatagattttctccctgagtgagtcattattacatggtcagagctttttttttagtaaacattgtctagatacggtttactggtggcattttgaattgtgttcaaaatccagcactgaactcagttttgccatatggttatgtgagcctgacacaaaaacaatgagctaagtccattaaggaatcacagaaaaaagtttttacagaaacaaatggttctcaaagatttttttcagttcacagtcctctatagagggacaaaaagcaatatactcctacttgctcatgttaagctatcttcttaccgaagtgaatgggagaaatgaagttgctttcgatctaaaaataatgtagtgaatttcttgtttgtattaaataccatgagtattaattcattctgagtaaattacaaggcatcagatcacacaaataccacagtagagcaaatgcctacccagagataaaatcctccattctctccccaagatttttgcaaaaggatggtcccaattctctttgagaactaccactattattttcccattttacttggagactatagtttctctctaaacaatcctttatagaaaaggacctcatatttttaatgtcgtctcactttggcatgttatagaccctattaaagtttgtcaaagaaaaacagtctcccttttgaaagtgaacaaaatgttctttatcttggctatatttccctttcaattcaaccatctggatctaaattaaggtaccctactttgaacacgggtgcgctcaccatctggctacccaaaagtggcaattatttcaggtaaacggacattttacctaattctaagcaagcatactcttttgtcggagactacagcataaatacacacccatttttatctgcctgctgcacacctagttgatgaaaaagtgagtatgtattctgcctaatttacttattggtgtgtagacatgtggattttaggagaatttattttcaatgttcaacaactgtagtaaccaagagtagagaatttgtctcaacttgggaaaacttgggcttcaagagggagctcgtcttctaacctttgtacattacagtatggaaatcaggaaaagcaagtcttcccagttgtacaaagccaggctacttacaacacccagaggtgggtaaaaccttccaggggtccaaggtatatagcacacagtagaatctaatttccctgccgtcaccaaaattcttttgctcaggtctctgagaagcaagttgaagaatcagactgataggattttaatgagttagtgtttccacataggctaagagaagtggactgcactgtagtattgctgttttaagcatttcaagttgctcaatatgacttcctttatcagattacatatttgtttttattacagacattaccctataattaaattggcaaaattatatctaactaaaaaccaaaatgtttaatcattaatcaaatgaaaattcagtgcttgcatctgcgtcctatttgaaagtgggttttaaaatgccaatttacattgcattttgtggacaacataaaagtccaaccctagctgagatgctgatatgggtctgtttaaaaatgctccatgctccaagtggctatagtaacaaaaaatgtttaataaatagaaagtttgcataactatgaaatggtttattagatttatttcttttgtcttatcaactccagtagaaacatccaagaaattataagatttactctaataataataatgaggaaggaaaaaaaaatgaagaacaaggactttctctaagatgctgtttagaaataaaacaatcctgggattttcagaacactgagttctgcatttctattgggatgaagagtttaactatatgttaactaggttgaacttccaaccaagttgtttacttctttggggaaaactgcaagagagtttgagtacaaatacgcactaggggtacaagaaatcagttacggttcaagcagaaacatctggtctttttaagagtcctgttaatttgaaagcattgaccaaaacaagctcagttctgccaaacatattttggcatggctcaaaaaacaggatttttcaaaagcatttatttcactgcagcaagatgtatcagtaatgatatgcaactcccactattgacattttgacctaagaagcttgttcctaaacatagtatgcaaatttgttttctatgcctttcccccgtatttgacataattctgggtttaaaaaatatttttaatctgtattctttagaacatgttggaggaagtggtagaagggggtttaaaatatccatatctaatgtcaggagtaagaaagtgaataatttatacattcacttataggaggttttaactatcatacagctactaaagcattgggcattttatttataggaggttacttcatagaactctataaataataaaacttttgcttactttcacaacacattgcaatttccccagcctcttacacaataacttcttctgagagtttccaaacaccataagctctgtctggtccagggattagagaaccaaagttcaagtcctaactctccactgacaagcctgctcacctccagggccctgggcttctccgagcccattttctgctgttgtgagaatcacctgagaaaaggagaggctctgcctcattactgatctgtaacctgcctcctcttctaaagttgttggtttaatttttaagctcactttggttgttcatctgccctcagtcatttaattaatctaagttatcttagcaatgtgggaattagagcaaagaacaagaatcacttattcattcaacaatatacctgagagcttactgccacaagacactcatgagagctagcatttatggtggatactctatatgccaggcacaggggtaagtactttgtaatgcattcactcatagacgtctacaccaatcctacaagtagaatattattattggtatccccaagttagaattaaaagtctaggctcaagagccagactccctgggtctaaatccgtgctttgtctgctcactcttggtgatcttgatcaagctatgtgacacacctgtgcctccatttccccacctgtaaaatagggaatgctgataatagcgtctacctcatagggttcttgtcggattgagtacatgggcgtgcaataagcactagaagtagtcatgtcaggaaaaggttaattaccttcctcaaacctccaccagagttagatgaacagcagagattcgaactcagttctattggattatgaggtctgagctctaaacaagtggtgaaaagctccacggcctctcggaaattttttataaaaatacaaaactacacaaatgtaaaacgcggcaaagacactaacaaggcatttgagactgacaactagctttcccaccgcttggccactggaatcatctccagaggcagcaactcataaacaaacaaccggagtcgccctgccttagcacagagctggcagcgcccgcgaggccacttatcgctggctctggccttggcaacctccacccccgtcccggtcctctcagcctatctctggaaaccactcttttcactccgaatctcaacttgaagtttggggaaacttgacgcagccaaagcccatcctctgctctgcacctggcaggagactaatagtcagggaagatgggcatgttgtgggtgggggtggagaacggtgtgtccctgacctgccctgacatgctaacctggatgcgctgttgtcttggccttcagcgccacgtattttccctcgacagtaacttggcaagcttttcatgtcactctggcatcgctcagattatcagctacccttcagaaaaagagccctgcgtttcgatggctaaggaactctgacaggaagaggagaggtcccgactagaggagggggcagcattcatcttttggcaccggtgagtcagtttgcgaagttggcggcagcgagaccccgaggcatctgggagaccccggagttctgactgccctactccgctttcgtttccttccccccacccctggcttcccgggtattggaagccagctgggtccccggggtcgcaggccgcccagaggttcgagccgcgcgccggggtggggcagcgcggggcaccgcctccctccataccttctctccccgtggagcacataggagctgcggaagaagcccaggagctcattctcgatgagcgcgttgtagataatcttcagattgtaattcctctgcgcgtccagtgtcctattcagcaccaccactaagacctgggtttgcgggtagaggaaaaaaccggctacagggacagccccgaacgcccggtcctcggccagctgcactttctccaccgccactcgggaagcgtgcagcactacgtagcgggtggcgttccggcacgcgatctccacgttgacctccccggagaaggtgaagttctccatgaaggcggtgagcatcagattgtagtgcagcggcttcaggtggcccgacaggcgcagctgcgtccacggctcccacggctcccgctcctcctccgacggcggctgggccgacgtggtccccggactggccaccccacccgcctcgggctgccaggagtccccgcctgcgtggtggttgcgccgggccgatccagggaggctcccgttgccgccgcgctccggaaagcctgaggggccaccgtcggcgcctggcgtggcactcgccccgcactcgtcgaagcgcaggctgagcagcacagcgagcattgtgaccgcgagcaatgccacgagggacacagcgaaggccagcacaagccgcttgtgtacggcgatgtggcgctccgtggtgcggggtcgcactcccactgagtctgcccacgggtcggagagccccctgctgccagcccgaagcgcggcgtcgtcttcccccatcgcggctgcgaagggtgagctgctcttctcggccccctcctcctcctcctcctcctccttcttcttcttcctcttctttttcttcttctttttcttctcctcctcttgctcccccagctcgccgtccagggccatcacaccgcctcctcctcctcccccgccccctctggcaccccccgcgggcgggccacccgggccacagccagagcaggcatcggagagctcacgcgggccgagggcgcgcgactggggatgctggcccgggttcttttaagacgggttctggacacaagc

SEQ ID NO: 6189 - DNA, 6000 bp, Homo sapiens
cacagtaagtaataatgcctaactttaaagtccattattctttcattacactgaaacgcattatagaggttaatattgatttagctaagggaagagggtagtgaagaatttttttttaaaaaaaaatagttttataggttggaaaactgttttctaaccatttatttatttgtgtgtgtgtgtgtgtgtgtgtgtgtgtgtgtaatagagtctcactcttccacccaggctggagtgcaatggcgcgatcttggctaactgcaacctcgggttcaagcaattctcttgcctcagcctcctgagtagctgagattacaggcacaggccaccatgcccagctaatttcttttgtatttttagtaaagacggggttccaccaagttggccaggctggtctcaaactcctgacttcaggaaatccgcccgccttggcctccccaagtgctgggattacaggagtgagccaccgcacccagattgttttctaagcatttgtaagtttcctttttgtttgttttgagacgcagtcctgctctgtcgcctaggctggagagcagtggcatgatctcagctcattgcaacctccgcctcccgggttcaaacaattctactgcctcagcctcccaggtagctgggactacaggtgtgcgccaccacggctggctaagttttttgtatttttgtagagacggggtttcaccatgttggccaggctggtctggaactcctgaccttaagtgatccgtgcgcctcggcctcccaaagtcctgggattacagatatgagccaccgcactcagcctgataagtttcttgtcaacccaaattttccttcccatagtctagaagtctggtcagtgaaagtctgggaacgaacagcttacactaggtgaattaaaatcaattattctctctaatcttaccagtcactcaaaggaaaaattcctcctgctttctaaaaagcccagtttgtcctttaatgtcagcctagagaataaatcctgcttataatataaagtgggttctggtaaataagaaagattatgcaaacaaaaagaaaaccagcatttatcaagcatttattatgtgccaggcattatgcccattctcgtgaaaattaagtgaaagggccaggcgcagtggctcatgcctgtaatcccagcactttgggaggttgaggtgggtggattgcctgaggccaggagttcaagaccagcctggccaacatggtgaaaccccatctctactaaaaatacaaaaaattagccaagcatggcagtgcacatctgtaatctcaactactcaggaggctgaggcacgagaatcagttgaatctgggaggcacagattgcagtgagccatgatcacaccattgtacgccagcctgggtgacagagcgagactctgtctcaacaacaaaaaaaaaaaaaaaaaaaaaaaaaaaaagaagattaagtgagaggatcctacaaggtaagtattgttatagtcatttttacaaatgaagaaactaacattcaaaagtggtgatttgccaaaggtaacccagcaaataaatatcgttattcaaacttaattccgctctcttcatgtgctgtactaaaaaagtgattgatgataaggtgcctcttggaggataaaaaatgccagtagacatggaaaacacagaaggataacaggaaaaagaggaaaattaagaaactgctttaatggctcagtgcagttaactgatgtaagtataaaggttgtggaaaactaagaagtgaagatagagaagatgggtgagaggggaggtgttttaaaaagcttgaagtaggccgggtgcggtggctcacgcctgtaatcccagcactttgggaggccaaggcaggcggatcacgaggtcaagagtttgagaccagcctggccaacacagtgaaaccccgtctctactaaatatacaaaaattagctgggcatagtggcacgtgcctgtagtcccagctacttgggaggctgaggcaggaaaatcacttgaaccggggaggcggaggttgtggcgagctgagattgcgccagcgcactccagcctgggcaacacagccagactccatctcaaaaaaaaaaaaacttcaagaaaaagaatataatcccacttcaatatgtatcatatcctttaggagtcttaactcctaaagttggaagtaatgagctatttgaccttatttaacagttcaatcaatgccactttatgtgattaggtttctctgtgtaatctactgatttcttctttcagtcaacatttacagggtgcccaaagtgtaccagatactgtgctagaccctgggaatataaagttaaaaagatctcaagttgttcacagtctagcctggagaaaaaaggagactaaacaatccattgtacaatccactgtaatccattacaatacaaaatgaagagccctggaatagagataagaataaagtgctatgcaggaacagaaaaccaaacaccacatgttctcactcacaagtgggagttgaacagtgagaacgcatgggcacagggaggggaacaacacacactggggcctctcgggggaggggcgaggatgacaggttgataggtgcagcaaaccaccatggcacatgcatacctatgtaacaaacctgcacattctgcacatgtatcccagaacttaaagtaaaaaagaaaaagaaaaaggtgctatggaagcacacagggtgcatatctaaaccagaatggaagggtcacatagggcctcccaaagaaggtgatgtttaagtgactcatatagtacctgtaactaccatctaaaagcatgttgatttctacttagggtcagtttggggtccaactaaaagcttattaaaaacagaactgctacctctttgccaaaggtgcaacccacagggcccagcgcacaggtcagcaagcataaaaatattgattcatgatgaataaaacgccagtaaggggcaaaataacagacataaggagagggtaacttttcagccaaggtaatgataaatgccaggaggaaaaatcacaatgatgatgtgggtcagagagaagaataagaacagtatcttggccaggtgcagtggcccacacctgtaatttcaacactttgggaggctgtggcaggagaatcacttaaggccaggagttcgagaccagcctgggaaatatatcaagatcctgtctacacaaaaaaatttaaaaattagccaggcattgtgaggcaatgcctgtagccctagcaacttgggaggctgaggtaggaggatcccttgtgcccaggagtacacagctgccgtgagctgtgattgcaccacttgcactccagcctggatgatagaacgagaccctgcctctctaacaaaaaaaaaaaaaaaaaaaaacgacggctgggcgtggtgtcacgcctgtaatcccagtactatgggaggccaaggtgggcagatcacaaggtcaggagttcaagaccagcctggccaacttggtgaaaccccatctctactcaaaatacaaaaattagccaggtgtggtggtgcatgcgtgtaatcccaactattcaggaagctgaagcaggagaatcgcttgaacccaggaggcggaggttgcagtgagctgagattgagccattgcgctccggcctgggcaacaaagtgagactacatctcaaaaaaaaaaaaaaaaaaaaaaaaaagaacaaacaaatagtatttgtaactgctttattgcatttcctacattctttcacatccattatatgatttaattttactctcccaaaaacccttgttaagcacattataagagcgcaggtatcatcactaacaggtttttttttctattttacagatgagaaaattgaggcttggaaagggctcacactcatatggtttaacatgaagcccagtgaactgtctttcaactacataatgtcctatagcatcctcagaacctcacagtcattggattacaaggtaggtagttaggcccaacagagaaaaatgctgcctcaactttggagggaaaaggtgtaggagaggttaagaagggaggtagggaaggaagacagaaaatactatataatcatcaagaaaatacaatgagaagaaacagaatgaacaaccgttgtaaagcttatgatcataacctttgctcactggtaaaactgctgaaggaaaaaccgaatggtggatgatgacagttggtgacgaaattgacaacagtacaaaaaataaatcagataatccagagtggcaagcaacacgattacccataaatgtgcatggggaactggaaaggtgtgtgtgtgtgtgtgtgtgtgtgtgtgtgtgtgtgtgtgtgagagagagagagagagaaaggatgaggatgataagctgaaggacgcagggaagagcgaatgaaaggggactggcaatggagcaagcacgactgaaagtgcatgatggggagcagatgggtgccccaggggattacgggagaggcagagtggaataacgcagagtggtaatttaataaaaaacaaaacaaaaaaaaaaacggcagaaatatggtgatgacagtccagagtggagatggagcaggtggtcagggagatgacaacccaggtagggaggctagcaaggtgacaatacagaggtagtagtggcagggacggacagcgtgctagctgagaaggaagctgtcatctgcgacagagtacgcgtgtgcggcagcgcctcggggttagtacctgtaaccgcggttggaggcccggggcggaatccggtagacgctgacgtctggcttcacacacagcacagactcgtactccaactcggtcgccatcttgggtccgctgtcggcgctgccgggggcgaaacgtaagaccggaggcggagcacgggaggcggagatgcaaagcgcgacaacttctgttgcgtcacttccgcgcgagttcaagttagtttctgagattaaccttttcggtgacgcggggagccatattgaaacctggaaacgatgaggctgcacggctcaccgtcttggataatggcaaagatggcctgcaagtgcgtgactctcgttatggaaatctctgtcctggagaggtgcttacgaaaagcgccatcttactctaggcaggtgcctggagtgtcctacgaggacgaggaccatattgaatcgtgacggattttcttacaggagtcacttcctaactgtagtctcctggcagaaaagaggcaacctccagccggtagtcccagacgaggtacctgcagagaatgatgtatgatctggtcatagacaccgtggatttcaactctccagagtctaaacgctgaaaacacccaacttgatttagtgccttacactctttatctccgatttttcaggacgacacctgttaaaatgttttgccacactttcggcgtgtattccgattatctttttggaaaatttgatcctgttaaatagactatacgtgggatcaacccaattcctgataaaatcggaagcataatgaactatctaatggcctatattagctcccagttctattataatgataaatgctaccgaactctcaccataaatatgctttttctgcgccccaaaggtaaacttaaccacaacaccctgacagtacagatagcaagtggcaaaactgagacagaaactcaagcctgcctcattacaacagcagcagtcttcaccgctgctggagctggcaaggtcaccaagtctgcccagaaagctcagaaggctagatgaatatcatccctaatacctgccaccccactcttaatcagtggtggaagaacggtctcagaactgtttgtttcaactggccatttaagttcagtagtaaaagactggttaatgaaaacaatgcatcgtaaaaccttcagaaggaaaggagaatgttttgtggaccactggttttcttcttcagaaggaaaggagaatgttttgtggaccactggttttcttttttgcgtgtg

SEQ ID NO: 6190 - DNA, 6000 bp, Homo sapiens
tttcgatctaaaaataatgtagtgaatttcttgtttgtattaaataccatgagtattaattcattctgagtaaattacaaggcatcagatcacacaaataccacagtagagcaaatgcctacccagagataaaatcctccattctctccccaagatttttgcaaaaggatggtcccaattctctttgagaactaccactattattttcccattttacttggagactatagtttctctctaaacaatcctttatagaaaaggacctcatatttttaatgtcgtctcactttggcatgttatagaccctattaaagtttgtcaaagaaaaacagtctcccttttgaaagtgaacaaaatgttctttatcttggctatatttccctttcaattcaaccatctggatctaaattaaggtaccctactttgaacacgggtgcgctcaccatctggctacccaaaagtggcaattatttcaggtaaacggacattttacctaattctaagcaagcatactcttttgtcggagactacagcataaatacacacccatttttatctgcctgctgcacacctagttgatgaaaaagtgagtatgtattctgcctaatttacttattggtgtgtagacatgtggattttaggagaatttattttcaatgttcaacaactgtagtaaccaagagtagagaatttgtctcaacttgggaaaacttgggcttcaagagggagctcgtcttctaacctttgtacattacagtatggaaatcaggaaaagcaagtcttcccagttgtacaaagccaggctacttacaacacccagaggtgggtaaaaccttccaggggtccaaggtatatagcacacagtagaatctaatttccctgccgtcaccaaaattcttttgctcaggtctctgagaagcaagttgaagaatcagactgataggattttaatgagttagtgtttccacataggctaagagaagtggactgcactgtagtattgctgttttaagcatttcaagttgctcaatatgacttcctttatcagattacatatttgtttttattacagacattaccctataattaaattggcaaaattatatctaactaaaaaccaaaatgtttaatcattaatcaaatgaaaattcagtgcttgcatctgcgtcctatttgaaagtgggttttaaaatgccaatttacattgcattttgtggacaacataaaagtccaaccctagctgagatgctgatatgggtctgtttaaaaatgctccatgctccaagtggctatagtaacaaaaaatgtttaataaatagaaagtttgcataactatgaaatggtttattagatttatttcttttgtcttatcaactccagtagaaacatccaagaaattataagatttactctaataataataatgaggaaggaaaaaaaaatgaagaacaaggactttctctaagatgctgtttagaaataaaacaatcctgggattttcagaacactgagttctgcatttctattgggatgaagagtttaactatatgttaactaggttgaacttccaaccaagttgtttacttctttggggaaaactgcaagagagtttgagtacaaatacgcactaggggtacaagaaatcagttacggttcaagcagaaacatctggtctttttaagagtcctgttaatttgaaagcattgaccaaaacaagctcagttctgccaaacatattttggcatggctcaaaaaacaggatttttcaaaagcatttatttcactgcagcaagatgtatcagtaatgatatgcaactcccactattgacattttgacctaagaagcttgttcctaaacatagtatgcaaatttgttttctatgcctttcccccgtatttgacataattctgggtttaaaaaatatttttaatctgtattctttagaacatgttggaggaagtggtagaagggggtttaaaatatccatatctaatgtcaggagtaagaaagtgaataatttatacattcacttataggaggttttaactatcatacagctactaaagcattgggcattttatttataggaggttacttcatagaactctataaataataaaacttttgcttactttcacaacacattgcaatttccccagcctcttacacaataacttcttctgagagtttccaaacaccataagctctgtctggtccagggattagagaaccaaagttcaagtcctaactctccactgacaagcctgctcacctccagggccctgggcttctccgagcccattttctgctgttgtgagaatcacctgagaaaaggagaggctctgcctcattactgatctgtaacctgcctcctcttctaaagttgttggtttaatttttaagctcactttggttgttcatctgccctcagtcatttaattaatctaagttatcttagcaatgtgggaattagagcaaagaacaagaatcacttattcattcaacaatatacctgagagcttactgccacaagacactcatgagagctagcatttatggtggatactctatatgccaggcacaggggtaagtactttgtaatgcattcactcatagacgtctacaccaatcctacaagtagaatattattattggtatccccaagttagaattaaaagtctaggctcaagagccagactccctgggtctaaatccgtgctttgtctgctcactcttggtgatcttgatcaagctatgtgacacacctgtgcctccatttccccacctgtaaaatagggaatgctgataatagcgtctacctcatagggttcttgtcggattgagtacatgggcgtgcaataagcactagaagtagtcatgtcaggaaaaggttaattaccttcctcaaacctccaccagagttagatgaacagcagagattcgaactcagttctattggattatgaggtctgagctctaaacaagtggtgaaaagctccacggcctctcggaaattttttataaaaatacaaaactacacaaatgtaaaacgcggcaaagacactaacaaggcatttgagactgacaactagctttcccaccgcttggccactggaatcatctccagaggcagcaactcataaacaaacaaccggagtcgccctgccttagcacagagctggcagcgcccgcgaggccacttatcgctggctctggccttggcaacctccacccccgtcccggtcctctcagcctatctctggaaaccactcttttcactccgaatctcaacttgaagtttggggaaacttgacgcagccaaagcccatcctctgctctgcacctggcaggagactaatagtcagggaagatgggcatgttgtgggtgggggtggagaacggtgtgtccctgacctgccctgacatgctaacctggatgcgctgttgtcttggccttcagcgccacgtattttccctcgacagtaacttggcaagcttttcatgtcactctggcatcgctcagattatcagctacccttcagaaaaagagccctgcgtttcgatggctaaggaactctgacaggaagaggagaggtcccgactagaggagggggcagcattcatcttttggcaccggtgagtcagtttgcgaagttggcggcagcgagaccccgaggcatctgggagaccccggagttctgactgccctactccgctttcgtttccttccccccacccctggcttcccgggtattggaagccagctgggtccccggggtcgcaggccgcccagaggttcgagccgcgcgccggggtggggcagcgcggggcaccgcctccctccataccttctctccccgtggagcacataggagctgcggaagaagcccaggagctcattctcgatgagcgcgttgtagataatcttcagattgtaattcctctgcgcgtccagtgtcctattcagcaccaccactaagacctgggtttgcgggtagaggaaaaaaccggctacagggacagccccgaacgcccggtcctcggccagctgcactttctccaccgccactcgggaagcgtgcagcactacgtagcgggtggcgttccggcacgcgatctccacgttgacctccccggagaaggtgaagttctccatgaaggcggtgagcatcagattgtagtgcagcggcttcaggtggcccgacaggcgcagctgcgtccacggctcccacggctcccgctcctcctccgacggcggctgggccgacgtggtccccggactggccaccccacccgcctcgggctgccaggagtccccgcctgcgtggtggttgcgccgggccgatccagggaggctcccgttgccgccgcgctccggaaagcctgaggggccaccgtcggcgcctggcgtggcactcgccccgcactcgtcgaagcgcaggctgagcagcacagcgagcattgtgaccgcgagcaatgccacgagggacacagcgaaggccagcacaagccgcttgtgtacggcgatgtggcgctccgtggtgcggggtcgcactcccactgagtctgcccacgggtcggagagccccctgctgccagcccgaagcgcggcgtcgtcttcccccatcgcggctgcgaagggtgagctgctcttctcggccccctcctcctcctcctcctcctccttcttcttcttcctcttctttttcttcttctttttcttctcctcctcttgctcccccagctcgccgtccagggccatcacaccgcctcctcctcctcccccgccccctctggcaccccccgcgggcgggccacccgggccacagccagagcaggcatcggagagctcacgcgggccgagggcgcgcgactggggatgctggcccgggttcttttaagacgggttctggacacaagcgacggcagcttccgcgacccccatcagccccgcctcactctggacaccgggctgtgagctctgggacgcgcccaacttggaaagcgtcttgcttgcccagcgcgcgctacttctcggacgagcacccggcggcggggcacatgctgcccccgcccctgcgcgcctgcggctcccggctctccctcccctgcgccgcgctctcgcctcgctttccgcgggagccttccaaccggttctcggctagggagaaggacgggagcggtgggaagagcgagggtgtagagagggaagttagggctttcgctttctccccccactccagcggcggcgttcggtcctctgggtggaatgtgctcgcagcagcagtgacggcggccacagcacgggaggcacccgagccatacaccctgcagctggagagaaaaggatggccgaggtgggagagactagagtgaaccagcaggaggaagtcccagggccgcgaagctacgacggagatccgtcctggaaaagccttctccaccctgggcactttaagcggcggtggcggcaaacggcaggaggttgcagacccgacagcgagactccctcattccagtcttgctctgccctccggagatgacaagtgagaaagaagtgtccggccgggccatccccttcaggtagatgaagctctgggtttgctccatatcccaagggggagagccgaagtgcgtatgtccgagcgcgtgtgcatgtgtgtgcgcgtgtgtgcgtgtgtgtatatacacaggcttcgggtttagattgccagggctactccagctgcattgagggactgaaactcccagagaaaggcaaaggagagggagcgcgcgaggaggcaggaaaggcgggagggaggggagcgactgagcggcagaggcaggcactgggagattagagagcttttctccgctctgtcacaccagacacccacagccacagagggggttgctgagccgcctgcaagaagtacattgtaaatcttcagcgcaacaagccccgcagtcacccctcttcctgactccttagccccaccgcgctccagggagagatc

SEQ ID NO: 6191 - DNA, 6000 bp, Homo sapiens
tttggtaccaataaattcgaattagggaatcggtttttttagatgtagaattacagagtatttttggaattaaattggaacgtgcctaaatatgaaaatgtgaaagtcccacttttctgttatgtactctattatgaggaatgaacagcctaactatactggattattgatataaataaagcaccactgtaaaatctcttcctaaaagattgctgggtcacacctagcaatttagggcaaaaagtcaataaagaattaaggtactttatttttaaaagcctcatttcccttttgacaggagcatcaagatactaaaataaaaataatgtaataagtactttcaaaatataacaattttcgttctcccatataacaggtggctaacaagaaaaccaaaaataaataaaaagagaaaatttaaaaataagtaaaaaataaaaaaatatttttaaaaagcagcctgggcaagagaagtgggtgggtttaggagaatccctttcgaaaaattcagagcattattattaatccttcttaaattaaatgcagggccaagcatgctgcacgtggaatctggacaattttttgataaactttaaggctgctaaataatttacagaaactgtgaatgcattttcattttacgaggcaaaagagaaaatattcaagattgcatagcaattttattttttgaaatggttatcctaaagaatttccttaaattcagattttgcaaaattcctactctccaagtcatcaagtgaacactaaaagcaactttactcgtgaatacagtggactctttacgaggcatgcatttttcataaatctaggccaaagtgaactaattgagatttaattctaaattcatcctgtgatttctgcatataatattggtataaaaccagtaaaaatacttttaaaaaaagcgtttacttcccgagtaatttagtttggaaatatttacattcttagtcaaaatattactttcagagtctaaaggttttaaaaacaaaattggttcaacaattatcaaaacgaaacgactatgaacactgactagaacttcttaacccacagaagtaaaccacttcaggtgagttcagctcacttattttattattattttttttttttgagacagagtcttgctctgtcgcccaggctggagtgcagtggcacgatctcggctcactgtaagctctgcctcacaggttcacgccattctcctgcctcagcctcctgagtagctgggactacaggcgcccgccaccacagctggctaattttttgtatttttagtagagacgaggtttcaccatgttagccaggatggtctggatctcctgacctcgtgatccacctgccttggcctcccaaagtgctgggattacatgcgtgagccaccgcacccggcctcccctcacttaatttttaaaacccatttctcttctccagcttcacaactggactgaacattgctcaactgctcaacaacattacctatgtcaaaagtgaaaagataaaaagtattgtaaagattgcacagtgagtcaatctgggaagaatatactgtacaatcagcatttcagagctggaagggatctttaagatccaatccagcacccacattttaccaatgagaaaactaagcccaaacacatcataataacttgaccaaagttacattcctcagctgagccattcattcattcattcagtcattcattcacccacttactgaaagctgcctaagtgccaggctcggtgctaggagattgaaagcaccattcacaattgccaaggcagtcttttttccttgcatttttaagataaattcttaaatttcctgatcagcagaactcgtaggagagttccacagccttggtagaacctagcccactttcagtttcacacattttaataaacatagttgggtttaacttcagagaggcttcaattgtgtttactttaaatgattaagcattaacaaagggaggcatagtattctggatgagtccctttctagtacattcataacttaaggaagtgcaatcagaaaatgccctacacacacaaacacgttcacagagaagacagcttacaaaatcagaggaatctgaggtattaatatatacatcagtgaagtccaatagctcaagtttacaaagtacggaatgtaaatatctccccatttcatttaaatatgggtatgtctgcatgttaaaaaggcctccaaactcacactcaaacaaatgccctcttccaattacacatatctctaaaaccaggccttttgccttaagctcaattttctttttgattagaaaaaaattagattaaaaaataaaatctaaaatttaatgtgctggctaaaaaagaaatacaaattctatgtaatcaaaatagcaatggctcaaactgcacattcatgagttttgttaaaaagtgggatgtgcggtgaacttacacatcaacataaatcatacctcattttacttggacctttacattctttaatattaagtctggcacttaaatgttttgtgtgtttcaattcatagtcaacttcttttaagaagagaccatattgacaaaactcttatataaaacaaccaataagtaaggcattgtgaaatattaaacagcagcactctgggtacccagtttcagtgtgatataccaaaatgaaccccagctttccagtgctccacagatgactgctaggtggcttttgataaaataaaatacaatcttcactgaggctcttaaggctctttgactttcttgacactactgtcagctcatgacgaaagtgctgttgtgctctatttctcaaaactccaaatttgatttttatctagagcatcacaagttctcatttgtacatcaggtcggccctccggtgtccgataagcactaagacacagtcctgagtgtgggtgaaaaatagttccatcttctttaaaatgccaaataatgtttgctggtacagggaacccatctttgggacaattttgcattcccacataatttttttgctcaggtacctctgcacataactctgtcacagaattaaaccttatttctttgtttgaagtatattcaaagaattgattgcctccttgaccatggcatccaaacagtgaaaggttagcacctgtggggttgttgtcaggagaattataatctaaacattcagacgagatccctctactgcgaatagccccatgccagcctggtctatcctctggaacatgtaaattaggaaaaacgtttttcaaataccagtcaaagctcttgcatctcaaccgctctcgtagtaattttctttcagaaatatcaccataagcttcttttcttgctggagggtttctattgtagaagtgctctttgtattcatccatccaaacttctgctgcccgagcagtattctgtaggaaattggggcgagcatatggtgcccgcttggggaacacatggcccacgtgggaacacgggtggatctccaatttgccaccacactgccacaccctaaaagacagctcaaggttttcacctccccacacttccattcctgtgtcatacgttccaaggtactgaaaatatttcttgctgacagcaaacagtcctccagccatggtaggtgatctgatggggtcaattcttgatatccgcctgtccctttcctgtttggggacagaatgccactgaaatgttaaacgccagtcaaacccaccaatcatgggctcccctatctgcatatagaattcaaaagtattccaatcaattgtgtctataacaggacacacaactgctgtttcatctctcccaatcctttccaaaagcggttccagccaaccggaattacactcacagtgacaatccaggaaagtgaggacgtccccagtggcgaaagtggccccaatcagacgggccctaaccagcccctctcgcttattggtcctaatcaagcgtactctatcaagattgctgatgtaagtttcaagttgtgtcttcaaataaactctgtcactcaagtcatccaccaagatgatctctttcaaaagaactgcaggagaagtttctaaaacactgtgaatggtacggagcaaagtcgaccaggcttcgttatagaaagcaatgataacagaggtggtaggaagtgtcctatagttgaacttctgggacttacactcatacattcttttatcctctatgtgtcgatgcagggaaatcctgtcactgaggtaaatattgatggcgtatctctcaatgagttcttcttgctgcttcagttcatcctcgttgagctggagtttgctggctttcccccactccccaagtgcacgggaatctgcagggggcttcttataaagcggtcgagacaaatcctccgtatttttctggaggtctgagagccttcttgaccccagctccctggcacggccggctcctgcggaggcatgaaaagtagagaccaagagctccacgaagatataggccactgttaaaaacgccagcagcaggcagctcttgcctgcccaagtccacctcaccgccatccggattctcagggctgaggcgcagacgcggccaccaagccaccacgcaggggaagggcggcggaacccacagctcgagctcaggtacttcccagcaggttcttcctttcatgcaggcgctaggctcctttccagccacccaggctttccaggggtcacctgagccctctcggtcctcggcctccggcacagcccaactcctctctccctacttcctcctgctcggctcacaacttttcacaaactctccagccaacaccccaccctccccgggccgaggagaaacccctccccttcccactcactcctcctggtggttagtttgcgaaagtcgtccgccaggcccagaccgctggataggaggctcttggccgggccgggggctgggggccgggatggcagagggggccctagctgcgccccgccgcgctgggccctcgtctccgggtgctctcaaccctcatacaggcccttagccgttctcctagggaccctgcccggacaggaggaaaggtttccggcccatggagtttagtctcattacaaaagcaaaacaagaataagacttaccaagttgcttgccgttggggctgaggtccaaggaggtgatcgcagctttgtggcctttgaaataacgctccagaacggggtcctcctggaaaggaaagttgtcaagttttgaaagccgccgcagacctcgaattctggcggctgggatccacgctgccacttccccggagtccggcttgggaatggccacccaggcggcggcttggctgggcggcggggccgggcagcagcccacccacgggcgcggcgcccagtcctgctacagggagacgccggcgccagctctccccgcagagcccgcaaaacgctctgttcgcgcttcccagagtccagcgcatcgcaggaaccgcggcccctttgaaatgcacgttcccgggccccgcccgctggcccaaggcaggcaggtgcgaggatgcgcctcggctttggtactttttttttttttaatacttcctaggtgattctgacgcaggcgctccacggaaaccctccgagaattctgggggccgtggggccgcccagctcagtccggagctccggaactcggggaagagcgtccgggagccgggtctgggttccgcactccgtccgccccgatggcagagagtgagatacggacgccccgggacgaggggctcaggacccggctacggacacctgcctccatctccctccaggtgcggcttcggcccggacctggccccgcagcccgcgggacaggctccagggagggaccccccccacctccaacccgtccttaccgtggctgaggccatcgggggagtggtcggcccaaggctcctgtgggtgggggaacccggagaggggaggggagaggatggggaaggagaggggaccgtgcggctcc

SEQ ID NO: 6192 - DNA, 6000 bp, Homo sapiens
tcttgttcttaaccagagtaaggtgcccaagactgccagagaggcatgaagatctaaaagtgctggcagagggagcctccttctgagaggccactgtccccagagtaacctttgggcagtccaagcctgttctcaggtcaacttgttcaaactagttagtacatctaacctctcagctcataaacatttactgcgggtgtataatgtacaagacagggcactaagtgccctgtggccatcccatgaatgcagaggtgggagagttccatgcaggttaagagcatgggcttctgcaaacctgagagggagtcgtgggtttcctcctcacaggctatgacagcttggcatgttgattaacctcacagagactccatttcctcatttgtaaagggaacataactggttcctacctcacaagacctagtgataggtctgggaggcacgtagcacagcacctgttaccaagtgagtgctcagtaagtagctgaagctacaactccagtaccagcaggtggcacacactggatgtgtcaccagcaaagcctcgggcctcatgggtattccacagtgcctggaatgtcccaccttgcataacacctccaagctccaggttgtcatcagaaggccagtgagaggcagcagcttctcaggaaccaactgccgagtctgcacagactccgctttcccgccggtgcagctgcccacaccctgcttaggaccaggactctcccctgtgcagaatgaggactttgtatggcatctggttctgggaacaccacttagtctattccctggcacaggacctgcagggcaggtttgcaaaagcatgacacacattccaactcacagagtactgactgcttctgccttccactcctgctattcaccaaccagacacccccatcctctcccagccagccttggggtggggcggtctcaccacctaccccccttgcccacaagtcacttcaaagacatgacttcccaagagatcttcacttgcacttttcatttgttggcagtgagaatgacttccttcctggcagagtaactgagagtcactacatggtcatcgtggcggctctgctccctccacgcctatgcccgatcacccacaggctggacctctggggatcccaccctttgcatctggaccatgaggacccaggacccagaaggcaggacagtttctcttccacatgtcgccacagcgggatgcaggcactgccatcaacgcctgtcacttggattgagcaagaacagcctctccccaccctggaccatttccccaatagtcagaccagaccaaagaggcaaactctagtgtctttgggaactgactctgtctcctgcaatgcagcttctccctggctttggcctccactttgcttttcatttccccggaacctgattataggtgacctatgtcctttatcagagtgggcgaggtttgcctacccttgccttcctggctgcttacctgctttacagccagactttctgtgggatagtgtggtccccagaggtctgggaagctggatgagcaaaatgtggaggctgtagatatggaggaagagggaagaggaaacgtgaggcccagtcttggctccactatgaaccccaatttccccaggggaagctgaagaggagttggcagaccttcctgtccctgtctgaggttggggtggggcaggaaaaccaaaggtgaggccagtcacaagtcaagggtgaagggaagtcacacgagtggtgggctgggtcccaggacagggtggccgggagcagtgccgccccagggaaaagacgagaattggctgataacaccagggagcaggctagggtgtcgggggctgtcctcagaattaagctacccctgttttcccttgagcattaagcctcccccaaccttatcatcccctcatcactgctgtgacctctgctgagtttggagtgatgatcactagggtgattaatattccatttttccctggaaagtttgggtttatgtccattgtcctggtataaccatgcatggcatcccctttcactctcagaagtatcccagtttgcaagatacattacacaggcactctttctagcatatctaggagggcactgacacaggaaaaggttagggacaaatcagagggaagcaaaatgacaagcaaggccttggtggcccagagtggcagccaggctggcttcagcccagctggatcctctcagaactggacaatagtggagggagagcctgagaactgctgcccaccctggggctcaaactgtcttggagtcaggggcctggtctggtgggttctgcttcctgctatccctcagagggcctggagtcatgctgggcacacaagaggctcttaatcaaatctggtcaattccttatttccctctacctgcatccaaaacagaattgcagcagggacaaatggaagctggagccctgtaattctttattcagcaacacaccaaatgtcatctaggtggtcctcccgtctctggctctctggcccctaggacctgactgctgcacaggcaacagcgagtttctagcagaggttccagatgcctattccagccaggacagcggtgcctccttaggatgtggggtaaggaatgaaacaatgggaactccctttcgtgtcttagataaccacctgatgtagtagccacctgatgtagcccactcggtcccaggcctttctccattcacagcctgggctttggacacctgctatctgttctgggggtagagtgtaggggttcaggaggtcctctcggagcttcctctggggcttagttacaaaagagatcagttttgaggtcaaataggggaagaatactgagaaaccataaacacaaactatcagggcaccccaaacagcacccgaccttccataatgtttatacaaacaaagtctgatggcctctgccgaagaggagtaaagggttgggaaggctttctaactctcattttttcccctcctttcttaccccattttctagtccctcctttagcttggtaagggtccaagtcacagctgatcaagaccagccaaacccaaagccatgggacccagccagagcatagactgtgaattccccagctttttgcagtttgagtcagccccacagctggattggcctcccaggactcttctcaaataggtccagagaggctgctgagtgggggccacggactctgcagggagggctacttctgttcaacgatctctagcacccaaaacaaaagccagggagaaatgtgcagtcttactaccttctggtctggctgcatgccagccctgagactgtttcagaaagactcacagttccctccagcacttggacagggaagggacggcaggtctctcaacacacaacactcttagtccatagaattgaggctccaatgttcagataacccatttctacctcagcaaatcaccctcactccctagcctgagttaaagccttctttgccaacaccatgacttctctggccccagactttcctaatttcttttgctcacccccttcactagcagagatgggctgctaatgagaccactaggcagaaatggaaggaagggctggaaaagcctgcagtgctgggatgcacctccttatcccaggagaaagatgagatgtagatttatcataaagccactatcccttcacggtcacctcctgctagaatcatctcatagccattccataagcactgctgtgttgggtatctgagcccctgcccatgaggaagaccaccttccagcagggagctggagcagagctgaactctgcccaggagagcttctgcaatgctcagaaaatgcctgcccaactgcttgcctgggctctggcccctttggctgcaactgagcccagacaggaggctgactcactcaccgcacgcatagaggaggaggaggaacaagaggaggaggaggaggaggaggagaaggaggaggaactgtgagaagggtctgggcttggagacctaaggctcccccagcccaggctaggtctcagactctggtccctgggtgaagagaaggaggggcagttgtacactggccctggagaccacaggctgttccctcctagatacttctgaatcttcctcaccaccacccacagatccagggcacctcacttttcaaacagaaactactccttgagccccttcctcatttaaatgcttgcccctgagttcctctgaacatctattgacaggctgtcctgaaaaaaaatagggccaattaggtctaaactcattggtagttcaaagaaaagtaaaaaaaaaaaaaaaaaaaaaaaaattacttaaaagacccaactccaccatcacaggtgaccatacctgggccctgtaagacaataaataaggttacacaccctccactccagcagttctgagcaccatcgacagccaatcgctccttttcttattcctccactccatgccaaggcgccccgacagaagaaggaaacaaatacttcttgttgcccaagtgctaagcactgtgttagcggagcatttctcctaagcgccgaggatgtcgctgctcccctcgccagcctggcacgaacttcagctttctcaaacctcagtgccccttagtgtcccagcctcatggcacgacagcccggacctcagtagccaagtttaccgctgagacttagactctaatgctcgcagccgggcgctcaggccccggtatcccagacgccccgaccccgagtccctatcctgagaccccctttcccgctgctcccgggttcgcacctggtccggccggcgggtggacaagctgttccgcgctcccggcgcacacggctccgctgccgccttttgacaagcagagacagcccagcacctggccccgcctctcggtcaggccccgccccggccccgccccgcccctccgccccgcccacaggtccagtcctctcttgccaggagctccgttggcgctgcaaccatcttgacttggaatcaaccaccctataggccacgctgtagccttagatactctaactcgtgaaattttcatcgaccgtcgtccatagggcaaggcacgcttctgccctctgtgggacagagttgtcgatgattataggtgcggatacccgcttcagcctgtgttaatcggggatgcagccccccacccttcctgccgtggttctacccagcctgctgcggacgcctgagccaggtgcgtcacccccacctgggctgaccaggccaggacttcgtcgtccgcgggacgctggggggcgcctgccgactggcaccggcggctagctccgcacgaatgggaaatcccgggctccgctcgccaacctgttactgctgcagaacgccaggaagctcagcctgatcccacagattagggtaaaatatcccggggggccgaagtggaaaccggagttgcgtcattgctcccacccgatatcaccttggcagcgaccgcggctgaccacgttcccggcctgtcgcgaatctcacccaagggagctgagtctcagcttccctggtccctggtcccgagttccgccttccccccccgccccgtggcatcggcgtgaggggaaaagataaagactacctcctgagacctggaattgtggatggctgcggaaaactcaccacaggaaattttggcttaaagttattctctgcttcccttgactgtgtgataggcaccgctctatctgctagaggacaggtgaaaaagatggggttccctcttcttagaactcactgtgcagtgggagaatgtataaataaatagtaattacaacataatcttctggaatagaaatgctcacaaaatcatccagcagtcgatgacctcctttagccagggaagatattgctattcgcctcttacagaggaggaaaccatggctcagagggacaaggtgaaagggtgggaaattgaggcatagaaagtttaagtgatatgcccaacatgactcagc

SEQ ID NO: 6193 - DNA, 6000 bp, Homo sapiens
aatggggctgagaggctgtttggccaaatgaccgtcctttcttcctcataagcactttctctccatcaaacacagcactcatctcaagtcctctgtactcatactgtgaacagaagagcaaattatcttctccaaagccctcctcccacccctgacccttttgatcacagaatgtgggaggtttttatttttccccgtaattacaccttcaagacacttcagcttttctccaagactcaagctgcaatactgtggcttattttcccaggaagatacgctgaaaattatttctgtagctagtctgtcaagttcccccaacatatcaaggttcattttatgtttgcataatttttttttttttgagatggagtctcattctgttgcccatactggagtgcagtggcgggatctcggctcactgcaacctccgactcctgggttcaagcgattctcatccctcagcctcccgggtagctgggattacaggcgcccgccaccacgtccggctaatttttgtatttttttagtagagacagtgtttcgccatgttggccaggctagtcttgaactcctgacctcaagtgatctgtctgcctcggcctcccaaagtactaggattacaggtgtgagccaatgcatccagcctgtttgcatgatattttaagcttaaattacccaaacatggattttctattgaaaaactcaacccaactttgctcaccactgtatacctagagcagcgcttggcatgtggtaggcacttggttaatatttgttgacttattccaagaaaaagtcaccaaaaatcaaaataatatgccaccaaacaggaggttcaacagttcacaggtttttcactggagaccctgtaggcccttccaggtggggcaggggtgtgcaacggtttatccctaggagtgcagaagtggagggagggttccaggtggagatgaggtgggattctctaatcacctagaagccttggtgacaacgagactgggcttgagggggagagttgggggaaaggacagagaagggacagggaagtgatgagaagggtggaagacaggaggggtattcccgaaggcctcttgggccagtcttcaaattgggaagggggcttaatgggagagactagaattgaatttttccttttctcctcatcccccagtctgctcttggctgcagaactttcacccggggccactggctactcaatgtaccatcccctgggctcagggtctgtgcccagcctcctctgctagccagcctgcccaatttccccattgctgccagaagcattgaagtccgtgaaacaagccagcccctgtcccactctcagacaggtcgtttttaatcctgtctcaatttcaggttcaccccacacccgctcccaagtcctgctgattcattccctgcctccgggttcctcactgtcctttctgctttcaaaaccttcatttgaaattgggcctttatcaactagcatctggaggatcagcaggagctgcctgccagcctcctttgcctcgggcccctctctctctttcacaatcaggacagccgtattcatattccttgagcactgtttgactgtggcagaaacacagaggggctggccgggttgcttcctgtttgctgctcaccctcaagcccaaccagatgcttggcactcactggctatcttttcttcctcaaagcctttcccttatattcttgctaagcaagccatatttcttttctttcaaattcttaccagagactcccctctttcaagaaggcttcctagactaaggtgcatcttgctgcctcagtttctaggtgttatttgttcccaagtttctctactacccgtgctttccttacgtgggatttccccactaactatcatggagaagggagaaccaacaggcctagacggtagaccacctagatcctatttccttctccttcccaatccttgagtcttggtccccaaacttctgtctccagaatgttcttcctgaccaatctacctggccttccaatccctgtcgcatctctctgccttgagatgtatggcaatgctattttgctagtctgttcttcattctctattacgtgcagagttgaggactgggttgctttcttccttcaaatctctacctaggccttaggaccaagttgttcagggtacgagagaataagctgaccccacagggctgtcaggtgccacaaaagtcttctaacagtccttctcctccctggagtgagctcacccttgttcaccacacaggccttttacacagcacaattacaacattgagctcgacacagagacaggcactgccctgcacttaacctcctgcttattcaaatcctcactctcgttcctatcaaatgagaatgaacatttgggctttcccagaaaggggcagaggactgtgtaaagagctgagttcacccaagctacggcatggacacacccaacctggtcttcagcatcccttccagggctgagatgtcggaacacatccgtgggagccagaaaatgttaagaagaataccatcaccattttaaatattactgcttaccatatcaaatcaagttacagttatcttctctgttttacacagaaggaaactgaagcacagggaggtcaagtaacttgaccaaggtcacacagctagaaatgtggcagaggcagaatttgcattcaggcctatgtatctccaaagcccactctcttaactatgacatcacattgtcttgcatttgactggtgcttggagctttgccaaaacacttcatatacaccttctcatttgctccccacccagggagtgtttatgtgttttggctaagattatatatcgaagttagtgacagggctgagtcagctgcctgccttcatgatactcactgcctccctgcactgagaggccctcagccctagggttagctgcccctcctggtcctgaggtctgttcgaggcaatggttgcatggactaagttcatgctcatatttcctgtccccacttcttccagctgaacttgggcaaatatgtttctgacctcacagggcacctgacacacatcagggcctccccttctctgccctgagttcttccatgctgctacaggtaggagtcagctgttccacccactgtaggactgtgggcagcattactgaggtgaggtcatcttgagcagcccagtctcctgcacacttccctctttcttttgagggtcttgtcctgttctctgccctggtgcccctggaagcaactttctctgattacctctgggttcctaaagtgcatggcaccattaaggaactggagctagggaaatgcctgcaatgctactggctcctgctaggcaattggaatcaaagcatatttctttctttctttctttctttttttttttttttttttttttgagacagagttttgctcttattgcccaggctggaatgcaatggtgcgatctcagctcactgcaacctctgcttcccaggttcaaacaattctcctgcctcagcctcccaagtagctggaattacaggcgcctgccaccatgcccggctaactttttgtattttttgtggagatggggttttgccatgttggccaggctggtctcgaactcctgatctcaggtgatgcaccagcctcagcctcccaaagtgctgggattacaggcatgagccaccacatgtggccggaaccaaagcatatttcaaacccctcacctgacctggttttcatcatcacatgaatttccctgtctcatccttcttaacctttcctttgatgggaagggagacagctcatctgtctggagcggagaatagggcctgtgtggtgcacacacatctctggtagaaggcgcaaaagtcctcgaggctctttggtgtgtccagaactatgaacctcacccagtgcctgtaaattgtgtgtgtgggcctgggggcgagctcagagcacagagttaacatcctttctgagagtgctgcaatgggttgtcggctgctagaaggggtctgctgtaagctttgtgggcaaactgaccaccctccacccccatacacagaagagccccatcctaccctctgcagacgtctgggtctgcgatgattggccctggatgcaagtaaaagctgtttctcctttttgtcagcctgggaatctgaacaactgaggaaatagggaagtcggtgacagtcacagtcatgaacacccagcagattccatttccccacagcaggaggcagatcccttcccacccccaaaagcccccaggctctggagggaattcaaccaagcagggctcagaccgacctccaccagcgaggcttctccttgctgtccccttctgctcaggcgcaacgtggcagggcaggaggaaacctctctgcaagagttgccgtaccagagcacatggggtggcccgatctggggagacggggcacagaaggaatgcagggcatgggtgggtgaggggaagagggtgtggagccctggctctggcttgtccccctctcacccctccaagttccagaggtctgggctcctcattcatctcgtaagcgccaaggtggaggggggtcctaccgagggaggagctacaggccaccgcgaccagcagagagcgaaggcaggagggaccagcctggcccagccccttcattttactgtcgggggtagtgaggaggaagaggaagaggcgaaggctggcggaggaggaggtgagagcgaggactcggcagaagcgagatccgccgaagggaagtccgagcagtcggggagctcaggggggccctcccggggagagggtcgcgggctccttctgccgcttacctgtcgcgccgaggcaaagccgcagccgcgccgcggggtggctcccgggtttccccaccggacggccgggagggtgggaccggggcgggacctcccccagctgcactaacgcgcccgccccgcccctccctggccaggtgcagcgggtcccgccgtgtcctcagcctgctgcgggcccgggaactcccggcggaccggcagaggggcgccccggcttctctgcgtctcagcccgccccgggggtgcggtctttgcggccaggctttcagcgcggaaaaagattggagggtcctagtcaccccaaagaggacaggcattagcagagccgcgggcggcgggtgcatggaaccggaatgtgctgcgcgccagcctggagcgctcggagcccggaggcctgccccggagggggaaacgcggcggggcggccatgggccccggggtcctgccccaggtttgcttctcatttgtgctccatccaacaagagctcgtattccgtgtgccatgaactgtgtcaagggctccaagtgccaggtatcaggtgaatcccagccccagcaaactttaaacctactatgattattccgaatgtaccggggaggcagctgctcacacagcagagggtgtttctcaaagtgggatcccccaccagcagcgccagtcagaatcacctgagaacttattagaaattttggccgggcgcggtggttcatgcctgtaatcccagtactttgggaggccgaggcgggcggatcacaaggttaggaattcgagaccagcctggccaacatggtgaaaccccgtctctactaaaaatacaagaaattagctgggcgtagtggcgggcgtctgtaatcccagctactcgggaggctgaggccggagaatcgcttgaactcgggagggggaggttgcagtgagccgagatcacgccactgcactccagcctggcgacagagcgagattccgtatcaaaaaaaaaaaaaaagaaaaaaagaaaagaaaagaaaagaaatgggccccaccgcagacctaaatattccgaaactcgggttgggcccggcgacttgtgttttaaaagccctccgggtgattttgtgcatgctcgaccttgagaaccctgaacaattagtggcagggctggaatgagaatcct

SEQ ID NO: 6194 - DNA, 6000 bp, Homo sapiens
ggactgagggtgacaagcccagggccccagaagacagtacctaagatgggctggagtgaggaagggaaactgattgcaaccacctatggggctgcagacctgaaaatgcaacagcgcatcatgaacctgatctgtgacccggacctaaccaaggtgagccgatgcctggagcatgccctgactgctcgacacccccgaacccgctacagcccaggttgggatgccaagctgctctggctgcctgcctcctacctgccagccagcctggtggatgctgtgctcacctgggtccttcccaagcctgcccaagcagtctactgaatccagccttccagcaagagattgtttttcaaggacaaggactttgatttatttctgcccccaccctggtactgcctggtgcctgccacaaaataagcactaacaaaagtgtattgtttaaaaaataaaaagaaggtgggcagaaatgtgcccagtggaaggctgaccccatttaagtgccaactactccaaaccgacatgctcacggtctctggcctgttcagtccctgcaaaacagctagcacccacagtggggcgccagggaactgcctcacatctacagctgcacgtcggggagtggccatcaaagggcactttaatacatttcccttattttctgaaggggagtaaggttgcaattcagtgtctgtactgggaatggtcttcatatttcttgggggagaagagcaggtgatgagggttctgggccaggctgggtggcttccatggaagaaaaggcaatattcacataaattctcctgctaaggacactgaccacacaggtgtcaaggcaacttatcatacttcgaaaggagctggatcccttgaggattggccaggaagggaggtgctgggcccttagcggtgcacagaaggccaggaagatgtccaaggcagatgggggctgggctctcgcaggtgggacctttctggggagctgctttgacttatgcagcagatggcttcatgaatgttcatagtgagcctggcagcataagactagggggcagaaagcaccacagtctctggatcctcacttctcccactgcctgcccaaccaacaccttcgcaaagtcctcctttcccaaacaccccccaaaatagacctcgaagtacacatgcattaaggtcccagaggacagggaacatcagtaaggaaaggaaggaatcaagcatcactctaagacaaactcagaccatctcttttcggtctgaaaaaataatccgtttaattgaaaaacctggaggatactattccactcccccagatgaggaggctgaggagaccagacccctacatcacctcgtagccacttctgatactcttcacgaggcagcaggcaaagacaattcccaaaacctagaaggaaagatggggacaggggtggagaggagtcagaagggctagctacctcagacccatgcaagagactccaaacacacactcccaggccagtacctcctgttcagcaccctcctcccctcagccccttccctccaggcaccctggacagagtcccagcccctgctcagggttatctcttacctcgacaaaagcaattccaagggctgctgcagctaccaccagcacatttttcctcagccagcccccaatcttctccacacagccctgaaggtggcaggcacaaaggacaaaagcaccatcagaaacttcccaccccaaccccctcccttggtccatcagtctcttccctgcccctgtacctttcaccccacccttagcatttccagatcccctccccatccctgaccctgtccacctccatcctgggtctcttgcattctaaaacatttcccaggtttcccaagtcccatacacagtctcctccctacctccttatggatcgccttctcgttgaaattaatcccacagcccacagtaacattaatgcagcaggagtcggggactcggttcttcgacatggaagggattttctcccaatctgtgtagttagcagccccacagcacttaaactgggggagggaagaaatatggagaagaaggttgttaagtgaaccttcaccttcaatatggagatgagaattctttttttttttttttttttttttttgagacagagacttgctctgttgcccagacaagtgcccagcggtggctcaatctcggctcactgcaacctccgcctcccgggttcaagcgattctcctgcctcaccctcctgagtaggtgggattacaggcactcaccaccacacctggctaatttttgtatttttagtagagacagggtttcaccacgttggccaggctagtcttgaacttctgacctcaggtgatctgcccacctcggccttcaaaagtgctgagattacaggcgtgagtcaccacacccagccttggagatgagaattctctattcccaccacccctgctcccagcaaccccactcacatctgcctgcatcctgtccaggatcgaagcagtgtggttgtttttcgggtaattctccatctgctgccggaagttgttattaaactctgacatcacctgagagtacggaggagcactgttgcagtcagaattcaagcaccagggtcccagacccggctgaggcaggcccttcccattattccctgcttaccttatctctaaacacatagccagcaatggctgcggccacctccaccaacatgataagagacagaaagatggcaaactgcaggagcaaaggacagaagtcaagtttggagtctatgcattacaggggcccgttttggcacagccggtccctggacactcacaaaggtcttcctcacccacccacctcacccaccttcctgagcccgaaccaagctgctctggcagtcccagaccgcccatgttggtcccgcccccaactcaccgtgatcataagacaatagttctccttgcaggccccgcagcagcccacaaaagccaccaggaagaggaagacacccactgcgatgatgaccactggcaacagagagccaggggtagccccctggattatggtctgactcaggacaagctgtgccccgacacccacggcaatcagtcccactgcacaggcctaagagaaaatcaggtgaggattaggccatatccacaacacagtggccctccatggtggagggcagggggtacacctaggacacagacttgaccccatccggaagagagattctcacacctctagggaatttctttggctgtggggtagggggatgacccatccttgcctgcccctacctcccctgatcccctcccggctctttaatcagggacatgaccaaattcaaaaacctcccagaaagccttgacctcaagacacgtatttctgacctagaataatgctttctacaggcctccagggctcccagctcaattctctcccagaactgccccctcactatcctccagtgcacatcccacgcgcgcatcagctgtgactaaggttcctctggccagttaggccaggagaagggaagaggaaaagggagcaagagtgatgtgtccctccctagacaaacagtagcctctcaagccaggagcccagggcaggagcaaattgaagtgggcagagcccttcctcacccccaagcgctgggaggagggaaagggggagaggggctggacagggatgagagggttggggagggagagaggggagaagggagagcgaagggaagccccatggcgatagcatcaggcggttggctggttgccccactgccccatatcacaagtggttgggtcaccagacaggaagggccaggagggatgggggtaggggttgctgcacacccaggatggccattctcggtggaaacaagcctcaggtgtccaggaaaactggaggagggagtggctgcgctgtctttccctggctttctttccacatctggtctccagctgccttaattctcattccctcagccctcaccactgtggagccaggtctccccgcaccctgccggcgcgccccccaggacccctcgccactcacgcaaaaggccagcaggaggacgtagagcaagaacttcacacatttcattcctccttccaccgccatggctgccgggcctggggcagaggggagggcggggggattaaaactggccgaagggggacctcggtttccgggctcccggccggccctcgagggcttcccttcacggccccgattcccggcccctcccacccggaaacccgcggtcggatccacgtctcccagccccctctttacccgcaggagaggggtgggggcgacggccgcgaagcccggaccccgccccgccgcctctggggcccaggacagatccaagggcgccggcaggggcttgagcctgacgccgaccctcggcccgccagtctccgggcgtcaaacaccctttccccacccaacacccagcctggagaaacggtcttcagcccaaccccgacccccgccccagcccctttcccctgggctctgacctccccgcccaccaaaaaaaaaaaaagtgcagccagcacccccgccacaccctgcccgggcccagggaacttcgaagcaaagttgctccagggcggctggagagcgccggacgagtctccgcgggcctggggcgagccctggaggaagggactgcgggtggtctctcccagcccgcgccgaagtccgccgggtccccgcggcctcacctgggcttcccaaggctggctgcgcgttcctctcccgccgcggctccggggctctctagctgcgccccccggctcccgccccgcctgccgcgcggccccgccccgggctccagccacggtcccctcccccgccgagtggccgccggcctccctcatgtgacgcggtaacagctgcggcctgagtcactgggcccggcgcggggtgggccgagccccccgcccggccagggccacgtggcccctacccggaagaaggcgcccacccccgcaaagggaaagccgcaagggcaagacctcggggcgcctggggcccccctctggcgctatacctccgtgccaactcggggtaggagagcggggcggagcgcagcctgggtcactctggttcagagaagcggacgaggtgggtgagagttaccctctgagcgccggggcggagagctgaggccgggtgacaatgtggtctgtgaggtttccccatcctaccgtaggggatgagccagctctctcctctggctccaactctgtgcaagccccctccccatccgactgtgcagacagctggggactgcctggggtcgggtggggccagaacaaacacttccagaaagtccctggctcacatcctgggtgtctcccaacattctacagcattctagagtggggatttctggcccccctctattagcacagcttctccattttccagggatcctagtctgagaaaaggggaggaagcccttccccgaagccacgctacccagtcaatcaagacacgtccgcgtcgggtcccgccctctgggggaggattgacaaggtctgtgcttccagcctcccagacagctcctgcatccgtctgtgatagcgagggcttgggggaagacacgaaggcaggagaggcttacatcctctggatttccccgtcttatcccagaagacaaagccaggtgagggctggaagcgggctagggggatcaagctgcctccctcccttgtgtgccaggggtggtccccagaaggagctgatctgaacaggccggagagtaggaccggccgtcacacccccacacctccagcctcggccccactccttgggctcttaaggtcctgcctcaagaaccacttcctgagtcttagtgtatgtgtgtacacaaagaatgaaagaagtctctagagctaaaggaaggagatccgggctgggctgagaagcatcttccaggatcacggccttcccgcgggacacaccaagcccattccggatcttgctcttcc

SEQ ID NO: 6195 - DNA, 6000 bp, Homo sapiens; identical to SEQ ID NO: 3241

SEQ ID NO: 6196 - DNA, 6000 bp, Homo sapiens
cacttgccttaccctagtcctagccctgctccttcatagtcatttttacatcaggctcccctgacaaactatgggtgtctggatgagacagacatgacttattatccttgtatctccacacctgacctagcatagaggctaacacatggagcactttaacagcattttattgaagggaggaatggaggaaggaaagaagaaaaacagctaatattataatggctaacatccaaatttcaactgactgcttattgtgtaccagatgctgggttaagcactttgcttatttaatcttacaacccaatcataaaaataacatatccattttacagatgaggaaattgaggcacacagaaatgggtgaattgtagcgcatgagtgattatggcagaactaggagcagctctgcttgggttccctaaaatatttctcgctttaactgtttctctcctgagcatgggaatgagatgaggagtaaatgtgaatatgcaggaaagtagagcagcagatgtaatttagaagacccaactctcacactttcatgtgttatctcacttgagcttcattaacaaccccaggtatcattaactgcacttcacagataagaaacaaagaggtagggagggagtgggagactccgttgtttccctcagggtagaggagagtgggtgagatgagaggtagtgataggacagagggaggttgaccagctggcctccctactaacctccttggcaagttcacggcatcccttgcacactcccctagctaagtggagccagcacctccccctgaagggcaggtctccctcactctgccccaccagaggtgggtatcccctcaccagggaccgtgtggaaggaagagactagataaaggccagggctggtgtcaacggcctcacagagctgcctttgtcacacttccactgttctgctcccctccaggtttcctgccttatggtggggaacacccttgatgcacactcatgtgaaaagtgaaactcagaacacccaaaacccgaatctaaaacagccaagaaataaaaataagatcgtgagaaaaaaaaaaaagaaattcataggacttcctgagaaggggtcatcctgggtctttgcagttaacagaatctagacatgtcctgcagaagcgcttatgggaactttcagtcaggaatatgcacgggaccttggacccaaggtttctggagatagagacaatgtctagagaggtgggaaatggagctttcactgtatacattttcatagtgcctgacttattaccatgtgcatatataactttttcatttttattttccatttcatttacgtataactttttcatttacagaaacccgttttttttttatttatttttttcagagacatggtcttgctctgttgcccagactagaatgtagcattgcagtcacagctcgccgcagcctctaactcctaggctcaagcaatcctcccacctgagcctccgaagtaactgggaccacaggcacatgccaacacacccagctaattttattttcattttttcactatcatatatgttttttaaacttttaggttcaggagtacatgtccaggtttgttacatgggtaaattgcatgttgcgagggtttggtgtacagatgattttgtcatccaggtaataagcataatacccgctaggtagtttttgatcttctccctcttcccaccctccaccctcaagtgggcccccgtgcctgttgtatttttattttttgtagagacagggtctcgctgtatcaggctgaactcaaagtcccggcttcaagtgatctcccacctcagcctcccaaagtgctgggattacaggcatgagccaccactcccagcctaaaaaaccatttttcgaaagttgcctgtaccagcggaggcagaaattgcagtcactattctgtggtggctcatctgcaaaccttcctggcttggtggagaggaagcctgcaccgtccttcctgttaggagagaacagctcagtgcatgacacattaggggtgggtcacacatcctgcggactcatgaacctccaaattaggcagctaattattctgaggattccaagtcacatttaaaatcagcgtcagctgaagtaaaatcagatgagtaatttgcttccggaatgcgaaacacacaacgcagactgctgctacttcttgggaagctgggcccggccctctcaggagcaccaggctgggggtaatggccatgaccctgtcctgggaaggaataggggccattcacctcaggttaggttgggtcctgactaaggtgcaagactcacgtcaggatcacacaacccctgagggtcaaagggcagaggtggaggaaggacagagcaaagacggtaggtccgacctgtacagggagtgttcagccccaagaagagagacatgaggggcagcatcccacaatcttccacaggaagtgccctcattctgagaaagacagctgtcaagtaaggcacatgacaagaatagaagcagctggggcagtgaggtggaatcagagtccagagggtctacagatgggctaagggatgctcaaggaagctctgtagaaagtctctctaggagcttaaagcccacggcctggaatgtgaaaggaagggagttggtggaaggctgcttagagttaggggagtcgggcatcatgccaagagtgagcagatgaacccctttctactcctgggagaatgtccatccttcacgtcactctgatcatgtgtagctgggcaactcttcttctccacactctgctggccttctctcctgactccatcaaagaacatctcaccttctgaatagatcaaacctaccttggagtctcaggttagaaaaaaagattactttcttcattcacctgttaacacccggctggcttccctgcctttcccagtgcgtgtcagaacttcttgctaggatctactcactcatgctcctgctcccaggtcttagggtcttagaaatacaaattcatggctggactcggtggctcatgcctctaatcccatcactttgcgaggccgaggcaacaggatggcttgagcccaggagtttgaaaccaacctgggcaacatggcgaaactccctctctacaaaaaaaagttagctgggcatggtggcatgcatctgtggaggctgaagcaggagaacagcttgagacccggaggtcaaggctgcagtgagccgtgatagctccactgcactccagcctgggcagtagagcaagaaaagaaaagaaagagagaaagaaagagaaaaagaaggaaagaaagagaaagaaggaaagagagagagagaaaggagagacagagagagtaagaaagaaagaaaaaagaaaaaaggagggaggcggggcagcagaaagaggaagaaaacagaaagaaagaaagacaaatttatttaaatatcaaaacaaaagagaaactgaactagtggtagaagtttctaccatagaaagttttcaaattattggctatttggagtcatgcgcgctccttctctgttgctaaggccccaaaagattgcagcacacgaggcagcgccggagaggaccactgagcagcacgggccctggcggggtaattccgaacaccggcttaggaggcgggtttaccaggattctcattccagccctgccactaattgttcagggttctcaaggtcgagcatgcacaaaatcacccggagggcttttaaaacacaagtcgccgggcccaacccgagtttcggaatatttaggtctgcggtggggcccatttcttttcttttcttttctttttttctttttttttttttttgatacggaatctcgctctgtcgccaggctggagtgcagtggcgtgatctcggctcactgcaacctccccctcccgagttcaagcgattctccggcctcagcctcccgagtagctgggattacagacgcccgccactacgcccagctaatttcttgtatttttagtagagacggggtttcaccatgttggccaggctggtctcgaattcctaaccttgtgatccgcccgcctcggcctcccaaagtactgggattacaggcatgaaccaccgcgcccggccaaaatttctaataagttctcaggtgattctgactggcgctgctggtgggggatcccactttgagaaacaccctctgctgtgtgagcagctgcctccccggtacattcggaataatcatagtaggtttaaagtttgctggggctgggattcacctgatacctggcacttggagcccttgacacagttcatggcacacggaatacgagctcttgttggatggagcacaaatgagaagcaaacctggggcaggaccccggggcccatggccgccccgccgcgtttccccctccggggcaggcctccgggctccgagcgctccaggctggcgcgcagcacattccggttccatgcacccgccgcccgcggctctgctaatgcctgtcctctttggggtgactaggaccctccaatctttttccgcgctgaaagcctggccgcaaagaccgcacccccggggcgggctgagacgcagagaagccggggcgcccctctgccggtccgccgggagttcccgggcccgcagcaggctgaggacacggcgggacccgctgcacctggccagggaggggcggggcgggcgcgttagtgcagctgggggaggtcccgccccggtcccaccctcccggccgtccggtggggaaacccgggagccaccccgcggcgcggctgcggctttgcctcggcgcgacaggtaagcggcagaaggagcccgcgaccctctccccgggagggcccccctgagctccccgactgctcggacttcccttcggcggatctcgcttctgccgagtcctcgctctcacctcctcctccgccagccttcgcctcttcctcttcctcctcactacccccgacagtaaaatgaaggggctgggccaggctggtccctcctgccttcgctctctgctggtcgcggtggcctgtagctcctccctcggtaggacccccctccaccttggcgcttacgagatgaatgaggagcccagacctctggaacttggaggggtgagagggggacaagccagagccagggctccacaccctcttcccctcacccacccatgccctgcattccttctgtgccccgtctccccagatcgggccaccccatgtgctctggtacggcaactcttgcagagaggtttcctcctgccctgccacgttgcgcctgagcagaaggggacagcaaggagaagcctcgctggtggaggtcggtctgagccctgcttggttgaattccctccagagcctgggggcttttgggggtgggaagggatctgcctcctgctgtggggaaatggaatctgctgggtgttcatgactgtgactgtcaccgacttccctatttcctcagttgttcagattcccaggctgacaaaaaggagaaacagcttttacttgcatccagggccaatcatcgcagacccagacgtctgcagagggtaggatggggctcttctgtgtatgggggtggagggtggtcagtttgcccacaaagcttacagcagaccccttctagcagccgacaacccattgcagcactctcagaaaggatgttaactctgtgctctgagctcgcccccaggcccacacacacaatttacaggcactgggtgaggttcatagttctggacacaccaaagagcctcgaggacttttgcgccttctaccagagatgtgtgtgcaccacacaggccctattctccgctccagacagatgagctgtctcccttcccatcaaaggaaaggttaagaaggatgagacagggaaattcatgtgatgatgaaaaccaggtcaggtgaggggtttgaaatatgctttggttccggccacatgtggtggctcatgcctgtaatcccagcactttgggaggctgaggct

SEQ ID NO: 6197 - DNA, 6000 bp, Homo sapiens
ccgaggggattaggggtgtggtgtgagcgaggcggcggcactcaccgaggggattaggggtgtggtgtgagcgaggcggcggcactcaccgaggggattaggggtgtggtaggagtgaggcggcggcactcaccgaggggattaggggtgtggtaggagtgaggcggcggcactcaccgaggggattaggggtgtggtgtgagtgaggcggcggcactcaccgaggggattaggggtgtggtaggagtgaggcggcggcactcaccgaggggattaggggtgtggtaggagtgaggcggcggcactcaccgaggggattaggggtgtggtgtgagcgaggcggcggcactcaccgaggtcgcaggcgcgggtgaggaagtcgatcatgagcgtgggctgcgccagctgcggcaggatggcgtcatgcacaatcagcagcaccttcttgtagaggctgaggggcagctgggcgggggccggcaggtgggggtgaggggcgggtgggcgggggccggcgggtcggggtgaggcctccgccctgggggagacccggatgccgcccccgccccctccccggcctggcccctaccttgtgcttgaggaagctgagccacatggcctggaaaaccctcctgtgctcctgcaacggggtccagactgcactcgccgccctccccaccccagaccagagcccgagcagctgccagggcaccccgaagcccagcctgagccaacacaagcctgctctccacttttctgaccctgccttccttcttcctgtccccattcaagtcaggtacgccttgccctcgaggctggagtctcagaacagccaagaaagcagctttggcaagaccatggccaagaggggggctgcgcccaaaacagcccacggggcccacaggtggcaccagaggcttgactccaagaggcggcggtggcctctgacccaagggagggtcccgagttcacaggtctcgtcacctcccacacttcgagtgacctggtggccgtgcaagctgccacctgtaccctgggagtttcctctggtgaggaaggcggcagcctccatggggtctcacatgcaccccacacacacccccaaacccgggagggtgcccggctctccagaagcaactcaccttcaggtgagcaaccttccaggtgtcccacagctctgcagggaaagcgagggcaaaggtcacctgacccgcaggggaggcagaccaaggctcagccctgtccgcccctgactctcagcacactcacccgcccgcttcacatagaagctggagacggtgggctcccggcggggcaggctcacggcagacagcagcgtgaaggcattgttccaaaaggcggggggcacctgcggagcctggcctgagtgcctggacgccgccccccagtccctgcctccctgggaggcaacagcatgatgctggcgacaggaccccatcacccacctcggggtgctggccagtgacccgggccacggcatccacggctgcctgcatggtgtggtagcgggtgtcgtcgtagtccaggtactcccggaactgggacaggagcaggctctggtcctcctcaggagacagcaggcctcccaccaccaactaggggcaaggaccagtgagcagccctgcccggcccagcatacgccagcaaggtccaggcaggcagccctgccccatcgagccccccaggcagactcctcctggttgggtgggccacaggagccacaggagtgtcccagccaacagccaggctcagctcagcaggccccgcccccactacggggccatcctgggatctggccagccagccaggccctctgggagtccccagcaaggccctcaccttgaagagctctcgggggaacaggtagttgccttcccacttggacttctccagggggtgcgctccttccagctgcacgaacttcaggagtgcgctgagggccagctcctgggaagggggcagtgcagggtggctgtgatgccctcaccccacggatgggcccagagctcagcccagtcagggagcccctcccatctaggcccagagctgagaaaagggcggccgggccttctcttgctccacacgccaccagatgccactctgggcttccgtgtcccacccatgacgtagagatgacaagatctctagttaaagagatccagtgctcacgacagagtctggcgggggaagggtacacagcccaggtctgctttatgggccacctgactgctctctcgtcacctgtgtcacgggaatgccaccataacccttgggaacagctgtgaaaacacaggcgtgtgatgccagcatggtgcccaactcagacccaggcttggaagctctcatctcggggtggcaaactcagtgctttcagggcccaggcaaatgacaccacaaagcaaaagagcctcgtgcgggatgacaggagcacacggctgtctcagagctgtctctgactctccctccagccaatcgcagccatgaacaaacttagaccccgtgttgacagaactgattatttctttctgagaaggtggaaactggttattttcacgtggtatctccccaacatttaaaagtctgcagctcggctataattatagacagacgtgttggcgaggatgtggagtatggaactctcaaatgctgccagggggagggtaagatagcgcagctactatggaaaacagtcttgtagttcctcagaacattaaaaacacagctgctgtgtggccttgtaattccactgataaggcatattcaagcaaaagaaacatcacacaagagtttgtacgcgaacgttcacagtccgctgttcgtaacagccaaaggtggaaacgacgcaaatgcccagcaacctacgagcggctgaacgatacgtgctgtgctatacgacgcgctgctactcagccacaaagagaacgaacttcgaacacgccgatgagtggaagaagccacataccgtatgatcccccttatgaggagcgtctaaaaaaagcaaacccattgatccaggaagtaaccactgatccaggagtggctgcctggggctgggggtggaaaggggcgggatatggaagcgatggtaactggtacaggatttcttttcggggcgataaagatgttctgggatagcggcaaccactgcacaacacagtaacagatgctaacttctcagctttaaacggtaaactgtgcctcagttattcctcactacagattttaagaaagctcataatgcattcccatggctgcagaccacagtgtgatctgagcaaacacatctgtggactggcacgaggcttggtgtgcgtgctctatgcaaacacagagatccccgtggatgccactggaaatgaacacggattctgcgtcttcaatattcactacaggactcgatagccatgtttctgaatgggactgaacacccacagggtgatgctcccatgaaggaagcagctttgcctggacaattgtgggagccccagacctctgctttgtggataacctgggagttggggtgcaggggatggacaaggatgaggccagcccaatgacccaccttgacctgaaaggaggggtggcccaggagctctcccaagcgattgcagcagctgtgatagcggtgtctcatccacaccttgtacttccgtgtggctccctgggaccctgcagacaggttagggtggtcagcccacgtgaggcccacatacgccaccctgggcccagcccaaaatctcaggcctggctccaccctcccattgtcttctactcagcctccgcaggtggaaacaggtcgctaaggcccccagacctgtgctgagaccagcacattccctgagccctgcaaacaggaagagcacctcctaccccaggactgccccagccaagctgccaggagcaggatccacatcccctctctttactccaagacctgacgtccccaggatggggacataaaggaagctccgagtttaagcgaccgtgtcaggatcagtcaacatcaaattacaaaaggggtgcaaagcacacaaaaagtcgtaccttgtccagtgttcatctacactcagctgcagggcacccatgtcacccctgccccaacgccaccatccatcttccacggtgggcttggtgcgtcctcccaccagcctgcacggcctgtgccagggttgggggcgctcatcccatggtgacaaagcctccctccgacccacggaaagagaagagcagccccggggccctccagggctcacctgtcatgaccatctcctcagagggcagctggcccacaaacagctctccccgctccagcaaggccccgaaaagacggctgcacgtgcggactgcttcctggatctcctcctggtcctcagactgcaggagaggcggcggcagggtgcccggccgccaactgtcaccttcgcccctgcctaggctgcccccaacccgttcccttccccctcgggacgccagccccgtcacccccgacccgtgacccacacgcctcccaccctgaccccccaacgccgtctcggaacctcctggggacctgccgccgcagccccccattcaagtcccgctcccgtgccgcgactccggccctgcgacgccgccaggcccacctgcagcacggccaggatgtcgaacacggcgttggcctcactgcggctcgccagcaccgcctccagccggcggcccagagcccggcgaactcccgcggcgcccggctcccgctccatgccgcccccaacacggaacaacgcggattctcagccgccggcgctcccgtgacgtcaccactgcgcgtagaacccgacgtcatctctacgcgccgtaccccaaccccatcttttgcgcggagcccgagtcgcaggcgtgccgccgacgtcatcgcagcgcgccacgcccgagtcccaggcgtgcggctggccatggcgctgttctacgtcgcgcggtacccgggccccgatgcggcagctgcggcggggccggagggcgcggaggccggggcgcacggcagggcccgcgcgctgctcgagcggctgcagagccgggcccgcgaacggcagcagcagcgggagcccgcgcagaccgaggcggctgcatcgaccgagccggcgaccaggaggcgacggcggccccggcggcggcggcgggtgaacgacgcggagccggggagcccggaggcgccgcagggaaagcgacggaaggcggacggcgaggacgcgggcgcaggtgggccgcggggcgagcgggctccctctggggcgccggcgactcggtgctgacgcgctgccgggtgggtgtctgcctcgcagaaagcaacgaggaggcgccaggggagcccagcgcagggagcagcgaggaggcgccaggggagcccagcgcagggagcagcgaggaggcgccgggggagcgcagcaccagcgccagcgccgaggcggccccagatggaccggccctggaggaggcggccggacccctggtccccggcctggtgctgggggggttcgggaagaggaaggcgccgaaggtgagcctcggcgggcgggagggtggtcggcgtgagagggtaggctgcgcggattcttaagtgcggcggtcgccccggaagatttcgttcagcgaatgttcccgggtcacagccgcgcctcgctgccaggtctgcagtttcatcgcctaggggtctggatcctgcacgtgcagagctcccgtttcctctgctaggcttgcccctgtcctcccgccgcgccgcgccagttctgcaagatgtgtttgcgtgaacgtgcggggtttcctgctgtgcgctcaccgcctcaggagtaagtcagaggccgttctgcaagctcctgaccgttggtgtttttgcttagcacgtgtggttttcggtaaagagatttccggcgagacaggtgaagaaagcgagaagtttgacagagtgctcgggcaccttaggtagggcaggtggaggaggttctc

SEQ ID NO: 6198 - DNA, 6000 bp, Homo sapiens
agtggtgtgtgcctgtaagtaataccagctactcaggaggctgaggtaggagaattgcttgaatttgggaggcagaggttgcagtgagccgagatcatgccactgcactccagcctgggtgacagagtgagactccatctctcacacacacagaaggaaggaaggaaggaaggaaggaaggaaggaagggaaaaatatggttggccgggcgcggtggctcatgcctgtaatcccagcactttgggaggctcaggcgggtggatcaactgaggtcaggagtttgagaccagcctggccaagatggtgaaaccccgtctccactaaaaatacaaaaattagccgggcgcagtggtgggcacctgtaatcccagctacttgggaggctgaggcaggagaatcgcttgaacccgggaggcagaggttgcagtgagctgacatcacgccactgcactctaggctgcgtgacagagcaagactccatctcaaaaaaagaaaaagaaaaaaagaaagaaagaaaaaaaaagaaatatgacctggtattatttttatatggggctaaaaatgaccaaaacgtaaaatatagtacatataagaggaattgacatgaataattttacacataaattattataaatttcttttcctgtaaacttaaaattattttttcctatggctgataaaaacatcgaacagactcctaattataactcacttgtacttaacgtactttaaaacagaaaatgacgctgactaccaatatttttcttcaagttgttggcatggctattaagctcagtcaagggtaaacacctcttgagttttaaatactccaggtagaagacatttaaacctgtaattatgaagtaagttttctttatatggatgaaataattaaatgaaacgtaaagagcttaattaccatgccaatagacctactaggtactctaaaaaacatgacttctgggctgggtgccgtcgctcatccttgcattcccagcactttggaaagcccagggggacagatcacctgaggtcaggtgttccagaccagcctggccaacatggcgaaaccccttctctactaaaaatacaaaaattagccgggtatagtagtatacgcctgtaatcccagctactcgggaggtcgaggcaggagaatcatttgaacccaggaggcagagatgaaatcgggccattgcactccaacctgggcaatggagactccgtctcagaacaaaacaaacaaaacaaaataacaacaacaaaaattacttcattttggctgggcgcggtggctcacgcctgtaatcccagcactttgagaagccgagacgggaggatcacgaggtcaggagatcgaggccatcctggctaacacggtgaaaccccatctctactaaaaatacaaaaaattagctggggggtggtggcgggcgcctgtagtcccagctactcgggaggcggaggcaggaaaatggcatgaacccacgaggcagagcttgcagtgagccaagatcgcgccaccgcaccccagactgggcgacagagcaagactcgtctcaaaaaaaaaaaacccttcattttactcaaaacttatttacatgatgctaaccaacttcaattaacatatgagttggacagacaagtaaataaacacaattcatttttaaatccccaaagttttaaacccagtagttaagaacacttggtaggaactcaaaattgctggataatcttaattaaaaaatttttacatttaggtcttcttaccccccaaaagaacacaaggtagatggggacataaactctcttttaccaagtggctgataggaaaacattaaaactgagatggttgtttctgtgtaaaagaaatcatcctcaaaataaataggaaccaaggctgaggcaggattgcttgaggccaagagttctagaccagcctggacaacacagaaagcctgtgtaccaaaaaaaaaaaaaaaaaaaaaaaagattagaaaattagccgggtgtagcggtgcatgccccgttgcccttgctactcagggaagctgaggcaggaggctctcgtgagccaaagagtttgaggctgcagtaagctatgatcacatccctgcactccggcctgggcaacaaagcgagatcccgcctaaaaataataaccagtaattctattataaacatacaaccaaaaacttcacggtttaatacttttgcacagaggaccaatgaagggttctatagaaaattaggttttttataaagtgtgctgatttaaatattattttcaaacaacttttttttttttttttttttgagacgaagtctcgctcttgtcccccaggctggagtgcgatggcgcgatctcggctcactgcaacctccgcctcccgggttcaagcgattctcctgcctcggccgccgccaccaggcacggctaatttttgtattttttttctttagtagaaacggggtttcaccatatgggccaggctggtctagaactcctgacctcaggtgatccacccgcctgggcctcccaaagtgcggggcttacaggcgtgagccaccgcgcccggcctcaaccaactctacttaaagagtttaaatactaccttctttttcagagcagggaaacataacgggtaagcgggtacgcttttatttcaaaagtaaatttgtttattaagaaattaaagaagctttccgcaaaacaagatgtttaaacaataaggtgtgattggtcttttatttattgtacaaatatttggcactactatgtgccagacaccggactgaagacgtttggtaaaactttcaacttctctgaagccgagaataagattttcaattaaatttacatgtgtctattacatttgtctttcatttctgcctgagtagccgggaaaacacattagacaggttccttaaaaactaaagtaaaatttgaaggaaggaataatttcggtttaaactagtgatcattcccaacaactccaaacaccacattcactgtctcttacaaggcattttatgttacaccaattactagttttagcttcatcctattacgatttgaagcctggtaactcggcaggcataagcaaacccacaaaaagcatattaaaatccacaggtaaaaaagcaaactattctgaaacaaaacatgctttgctggagccgatttgagatttaaccaggatcagacattccaaattgcaatactgatgcaccagaatgtcatgaaataaatttttcctgaatcctaagtctttcgtttcctcaagcaaaatttaccaatatgtggggaaaacgcaatccaaactgcaattttcaaatatttgtttgcagggccgggcccggtggctcacgcctgttatcccagcactttgtgaggccgaggcgggaggaccacctgaggtcaggagttcgagaccagcctgaccaacttggagaaaccccgtctctactaaaaaatacacaaatcagccgggcgtggcggcgcatgcctgtaatcccagctactcgggaggctgaggcaggagaatcgcttgaacccgggaggtggaggttgcggtgagccgagatctcgccattgcactccagcctgggcaacaagtgcgacactccatctaaaaaaataaataaataaaaactaaaaaattataataggcgcctaaaaatatagtttaaaatgctccttttaattcggcatgaacctgttccgccaaaagatggcctgttgctgggaaaaattaaaacaaactagaaaacataaacggttcaaaaagccctccacacgcaaaagtataaaaaggcgggaatttcctcatttcaaattttggttagaaattagagtgtcatcagttgccctccagggagcgctctgagactctgctgcgagtcatttcagttaataaagcgggaaaacgctcgaacttaacctatagcattttggggccacccctccagagctttcgaaagggcacggaagtccccgtctaaacgcccgctgcaggcggctggtggtccagggaagcggcgtcgactgcgtgcaaaacaaccgccgccaacgcaactccacacctcccagacccacacgtcaaagaacgcgaaccccgcggccccaacttctggcctctccgctccggcgcctgcagccccgcggggaaggggcgacgcgagggggcgcagggacagccccgcacctgggaggcccgagggggcgcccgggagggaggggctgcaaacggcggcgagcgcgcgcggcaaccgccaaacgcccgcctttgtagccccggccccgcgtccttaccctgccgacggctgctcggctccggcccgcggcggcggccccagagccgaggaccggggtgggctcgcgctcttcgtcactggagaagtccgggggccccttgctgttggtgccggcggggagcggcggccggttgcgagccgtgaggtgctgcaggtagagctggacgtacacgtctttgcgctgctccccggccggcagcgtcacattgttggcgaccaactcactcttcaacttgtcttttgtcaggaccgaggggtcttccaggaactccggcatctcggggatctgcgaagccccctccccacagcctttgccgccgccgctcacgccggcgcgcttgctcctggccggggaccgcgctgccgcctccgagcctcacggctcctgcccgggaagagcgctgcggagcggaacaaaaactcgcggacacaaagccaagccagacccggacacaaaagaccccagagccgaactacgaaccaactgcggccaagctggaagctcgcaccaaccccagcccacacactacaggcaggaggcgagcagcctgcttcgcccacgccccaagaacgcgcgccgccattggcgggcgacgggaggaagcgcggcggtgattggcgagacggctcgcgcgggttccattagccgccgcgctgagcgagaggaggtagaaacgcagtttaaaaggcgctggggcgggagccgaggctcccggcccgcttctgttttcgttttctccacccttccccttagacgccgataagggacaggtcgtactgcttttgtgcgccgtttcctctccctcccccagcttgagaagcagctttcgtctctggggtcgatcgcctacgaacgcgccgaattccacgccagtgtgaggacccttggctgggcctttcttcctcccgggacactgaagctccaagagtagccgcagccttgccttccccaaacgctagccctgaaggggaagaaaagaagcgaggcttgtctgcaggcactcatattccttgatttgatttactttgggagggggagggcggggagttacccctctcctcgcgaacgcttcttttgttccagaaacccaggggaagccagacctctacaatcgggcacttaaattacccttgaatttgtgacaaaagtgtactataccattcacttcttagtgtcatagttggggcatgtctaaattgtttaatttgaacagtgcgttcagacgcaagacaaattcgcgcttgcatttttgttgaaaccgtctctggctttggatcccaccacccgcaagaatcctaaacctaacgtttgataacaaaacgaaggagaacccttgggaaccccctcaatggtcaatttaaaataacagatggtgcataatcctaaaggaagactagtgacctataattaggcctagaaccctaatcaaacccgtattaccgatccaaattaaaacctggtagaatctaatacattgactgcaattaaaatgtttgcctggaaattagtatcactgatgacaaatatttgtatttctgatgaatatgtatgtttaaagatgctttctttctagaaaggaaaggagaccttggatgtagggtgtgttaatcatttccccagaatctgagctccaaactatgttttagaaactggttaaattttttttaaatgtttgcctgctt

SEQ ID NO: 6199 - DNA, 6000 bp, Homo sapiens
tttaaaacagtccagtaaactgctacactatgccttaaattgctgtctattatgtacttaaaaatatttactagcaattggaggttaatatggcaactattaccgggtggcaattattgctattaaaaatatataaatactgtaacaccatgtgctactaacaacaaaatgctaaaccgaaaacatacattaacaaattgtaaatattttcattacagaaaatgatagccaggcgtagtggctcatgcctgtaatcccagcactttgggaggctgaggcaggtggatcacctgaggtcgggagtttgagaccagcctgaccaatatggagaaaccccgtctctactaaaaatacaaaattagccgggcgtggtggcacatgcctgtaatcccaggtattccggaggctgagggaggagaatcgctagaacctgggaggcagaggttgcagtgaactgagatggcacctttgcactccagcctgagcaacaaggcgaaactccgtctcaaaaaaataaaaaataaaaagaaagaaaatgaaccatcatggaaaaaaatgctttaaacataaattataaaatcacaatgaactggtacaaaaaaataccttgtgtattttggcactttgaaaattagagaaatcattcccttttcctaatttccattttatagtccaccctattttgttctagcgcaaaaaaaaaaaaaattcagactttctacatttacaactaccttcccattctgcaaaaaaatcccttaagacaaaaagaaagtaggtcaacaatagattaccttaaaagcttcaaatatagaactaatggtcttcaataggaattatgtactaatgggtgtactagtgtctcaattcagcaagaatttgagattatcacccaattatccatagtcaggaagattctaagcaaataaaacatgaaagtggagcatacatatctaagaactagagatcactccctcatatcaaagagcacatatttaaatctagttaaagggcacaaaatcactttctccatattaactcaatagagaaaaataaatgtctacttaacatccagaaattatgtcttctcacaagaatgagttcacataccatagggtgcactgttacacttttcaaaaaggcagatttaacacacttttaactgaatgattaactgagtgaatatataaaaagtcacccagaaatgtgatggacagcataagaaaatagttttgagtcagaaaggcacaggcaggcatgcacttaatgcagcagctacaaatctcacagcagttagaataagaaacttatacaatgacccatatcatatatacacaatggcatttttcacacgttaggaaaagggaatggatgctgaaaaattaatttaagaaatttgattccgtgcagtaaaaaatcagaaaataagtaaaagactagcagaaatcttaaagtgtctgattgattgcacaatcaacttttggtaagccataatgaacacctcaaggtaatggaaactgggtgggtattaccacggtacagaacttaatctcttatttcaatctaactaatgagagtatctaggtaaattctttataaatacttttctctgcaaaaaaaaacaaaacaaaaaaaaaaaaaaccctgcaggccaaaagaaaaaaatgcatgctattattaaaccataaagcgttcttataaaaaaacatgattttgaacaagtgattacatctccttcagaaataactatgatatacaatgtactttgggcaacatatttttaatattccaggttgctactgctgtatagcattttcaaaaaaaaaaaatctcaatttggaatcagaaaaatgtacaagtcagcagtttaattaatttacatttcttcaatagcaccttatccacactccacgtacaagagaatgaagacattctacgttcctttaaaaaaaaaaatcaactaagcatttctatggttctctagttcaaagttgctacttaaaaaataattctttttaaaaaagcatattcaaaaatcaatcccttggtttaaagaggtttaggggagaaatatctcaaacacaaacctttagtcattcaaaatcaaagtacagaatcctctcctacaaaattgcttctccaaaagaatctcaagcattttatctctgtaacgttatcatccttacttaagctttaaaaaaaaaaaaaaaagataaaagaaatgatataccctaaagactggctatacatatactttcatttgtctacagaatccgtatatacacagccattaccagtcagcataatatatgataatttgggagatcgctctacttggttattttaattacctgtaagtgtcaatgtggtcaccagtaaccacacaaaaaccattttaaataccccttgatcaatatgtttgctaatctatggaagtccctgaacctgactgatactaaatgataagactgaggagggaaaaagttgaggcaaaagggggttttactcccacataccaaaaaatcaagggaaaattatcacaatactaagagaaagaattccaacttataaatgaattttaagattaaatatctggattaaaatatttcatttaaaaaaatttacctgattttactagagtgggagcaatgatactatgtctttgtaggtaaaaatcacgtgttgattttttggtctgcattgtaacacatttaataaagtaacactttcatttgaaaagttggcgagaatttgcatttctccattagtctcatagcaaaaaggcatctatgccacccataattaaatgtaactaattacaatttgaacactaaattatttatccagtgtaaacaaggattaagagggaaataatgcttctatctacagcgggggttacagaaaataatttccaaaatgcatgctctccaaaagggactcacctcccccccaaaaaaaacagggtacacaacttaaaacaagttgggtgtttttaaggctaaattaaataaaccgttcagccaattttccaattatattctacgcttgaaacgtaattgccttacatctgtttacaaatctttgctcaatatttaaacaaattcgtactctcctgggcacatagctatacatacagtaactcatgcacaaagcacatatttaaagaccacgcactgcaattattagcctaaacgccaggtttaacaacgtgaatgttttcagaggtaggtaatacgacccaataaaaagcaaagatggcatttaccaccaaatgtcactgacaccgccaggaaaagagttgctggagccctatacatttttaatttcgatgaatctagacaccgtcggcgggtgccaggcttccacgagaacaattgacaccctaactgcttcaagattaaggcaggcgattcaaatccgaaggaaaagttgtcaattatcagaaagagagagcgcgagagaggcgaaggcagataaaagcgatgttatcaaaccgaccagcttgttgcttttgtgtgtgtgtgtgtgtgtgtgtgtgtgtgtgtgtgtgtgtgtgcggattcgttgttaggatagagaaaaacagtttttaaaagacacaggaggagagaaagaagaaaaagctttctccaccttccgtcggctcggtgcaatggctttacggctctccagcatagtaagccccgagaggcaggcggctgtcgatgtttacaatcgcgggagcttcgggtgcaagagtcctttcctgacacaatcgcattcaatcaactattttagggcgaaattgcaggtgtcattatggaatttaaaaaaattcaaaaggcaggcgggcgggcaggcagctgatccaacaacgggggaagaggttgccgatcggaggcgcggcagcacaaggcaaagccttccacatttacggggggaaaaaaaggggggaaaggggaggagaaggggagtgcgattgcaacagagggtgggcgttcgaagtgcgacccagaatccgcagctccgagacttccacatgcaaattccacgccgagcgccgcgctcacaaatgatttttaaagagccaaataaacactggatgggatccaaggcgagagagagacgatccaaaagggggagaatcggcgagaggcgaacggcggggagacgcgagggaggggcgaagtcccggcggcgggaggagaaagttggtcggcggcggaggtcggggacccccccccttccccggcacagccccctccccgcagcccggctactcaccagcgaaaagaggttggagtgacaatcctccaggctcgccccgttcgccacccagttcgctgccgcagtcatgatcctccgcgagcccggccgccagagcggggcatgtcggagcgaggcgtccgaggcgaggccgggccgggcggcggcgcctcgccggggagcgcggggcggccgggccgccgccgccgccgggggagggcgcgagggccggcgggcaggcgggaggcgccgcggcgacgccgcgccgggggcagcgggcccgggctggcggggggggcgcgcgccccgggccggcgctgcgggccggccaccgcctccgccttccctgctcctcagccgccgccgccgccgctgctgccgctgccgccgccttgtttatctccagccaccgactccccctcggcccccgccggcgcgcgaggggaggcgagccccggagccgccgccgccgcctcggagccgccgccgccgcggagcgcgaactcgcgaaggggggggtgcggacgaagccagcgggcgaccccggcagccgagcgacgtcccctccttcctcttcctcccccacccccccctcctccccagtcagcctcgcttctcctccctccccgggctcgcttgctctgacagcaatggcggccgccgaccgcggctcggcccgccattggctggcgcttggtcacgtgacgggcgccggccgcgcggggggagcgaggggcgggcgggggaggggtccggagtggcggcggcggcggcggctcgcgggaggcgctgctgagctgagcgcggccgggtcctccggccgggaagagggagggagggaggcagagagggagagaaagaagtgcgggcggccgggctccccggcgggcggcggactgccggcccgtggctgccgtgggctgcccctcgtggccgccccgccccctcgcggtgcactgatcgtggcggggcgggaccgtgggtcccgggcgcgcccgtggtggccgcggaggagggcgcgggacccccggcctgtgccctcgcagcccaggccggctggcgtggcgcggcggccgcgatgtgggccaggcagcgggtccgagtgccctggggaatgtgtcctcagaggctcgcgccgccgtccgccttttgcagaggagaaaactaaagcacaaagggattaaatcacttgcccgaggtcgcacacttgggaagaggagtccagattcgaacccgcgcacagtgaagccaagctcttggacaaggtttcacaggcttcgcccagggatattcacggctgccatagacggagcgcttactgtgttccagacactgtgcgtttaatacagaaatgtttattgagcccttactcctagttactgtgtgcactcattcattcattcattcattcattacataaatgtttcctgagctcctgctgtgtgccagaatctgttataacttccaggcactgtgctaaggccgtgttgggagcagacccttcttcctggcgtcattcattggataaccaacatttcctgagtgtatatggcctgggagtccggaggagtgctgctatgaagagaagctctcccagtcctcaagaaatggatccccgaaaagggggaggagaaaacaatgtcttcactaatacgcctccaaacatggaacaatcagctgtttcaggtagattaagctaaaagaggaagagtggatggctggcacagtggctcacgccggtaatcctagccgagg

SEQ ID NO: 6200 - DNA, 6000 bp, Homo sapiens
ggagttcagtggcacgatcatggctcaacgcaacctttgcctctcaggctcaagccatcttcccacttcagcctcccaagtagctgggactacaggcacgtgccaccacgcctggctaatttttgtatttttggtaggtatggggtttcaccatgttggccaggctggtctcaaattcctggcctcatgtgatccacctgcctcagcctcccaaaatgctgggattacagatgtgagccaccatgcccggctactatagtgtatttttaatacttaggtgaagtcattctgcatcacagcttacataacatttcttttgctatttttaatactgttccatagtgattcctaaagagtatctcacctactttttccaattttctcttttatcccctttaatacattttatctcttccttaagatattcttcatctgttaacctctgattcctactcttgtatgcttcaaaacagggatcagattttatagccatcagcaaccaaccacagcatgtacttcttctggtcagcaaactgacagattaaaacatcttattttcatctaaaggttgctggtgtcacagtttccatctgtgatatcagatgcataaggttttcagtttttttactgtctaattatttcaatccatataacctaaagttactgttatgatgattctgactcaatatttgttaaaagacttttacatcaaatatcatatttttataaaaagggagaagttcttttttctcttttttttttcttttgcaatcacaggtcactgcaacctctgcctcctgggttcaagcaattctcacacctcagcctcccgagcagctaggattacaggcataagccaccactcccagctaatttttttattgttagtagagacagggttttatcatgctaagcaggctagtctcaaactcctgacttctgggaggccaaggcgggagaatcacttgaggtcaggagttcagggagtgctgagattacagatgtgagccaccacactcgacccaaaaggagttcttagccctatttttctacataccatggagagatttccaaagaaccctgaagactgcgtaagtcggggcgacttccctcctgttccaagaatgcaggaaatatctggctgccttagtaagcttcggcttgttggggtaactataaacaaaaggttggtagaaagaacctaaagtgcgtgagcattcattatcaaaacaaagtaagcaaacaaacaatgaagaataaatttttcagttttccattatttagactctaaccaaataaatactttaaatgttaacatttccatgatacaaggatttaacttatttttctaaatttgagctgtaggtactactgagcctaacaggaaacattttactgcaattacagatgctttcattatagaataactgagcagttaaagacactaatcagtcaacggattcttcatattttaattttataaggcatactgaggcagtgcagtgtagtgggcataaactttggagtaaacagatcattgtttgaatcccagttccattatttacatactcttttttttctgtctcagaacaaaaaaagagtatgtaaataatggaactgggattttttttttttttgctctgtcgccccagctggagtacagtggcacaatctcagctcactgcaacctctgccttccgggttcaagcaattctcctgcctcaccctccggagtagctgggattacaggcatgtgccaccacgccagctaatttttgtatttttagtagagatagggttttgccatgttggccaagctagtcttgaactcctggccttaagtgatccacccaccttggcctcccaaagtgttgagattataggcatgggccactgcatccagcctatttacatacttattgtatatattagttaacttctctaagtctcactttcagttttggtaaaacagggccaacaatacccatgtcatagttaccgtgtgtttatggaaagtacagtaccttgtacatggcaagagttcaaacgaataataactgcaatcattattattagtgcttattgatatcgtaaccaaatactatactaattatgttacaataaatgttagttgctattataattaccgttattattaaatgctttaaaagcaaaaaatcttacaaggctgtcgaaatgagctaggagttcgagggataacctggtttcttggtgtagtattaccaaaattttcatcttgagatgcctgaactgtacaacgagttaagaaaagttttccatgtagaaaagagatcactaaaatgagaattaaccatctttttactatacaaattatgtgaatacatttttcaagaacaagtattttagggctaccatttttcaatgcaaagggtaaataattcattgcttctgccatttaaatgatcagatgtcagtcttagataactacacactgaactaaatgtttttagtcagttttcaaataataaaaagaaatctaatctcagcagaagctgtcagcagtaagaaatatctttatttttagggaaatacgatctcattaaatttttgcattatatttaccaaatgacagctctgtggagtgaaaaaaagtttctacaggattttattatagctaccatttaatactcttataaaaagaaaattctacaacactgattccaaacatgttacaatttttataatgatgcttaaatcgcaaaggatacgtaaaactcttttctgagcactctgtttccgtgcagtccgtgtcacctctgcctcccggattacaggggatgatatctctccaaagccactcctaaagtagtataatcaagcttatataagtgaaacgagaatatagcatttataaagaattttatcatcacagttggagtaaaggaccctgagtaagttaaggtatagtcattctagtagccaagtcttagatcttttgttgagaacgcactcctggctccaaatcctgcttattcttcaaagccttactcaaatcttacctgcacaaagacttctctgactttctagtactcactatgttattttctcctaaggaattatttcaacacttggaatctatattataacactgttttagataattgcttcatgaaagtgaatcttatttcccttgttggattgaggagttacctaactgcaggaattctctcttaaaagattttctgcagtctccaaaatgctttaaaccatgggtactattaaaaaacaaacaaacaacaacaacaacaaacagagcttgcaacaacaacaacaaacagagcttgtgagatagaagggtaagtaaaagaattgtggtaaattggagcaaaatgacccttcaagttatttcaacccaggaggtctcctgtcccatcacaacactccctgtcagtttcactcaaaggtctagaaactaaattgtgcggactaaaaggcctgtgtttaagacaagaatctaatatgcttttcctccacttaaaaccttcagatattccttcagcaggaaagtatgggaaacaaccacatagaaacaattttaaacgtttaacaattaaaattaaaaacaaaaaaaaaaaccttcagatagctctctggtctatagaagtaaaaatttcctaaaatgatatttacaatgtgaccccagtttaggggttcagtcttctattcagccacaaacatcactttaaacgtatactgcatgtgaccactgagctacacgtacttttttttcatatcctagcacctctgaatatgcttcttttacaaagacctacatttgcccccttgagcacctggtcaacaactacttactcctcaaagagcctcaggtaggctggagacacacagatgcaggttggcaatttggttcttgtatttattagcttccgaactttcagcaagttccttaacctcttttagtctcagtgttatatatgaaaaaaggataacagtacccatctcataggatttttcttgttctgaagattaaataagctaataatatatattcaacgcctttagaacaatggcagtcacatagtaggtactcaatgtttggagtacgaataatgtactcttattattcaaagaccagctagaaagttaccttctttgaggggtcttcctgatagttacagtgacaaggagacttaatcgcccccaaacacttaccactttacactgcttggttgtctccattacacaactaattccccgaggggaaggatcttgaataactgatctttgttgtaggcggctagcacagtacccagatcatagagggaactcagaatctgatgctggcacttgtaatcagaaagtctgggctgagatcccagtatcttcactgactggctttgtgatctcaggctggtcacttagcatttcgaacgccgcgctacctaccccgcccaccccaggagcgaacagtgttgctgccccaaagcgccgaatagatcgcagaacgtagtgggaaagtaagggactattatgatctgtaccccaccccgacgcacgccaagcggctttttccccatttgtggccaaatttcccggcatggggaaggagccttaggggaagcacccgggacctccttggcttcttctgggagtctagtttcacctatttcgtttcgccaacaggcgagacgggcaagacttcgggctcagctgccaccatcagtactgacctgtccatggctaaagccttttccacacacaaccaaagttggctgcagtttagctaccgcgttttagccttcccgctctccggaagcaagcccttcgacccggaagcagtctgtccctaaaacagacccacagaaaaggggtaggggagaagaaacaacgttcccatctagcgcatgcgcgacttcagcctacaggtgcacgcccggtgggcgcaggcgcaaaagtttgccaatgtgttcctggttgcgtttagcccagacgccctgcggccgctttgcctgaccaaagtctgtgggcgtggaacaggccctgggttctcctactgggaagaatgaagtatgttgatagtctggaaaaatgtgaagtcatttcctggtattctctgtcagaaagcgcctgttcttggaattcagatgcgtgggctctgccccacacctcggggatctctatctctctgcctacactcagtcctttgttctgtagccccctgcagtttttgcaactattttccataactgctatttgttctttacttggtgttctttcctattaaggagaaaaagttcacctgtattaaaaagtagaaaggcaagcgtgaaatatgatggtattgccctctatttcaaagtgccgtctaggcaaaaagtggtgtattttggtcttgaaggagtcagtcacatttttgttttggtttttgttttttccagtttgaaagtagtgactggctattaactgaccagattacaaaaataatgttagatgcttcagtttatccgtttaataagcctgttgatatagtcttttctgttgctggcatttataccttttattaatacaaaataggtagtccttcattctccctcgtggagaagataatttgaaggatcacaggaacttgagtttttcaacagcatagatctcatgaatcagattctccagtcagatgatgccatatttatcaggaaatctagcaatcaaagcgttatctgttaaggtaatttgtttattgattttgccataaccaatttgtagatcagttcatttactgatttcaggttcaggtactccatgtgatatatggttccacaatcctcagcgtgttaactgaagccttgttgagtttaacaaagctgccattgaagatctggggaaagtgaagaagttgcaacagagttttgggctcacaccattgatacatttgatccttaaggcaagtgacaatttgggtttcacaggtatatagaaattgccagcttttcttgccatata

SEQ ID NO: 6201 - DNA, 6000 bp, Homo sapiens
aaggagaaagagagagagaggagtatgaggggagggaaaatgggggtggaggggtagggaaagagagggaggagagcatgcaagagagtagcagttttcaaatttggtctcaggaccttttaccctcttaaaaactattgtagaccccaaagggcttttgtttatgttggttatatctaccaatatttaccataataaattgatgctgagaaacttaaaaattacttattaattcatttaaaataatcataaatatagatgttagcatatatattttaataaaataattaccttttcctcaaaaacagaagaacaacattgttttaaagttttgctaatctcttcaatatttaacttaatagaagagagctgaattcttgtatctgcttctgcactcaacccactgcagcatgttgttttggttgatgtatatgaagaaaatccagcttcacacagacatatagttataaagaaaggtgtattttaatagccttttcacaaagtagtagatatttctctttgatactacactaaaatttgacaagaaataacttcctaaaggtaagctgcaatgaggaatctgaagctgtataaattaacttggaacattaaaatccattgcactctgaatgaatcttttaactaaacatgattttgaccttacaaatctcctgaaagagcattagggactccaaccagacttttgagaactgttggtgttaagggtttaagacttaagctgtttggcaatacaaatgggataatgaatagcatatagggtgaagaaatcagccttgaatagagagaaacctcttttgaatctagaaagaaggaagcagaggtttaaatacagatatatttgaagggagaagagttcccacatactgttattttttctgtgaaacaggaaatgaagtcatctagggccaggtaaaagaatagcccacataccttaaaggccacctggtaaatgcctattattccttcaagcccaattcaaaaggcactgttagcttcccctgattgtcatctcttttgctccaaaatgtcacctagtcattcttctgttataataattattatgttttactgtttatgtgtttgctttctctgttagatgggtgctctcctgagctaggacccaaccaaattcacctcagcaacgactcacaacatttgtgttgaatgaaaggctgatgactttttaactttaattaagaaattgtatctaggttgcctatagactctgcagttgctctcttcaagttatttttccttactaagatttctctctactgtaaggtacaacatgattgacaaagctagacaagatagaactgcttagtagtcttataaattagagcaaaatacaaggaattgaggaaaaaacccagactatctaaaggccagggataaatttggtagctctcctgcacccaggcttccagcagaggtgataagtgtagggatactaggaaaaagaaggccttctgcaactcctccacacatgtgcccagaagttcaaaatcccagaaattaaaattttactttaaatgtatattcatataccactcccaaccacatacttacaagaacataagccaaaatattaacgtggttatcccttggtgatgacttttatgatagttttgttttcattttgcttttctgaattttcaataatgaaaacagactgggcaaaaaaaaacttaaaaagtgtcatctctttcaaattcttcaagatttactttagtacacttaggattaacacaggtggaacaggatatgttgcttacaaataagtaaataccttcatgactgtttcctcataccactaactctcatagtaaagaaaacccattcatattttcaagtaagacaattcagacaagtgtaaaaggtggggtggtgattgagaaatatattaaaataagcacctgcttatggaatccaatgccttcccaaagtactgtgcccaaaacaggagggcaaaagattcttgtcaaatgtgttaataaagttttaagactgcttcattagcactttgatcagaggaaaagattgtgcaggggtggagggaagatgaactttgaggttgcacaggcctaagttctaaccaaagccaactgtgaccagagctagtaaatacatttctctgcaccttgcttttctttatctgaaaaacagagatagtaatacctaagaattgctgtaagaattaaaatcaacacatgcaaagggccaaatcttgtcacataataataggtggtcaaaaaaaaaaaggagcaattattatttcctggcagaaattattcttatatcacattatttttaaagatatgtgcagactgtatttaggttcaatttccagaacagtagtgaggatctactgaaagcgtacaaataacaagtctgagaaaatagctaagcttttgagatggtggctgtcttatttgatcaaccatggtaattttaatgtatttatatcctttctaaaatacactatttacttccatatattcttagcaaaatatgctgtataaccattaatctttatttttagatactttaacatcatcattatgaacaaaagctggtgagggcttccagagctattaaattagatagggctgcctattacaaactgggatatgtgctggtgtaccataaattaaacttaacatatctttcttgaacattgatccaacacaacagtaagtaattgaaaatgctttgcatatatttaaaaaacaaaatataataccattgactcaccaaatatttactgagtgtctactttgtgctagatactgctccaggcccctggagatgaagcattaggaaaattagagaaaaaaaacaaaacaaaaccaaaacctgaattcatggagtttatattctaatggaggaaggaaggcaataagcaaataaataaactctatagtatgttagatggtgccaagtgaaatgaaagaacaaaacgaaatagagaaaaggttgtaattataaatatggtagtcacaggaagcctcaataagaaggtgccatttgattaaaggtcaaaaagaaggagaaagccagccactggactatctgtgggaaaagtttgtggacaaaacgaaatgtaaatgcaaaggttggaactgggcccactgggcaacagcaaggacatggtgagactgcagaggagggaacaggcaagtagcagatgaggtcagaaaggtaaaggggccaggtcttcaagggccttagagtttttgtattgactttgtttatcctctgggtgagatgtagatgctggaagttttgagaaaagagacatgctctgtactcatgtcttagaaggatactggggctgctgggaataaaggatgttggagtaaggacagagaagcaagaaagaagcatttaggagagcctaccaataagccaggtgggacgtgctgcaggctgggaccagggtcgtagcagagcaagtgcagaagtcctaggattctgaggtggagccaatagaaagctatgggctgatgtggagagtgagaagacagcataaccaagtttaccgatatttactgagatagagaaggctgaggaaggagcaagtttggcctggaatatcagaagctcagtttggagaggtagaaagcaaacttcaaatgaacgctctgcaggaaaacagaagaaatttgaacttcccgatagccctcttcaaggaccactccaagaaagggaaaaggcagattttagtatcctctgcttaccaggggccttgggcagttacgtttttgaagcactaatagcgccgtttgttcccattctaaatgctcaaagtgctttctcgctttctcagggtttgcttttttttttttttttttcttttgagacggagtctccctctgttgcccaggctggagtgtagtggcacgatctcggctcactgcaacctctgcctcctgggttcaagcgattctcctgcctcagcccccggagtagctggcattacgggcgcccgccactatgccagctaaattttgtatcttagtagagacaggggtttcaccatgttggccaggctggtctcgaactcctgacctcaagcgatccgcccgcctgggcctcccaaagtgctgggattacaagcatgagccaccgcacctggacagggtttgcttttatccctttgtctccctctggcttccaagctgacaggtacacttttttcccccatctgcgaatgtactcatctgatcccataagccgcctccactttctaattccctggaagcttggaggccggagaaacaagcgaattacaatcgtgtggaggctcagcgagctgctggcgccacaggcatctgtcaggtgctggcctgacttcctggttctggggaaaagagacttcatttcgcagtcgggttcacggaatccagggcctgagaggtgagaaacttgaggtccgactgcgccccagaacagctgggtgacgtccctccaagcctcaggctcttcctcagggccgacgaacttcttgattaccggggacctacccaagtctttcttctggagtaagctctgtcaaaggaacccacttcctctctaacttttctcacggatgataaagagatttccgttccgcagccgaccccagcaaccctggggcagaggtgccgaggcctggaagcggacctcggacgacgtttgaccgaggcattaaggcggggaatgccttacctgcccgggcgcgggctgctgaagccggcgacagaagaaccagccgaactaggaagcgccgcgaaggggcggggcctgccgggttggccccgccccacttccccgatgggcttcatcttggcgcctccaggcggctccacaaagtgagaaactccacgtattgcgtagggcgcgtctttacgtgggcgcctgcccctttaattacgcccctgtcggaggctgaaacacttaaggcttccgggcatgcgcacagcgttgtgcaaatgaatgccttccactgaaccgaggtagacggggtcgagtttcttgcgcgatggtgggcttgtatgtgtgtgtgtgtgtgtgtgtgtggggggggggggtgacgaggttggcattgaggatccataccctttgcgcccaaagaaaggtgacgtggactagtgtcgtgcctttggacaggcagagtaagaggagggagaagaaacaggtagagctgctggccttgtcggggacacctttggacgtgctggagggcaacgacgccctagttttctgtgaagttaagtagcttctgcaggactgggttcagtatttctagtaccttctcaggatccctcctccgccaacgaattcctcaaccacgggccaagcaaactactcccccgcccactgtcagcagcagtctctgttgaatgggaatactgcaccttcaggcttaacgccacgtgggctcctttgctgtcctccaggtcagttccactcttctaccaggatgctggaattacattctccccaagtttccctacctgtttcacttgcttagaatgtctgtcttcctccttttttctgggagaaagaaaagatcattattctttcagggccaatccctacagctatgttcttgaccatgctgttttgtttttgaactcctctaactgttactccatcggatacatcttgctcatttccatcagaatcatcttacaattccaaaagcatgttttggaattgtgtcacttttctactcaaacactaacagtagccatccattgaccacccaatagattctaagtccttgtcagggcattcaacatcttccataatctggtactaactcagctacattttccagcactgtagtctccctgcattcccatccccactgctctgtatctggactgcttgtttttcttgcacacattgcatgttttgtttgtacattacttgtgaggtctctgcctcatttctatctcttgaactatggaggacttagatggccacttcttg

SEQ ID NO: 6202 - DNA, 6000 bp, Homo sapiens
aataatacgtataataaacatattaaacataataaacatattaaactactgactatgtagtttctggattcacaactatagttgaaaagtataataattagctaaatacacaaatagtattggaatttttataagaacttgggatttgctatagtttcaagttttatttcctaaatttaatcagttatttaagtactgagaaagttttctttgttaagttaggcatctgaagtacttaaaaatgaatacattcaaaataattcaattcttcaatatatctttattttacatatatatacatatatatgtatatatatatatacacacacacacacacacacaaatatataggtatgtatatggttcttctgttagttgtgcctggggtcactcatgtgcttatagttatccagtggcttgattagggctggatggcttttaaagggtagatttctcagctttgaaaactagtctctgctacttattaacacatcctctaataggttatcttaggcttcttaaatgatgatctcaggacaacaggagggcaaggttcaatgcacaagctctttataaggctctatttagtgcgtattttaaaaattattattcaagcaaggtacatcctgaatcaatggggaagaagttataaaagggccaagataacagaatttttaagattccccaagggagcatagtatgagagaaagggagagagagcatgttacgagctcagttgtggagtcatcttaggttacttccaagagccacctgcaaagtagaggttgcagggaagggacagatttacacaaaggcataggcagacggggacctgactcactgggggccattattgcaaacatgtaacacactattcttgttagttgtgagaacttctaatttttcctaggcacagaagcagacttacagatgcagtttaagtggatgggatgactgatttctgtttgcttacaaaaatggggtgttactatatatgtgcacaaaatccaagtgcaattggaaatgtgaaaggaaaataaaacttgggatctcaattcattatgtctataagaaaaaattagggtgaaagctgagtcatgcaagaaactgctctccttttgttcttagcagacagctacacatcaaatgttaaatatctccacaggtagctactttaggacattcatcttatctcacgtaaagtgctgatttaccaccccacgtgaatacataatatctatttccctctctgctctttttctcttgcaacacatagattaccatatctaccctttttctcttccaatggatttttcccctttaaatactgaagccctcaaaatcatcttagagaaaggaagagactacagactgtttctgtgattcagtgtttatttcttttcggcatgtccctaaccttggcaaaataaacttctaaattgattgagacccgtcttagacactttttggttcacaaagacttctcatgagctacattatagatatacaaaactaaatacaatcccttcaataaaactgtaaattgtattaaggcaaattgttttgccttaatttcatggacaagaatgagtgtgcagcaagcagatacttgtcttccttcaacatgaggaaactggaaagatcagtagggagtcagtgtgaattaagccattaaccatggcttaatttgccatgaagataaggcaaaacaaaatgtttaggacacacaatggatacaaaatggccatgctttgttttagagatcggagaagtaagctactatgacttttcttggtaagtcagcaaaaaggaactagaagtaacatccaaggaatataaattcattgctacagagaacaaaggtaagcaataataaaaggtgaggccttcttgtgaagtgattttggtcagataaaactgttcacaaaagcctagggcagaaagaaggcaggtccagacaagtgttcttataacaaggccacttacaacattgtcacataagtcccatttcttgatgaaaactgacaggtgcagaaaatctgacgaaaaataatagttttgccaattttcctcaaaaatatacagtgagttattgaactagaacctgagttaaatttcctgactcacacttaggtacagacgacaatgcataaaaacttagttgacttgttcaagccagagctgacttgttcactgctgtatccccagtgcctagcacaggaaacaggataaaaaatactgttagaatgagttaaagaataaaatttaggtaagattttgcttttagttacaattgtcactgagatctaggttacaatcttagcttcatcaattattacttaacttctatgaacttgttctcacttctgaaaaattagaataaaatttaccattagagaccaggcaccttgagtttatgaatgtgagcaagagggtggtggcagaagggtagaaaagagtaatacagacaaacgaaacttgtaagtgaatacataaaaataagttataacgaatgaaaaaaaaaacagaagaaaaggtgttagagaaaacagacttctattatgaaaacaaacacgcagtagtcagcatagtgtatgacataacatgtgctcagtaactattaaatttcattcctaccattgtcagaggtatttgaatcacaacaactccatcttgaataggggctgggtaaaataagggtgagacctactgggctgcattctcaggatgtctgtcagtcattctaagtcacaggatgagataggaggtgggcacaagatactgatcataaagactttgctgataaaacagcatgcagtaaagaagccagccaaatcccaccaaatccaagatggcgagaaaggtgggacgtctgctcgttctcactgctcattatacactaattataatgcattagcatcctaaaagacactcccaccagtgctatgacagtttacagatgccatggcaatgtgaagaagttactctatatagtctaaaaaggggaggaacactcagatctaggaatggcctaccctcttcccagaaaactcatgaataacccaccccttgtttagcatataatcaagaaataactataacaatccttagtctaccacctccaatgggggtgtatgcacctccaattctttcttggcgagatccaggagccctctcctggggtccagatcagaacacctttccagaaacaccatcccatgttaaattatgaattaagaacactgaacatgaagaatgtttaattcaaattattgagtaaacacttacaaaattaaaatataacatttaataaaaatagcaagattgaggaacaagcacttcacaaatattggtttcccagaatgtctgaggaggtgtatagaagttaagaatatgtcctccagccagagagatctgtgttcaatcacactatttaagttacttagcttctccaagcctcagtttcttaactcagatggaaaatgaggacaatgtaagcacctatttcactggattgtaaggaagaataaacaagataatgaatagtatttggcatataatctttcagaaaagtagtaaaattgtcattcctataaatctaactaatgtctttaaaattcatctcacaaaatcagtatctttttattttgtactgagctacttattttacccaaattgggggtttaaaaagaaactcattacttattttcgaaaggaaaatttactgtcaagtacagtaattttttttttaaagcagcgtttaaaaaaaaaaaaagacaaagcactggtccagatagttggaaatgtcatttagatttaagtctacagcttcttaggaaagttaggtagagatgtatcatactccagcatgattgtgagcagacgagcaggatgagcaaaacttgcacgagtaagagtggtaaacaccagagaaggcgctttcatggaagggcaccctaggtaaccaagcaagtggcaacaatagtacaggtgagtccttggatcccttctctctccacccccggcagtggtccggacaagtactaacctctcctctctagagccttgactttatactagctccacaaccatcaagccccacgatccgcgaaaggaatggtgctacaggtaaggcgggcggggtcgggatgccgagacctcttgtcaattcttcgctcgcccccaaacgaggatcacggctgcgcggctctcactctaactatcaagacagattctgatactaaacaaggctaaaactttttgttttttccttcttacagaaggcactaccctggacgccgcttgcaaacgcctgaagagaaggcagggtgttcccactttttcagaatgggaccaggccctacggccccaatagcagaagcttctctaacccaggactgctcccctcaattcctcccaatatgctgaccgacagctcgacctcacctgggggcggttccgccaggggatggcttaggaaaacctcaggaagagcagcccagcgagtgacgccactgaaaccacagtcatggtctacctcgttcaggccaccagtttgcaggcgcctgagccgctgctcctcccgcctctcggtccttccccgccgccccggtaccgtcgcagtcttacgcgttgcatgccgggagcgccttacctcctcttctcagggacttcagttcccagcatgcagaagcctcaggcagaactgcactctgggatttgaagtcctcgttccacgccttctcatcatcctgaacaccgagctctgggactccggcggagaatctaaacgtaaagcatcacccacggtcgtgaactgtaggctctcctggcatccgggatcttattctggccttggcggagttggggatggtgtcgcctagcagccgctgccgctttggcttgctcgggaccatttggctggacccagagtccgcgtggaaccgcgatagggatctgtcagggcccgcggccgggtccagcttggtggttgcggtagtgagaggcctccgctggttgccaggcttggtctaggtgggtggatccttgtaagcaggattagcgagtcactccacgctcaggttctttagcctgagggcccgtgtgccacagcatagctaccccgcccttccagcctcgggtccctaatactgccttgcttcggttccagtttccgccgcacaacttcactcattccaaatgttaatttctgcgttttttttcagccccaattctgtttctccaaatcagggatgattgtcggccttccacagaccctcgcgcttgccaggattagggtgttcgcgcgcattgtgggtaggggtgtggaggaagggatccagaaatcttaagtattaacttagattagtgttagcaaggaagccgtcacattttatttagccgggacactctgacagtttgtgccgactgctatttttgatcaaggctattttgcccacttgtctattttgtggcccaattgtctgttttgctaacatcagaaagttataatgaaataatctgcaaaaaatgtaaggtgctagaaaaccaataatactgtgtaccttgaaaatgctaatatacacctgttttgttacagaggtggagcacagtgaaagaattcaagatgccacctaatataaactggaaagaaataatgaaagttgacccagatgacctgccccgtcaagaagaactggcagataatttattgatttccttatccaaggtgcttaattggtcaataataatagatatatacattaacttatgattaatttattaataaaatatgaatttatttttttcagggacaactataattgtcacaatctggaagtgttcttatattttgcttgaaggttataaaatataaaacagttgcttttctgtttacttaggtggaagtaaatgagctaaaaagtgaaaagcaagaaaatgtgatacaccttttcagaattactcagtcactaatgaaggtttgtatgtagtaggttttaa

SEQ ID NO: 6203 - DNA, 6000 bp, Homo sapiens
tgtctgcaacctactttcaaaagacacagaaagaaaatgtatatctacatctaagtgtgtatgtgtgtgtgtatctatggctatttctctacagagaaaaaatgataaagcaaacgtgataaaatgggctaggcgtggtggctcatgcctgtaatcccaatattttgggagactgaggcaggaggatcgcttgagctcagaagttccagctcagcctgggcaacatagtgggaacccatctctacacaaaaatcaaaacattagccaagcgtggtcacacgcatctgtagtcccagctactcaggaggctgtggtgggaggattggttgaaccctggaggttgagactgcggtgagctatgatagcaccactgcatccagactgggcaacagtgtgagactctgtctccaaaaaaaggaaagaaagaaagggctagggaagactgggcacagtggctcacatctgtaatcccagcactgcactctgggaagctgaggtgggaggatcacctcaggtcaagagttcaagaccagcctggccaacatggcaaaaccccatctctactaaaaatacaaaaattagccgggcatggtggcgcacacctgtaatcccagctactcaggaggctgaagcaggagaattgctccaacccaggaggcagaggttgcagtgagccaagattgcaccactgcactccagcctgggcgacaaagtgagactctgtctcaaaaaaaaaaaaaaaaaaaaaaaaaatacagtaagaaagggctagggaagctatgggaggggcagaggatgtgtattgtatgtgttgtggggagtgtcggggaaggagttggagtgaagctggggtggggggtgcactcacacagatggcgttgatgtccgactcgtggccagtgaaagtctgacggcaggtcccctctcgcacatcccagagcttggcactggcatcacaggcccccgaaatgaagagattgaagtcaggagacacagccaggctcatgcagtcacccgtgtgtcccacaaatacagtcttctgctgcccagtctcaatgtcccacaaggcactgccaaaatggagggagactgttagagaaaggccgggcccactcccaagccccagcaccagcaatgttcagcctcaccacgtggtgtcccccgagctggtcacaatattgttgtcatccaggaagcggcagcaggagagataacctggaggcggttagaaggacagtgccctggctgcagagccacagcccactggaagcccagggttccctgaacccctcaggaggggaggagagggtctctccctcacctgtgtgagcagaaagctcccggctgaccttgacattgccctcacgggatttgaggttgtagatggaacacatgttgtccagccccccacatgccacaaagttccctgatggggcataggcacaggtcatgacccaggaggagcgcagtgggatggcgtgcacctgcagggagggtggtttgagcagagatgggaccggagccaagctcccagctgggcacaggagggtaggcatggcgcccttaggaaggatgcagtggtggaggctcagggaggcagggctggtaccttgttggtggtgtagctgtcccacacgatcagcttcccatcttgcgaggcacttaccagcagcctggggagagggcatcccatatcatgcaagcctccccttcccgccttcctcactcccgctctcaccctcccattctcggttcccccccaagcctcacttagaatcagtggcccagtgcatggcgtaaatcttggccaggtgtccccttaacgtccgccgcgtccgcatctggactcgtcccaccacctctaggccagacaccagctgcagagagaggggcactgaatatcagggtgagcaggttacgtgcccagatgtctgtcactgccactgatctatacaagttcccgctctgtgccaggctctaggtcaggcccccagccttagagaaataagtctctgccctggagtgtcttagactgatgtgggaaagagatgcatgcatggccagaggtgtgttgcttgtaagtgtttaacaagcacctctccagtgttggtgaggaaggtgggaaggtgatttccacgatacgaatacttgcactttgaccagtttccagctgccaatgtgaggtcattggaaacagatttgggaagagatgcacagagctggctctcccaagccgagaggagcctgcttgcacccaccgctgcagcacggctagctttttaactgggtgcctggggcatcaccatgaccctgaactgtacctcctgaaatctgtggtactatgccccttgagctctaaccacattttagacttaggctgggggtccagagtgaacagacttgatttgccatcacttgcattgctatctttttttaaaaagttaaaagcaattttttttatattaagaagagatctcactatgttgcccaggctggtctcaaactcctgagctcaagtgatcctttcacgtcagtctcccaaagggctgggattacaggcgtgaaccactgcgcccggcctgctttgttatcttgggcaagttgcttcacctccctgagtctgtttactcaaggtgtaaaatgaggcttatcatagcacctaccttacagagatatcatgaaaattcaatgaaatcaggtatttatgcagcttagcccagtatctggctcataaaaagtgttcactattaacatatttaatccaatctaagatgcatcactaagaaagaaaagatgctgtcaattctaattgaaacaatgatccattgctgaatgcaccttgatttcagagatgtcaaaatgtgaagaaatgtgcatcttagaattgacaaaatacagcatagaaaactagcagctagagtctacaagggctttataatttacaaagtactatcgcttcttcatcttcaaggccctgggagggggctgtggtcactcttgttctacggatgagaataggaaccgtgtccgcatctttcgcatccaatatggtgcctggctcagagcaggtcccgctaaaatgttggtcgaatgaattaattaatgggtttcctcactccaaggacgtgctgtactaatgctcggagcaacgcgctattgcgggtcggggagctcccttcccctccccccatgccctgccttccgggggacagggggtcttacctctgccagagtaacgtcagcacaggctttcctggcatcctgcagggaaagcagacatcaggggagcaagggcgaggtgggggtggcaggtgcatgggccttcagggcaggttggtcttggggctctggggcttgggggtctcaaatatgcgaaccaagtttagaaagtccctggtcacttctagtcactcaagagcaaacccagccccctccccctgggccacgctcctcatgtccccagctgttttctggggccccaggggtagggctctggagttactgcaatctgcttcttgagctgctccgcttcctgacgcagttgctccatctcccccatggctgacaggtcgaggggtcactctggctcctgccaggaacatggggtcggtgttgaggaaccccccaccaggctgtgcttctgcccttcgtgcccacaccagactccaagacacagggaaacgactgggtggctgcaccctctccccagctaggccctccaagtttgaggtcctttgcgtccagccccagcctgcctgagccctgcctgcgccccagcccaggagagcagagcccaggccagctccctcttacttgggctctggctggacctcggccgggtttccagctccggttcctgggagcctccttactccctcagctgcgacgcccgcgcccgcccgtcacctgcccaggctctgctgccagaggagctggcctggcctggcctggccccgaccggcggggggttgggggggcctgacagggaagggtagagccaaccacaacgtcaggcaaatgaaatcagctggcaggggtggggggaaggggtggggggagggagggaggtgtacggattccagagagacttgggcccagccgggaggagggttgggggcaggagtgtggggccatagagaggggcagcccccaccacaagccctgagagaggagggggtgaaggggtgcttccctggtcagtctctgcaggcagagataagagcatcaggccccacaggattagagcaaagctgtgaggattaagggttggggtttgggaggggtgcaaaggagcagacaactacagctccagtggcccccctggtcccggcccccatccatggtgatgatcttggcagtcagggccacttagcaaccaggccaggaggtgggatataagggtgatagatggccccattgtcagtacctcaaactgtgctcctcagctcagggtggtggggaagagggtttggtgagtatgggagggtacaggcaggagctgagattagaaaggactgatctggataatccttcttctcgacaaaccccaaccagctgcctctgggtctgatcctgttgggggagaaaggtacaggggacccacagagaaggatggacaggtctgcccctattgtgggcgggcaacggatttcaagtggagggaaggcccgcacgctgctcccaggctggggtctggccccctccttgccctctcgaggctgtgaaagcaggggtcagagagaaagcaggcggccctaagtctcagcaaagctcagagagggaagacagggcttacacttggaggcctaaggagcagctgccaggggcttgggtcatttgcatgaggggagcaggtggctgagatttccctgacaaatcacaggctccaggcgccccgcctctgggaggcccaaagacacctgtctcctcccaggccagccagagccacccccacctccagccatcacagaatctgtgatacacttgactggcccctggctgagagatcttcacgacctttattgcacagactgggagagaggagcagggttatacctcccaaccccaccatcctcttcatttaaagcatcagcctcctcccctgccatttctgttcagggaggcacagtgttccccatctgtccagggctgcaggtccggcagcggggccccgtcccagctccccaggcctggtgagctccaggctagcctgtgcactgtcctctgagtccaggcccttgtaggtccccaagatggtgggggtgcagggacagagagcttgctgttctgctcctgatgtcacacaggggcttcctgtgtgtcctggcatcaagatggccttccacaagtcaagtggccacatcctcaaggagctggctcagccactcacagctcctcccgaacccgaggtgcccttccagtcttgtcttggaccctctggtgcctgcggctagggggctctggggaagggtctttgctgggcatttcttcctcttcctcttcctcctcctcctgtgactcctgcagcagttctttggcttctatccactcctggggttggggaggagagtgtggcccattccctgcacccaccttccctgggtcagctcagcccctgaccctcaccgactgtgagccttctcgggggctccttgcccacccttcacgcaccaggagaaccacatcccttcctaccccgctccttacctgctccctgtgctcaggtgcccacgtgtgccacagtgccagggcacagcgccgtccccgagtcacggcccacaccccatggggattctcgacaccggagctgaaggccacaaggcgcccacagcgaggacgcacccgagcctggagggatgagggcaggttcagctccagggattggctctctcagagaacttggccctcactccctagagcaggatggggacaggggcacagagaggatcagctctctcgctaccacttcctactccttaattcagggactagcttggggca

SEQ ID NO: 6204 - DNA, 6000 bp, Homo sapiens
ggggttgacctccagctgccactcccgcagagtccctgatgccaagttgcacccacccatggactggaagcctccagacttcttcttcttcttgttctgggcacgcaccatctcccgggtgtccggctccacatccgaggtgcattccgaggtggggaaggtgggcaggggtcttccaggtcccagctgggagggaaggacagagaggtggtgtcactccaggcacagtgggaccacagggggcagggaaggggcctgtgctgttgccctctctcccccattcaagccaatgatgcttccgccagatcacgtcacttttttgctagtaagttctcctttggctgggccaggacagaagtttagagtggggtctgcagatagactgtctcggtttgaatctcaatcccaaaagtaagtacattttttttttttttttaagagacagggtcttactctgtcacccaggctggagtacagcagtgcaggcatggctcactgcagccttgaactcctaggctcaagtgagtctcccaccttagacttctgagtagctgggactacaggcgtatactaccacatctggctaatttttttattttgtatttatttttttttttttgtagagatgaggtcttactgcattgcccaggctagtcttgaattcctggcctcaagtattcctcccttcttggcctcccaaagtgttgggattacaggcatgaaccaccacacccagcccctaaatacattaaagagccaatcgaaatgcctactatatgtgaagtactagacttttccaagatctcccgccccctacccccgccccatcagccgccaaccaatctcctttctgatctctggtctgtctcatgcctggcctcctttctgctcacccaggacccacttgtcctggcacagctaaatccaatccagacacctcctctggggaaccttcttggactacagggctgtcccctttctcttaaaaatagcattcatggccaggcgtggtggctcacgcctgtaatcccagcactgggaggctgaggtgggtggatcatttgagcccaggagttcccagactagcctgggcaacatggtaaaaccccatctttaccaaaaaagaaaaaaaaaaaagcatttacggagcagcaattcataagagtggctgaaacttacaaggtatctactataagctaggtgctgctctgagaattatacaaattaacccacttaatcctcacaacaatctgatgaagtgggtactattgttctgtccattttacagagaagaaaactgaggcacagagatacagtgacgtgcccaaggtcacacagccagcaggtagtgggtgagggatgtgaaccctggcttcagagactgtgttcttttcactgtgaccctctaagattaactacaatcctctagggcagagccatggcctgtcttgaacagtctgtgagtttagaacggtttttactttttaaagggttgtagaaaagaaaaagaaatccaacaaaaaagacagtgatcttatatggcccaacaaaacctaaaaaaaagatttaccatctggcccttgataggtctgccaacccctgctctaggtacatgaaaacaaggtgcctgggacacacaggcgcctgcaatagctactgaatgtatgaacagcatgtccttcagtcttcttctttttttttttttgagacagtctcgttcagtcacccaggctggagtgcagtggcaggatcttggctcactgcagcctccacctcctgggtccaagcaattctcctgcctcagcctcccaactagctgggactacaggcacatgccaccagcccggctaatttttgtattttcagtagagatggggtttcaccatgttggccaggccggtctcaaactcccgacctcaagtgatccgctcaccttggcctcccaaagtgctcggattacaggcatgagccaccacgcccagcctcctttggtcttttcaacactttttttttttttttgagacagagtttcactcagtctcccaggctggagtgcagtggggcaatcacggctcacctagctcaggtgatcctcccacctcagcctcccaagtagctgggactacaggcacacaccaccatgcctggctaatttttgtattttttgtagatgcagtctcgccatgcatgttgcccaggctggtctcgaactcctggcatcaagtgatcctcactcctcggactcccaaagtgctgggattacgggcatgagccacggcaccgggccaacaacctttgaaacatatataatcatttacttgccttctacggatgtggaaacgggcacagagaggttaagcaacctctccaatgtcccacagccagtgcaaggttgggccaaatttgaacacagggcagtgccgtgagaagcccttggtctgaactacacttagactcctcttctttggtaataaccacctctgcccgcctgtgctgttcattacctttagtagtttctctacatttgttgagcacctactgtgtgccaggtactggctaggctggaagatgagagagggacagtgggatgaggtctcttctagttcctgccttggagtgtgatcctttctcttcatataaatgtccacttactcatcttgccctgagcctacctggtgccaggcacccgctgggaacaggactgtgggaaataatgggcgcagcccttctgccccattggtgctcacacccatcccttcatgtgcatacacatgacattcagtaatggaaacggcacaggccttggaatcagacagtctcaagtttgaatctcctggctcttgtactcacaagctgtgaggtcttggtcaagctgctttctctctttttttgtaaagatgggatctcccttttttttttttttctttttttggagacagagtcttgctctgttgcttatgatggagtgcagttgtgtagccacagctcactgtactctccgccgcccaggtttaagtgatcctcccacattgcctctccaggaggtgggaccacaggtgggcgccaccaagccaggctaatttttattttttgagacagagtcttgctctgtcacccaggctggagtgcagtggtgcaatatcggctcactgcaacctctgactcccagtttcaagcgattctcctgcctcagcctcccgagtagctgggattacaggcacatgccaccacacctggctatttttgtatttttagtagagacagggtttcaccatgttggccaggctggtcttgaactcccgacctcaggtgatccgcctgcctcagcctcctaaagtgctgggattacaggcgtgagccaccgcggccatcctaattttttaattttttgtagagacggggtctgcctatgttgcccaggctgatcttgaactcctgacctcaagcaatcctcccacctcagcctccctaagtgctgggtttacaggcgtgtagccactacaccaggcctttgactatttcttaaccctctaggcctcagtttcctcctgtagaaaaatgaagatgacagttgctggtggtgttagcacaacgttggtgtgaggattaaataataaggctcgtacagctcttagcatggagcctggcacatagtaaacggtcaacaaacacaaactggccgggctcacgcctgttaatcccaacactttgggaagcagaagtgggaggactgcttgaggccagaagttcgagaccatcctgggcaacatagggagacccccgtctctacaaaaaatttaaaaattatccgggcgtggtggcgcatgtctgtggtctcagctaccggagaggctgacgtgggaggatcgcttgagcccaggaggcggaggctgtagcaaggcgtggctacacaactgcactccggcatgagcaacagagcaagactctgtctcaaaaaaaattgttttaattcgtttcccagaggtttggaggcgtcacactgtctcaagccacgcagtctggcctccccttaattcaacctcccaagaacgctccaaactctcaaagtcagatcttctgcacccgcacttttcattgggcgaaagggagccaggatccgccccacgagcaggaggcagccaatgagagacgcgcgaccaaaacccggcaggaaggcccgcaggctccagccccgggatcccaaggctctggccgcggaaccctgagcctgacaagccccgagacacgtgctcaggccggcggtcccaagaccggtcctcgggtcggcagcctccctccccacactctgcggagcccaatccccagctggggaaactgaggcctcgaggcgctgcccggagccgggtctcgggcccgaacatgcgtcccagccccacgcgcctaccttccgggcccgggcgtcatcttccgcctggatctcaaactcgccgtcctccgagtcgctgccgcgggcctgggaggccgcgcctcggcgcttccggagccctttcttcttcctccactgggccatggcagctcgcgaccgaggtccagccgccgggcccttgtcggccgccattcgggccgcgcgctgggaacgcagaagggggcgtggcctgaggagcgcaccaactgcgtgggggggggggaggtgcggtgaccacgtgacctccgctgagctttcgccagtgcctgcggccctcggcggcctagtacacacgcacctgagtgagtggcaccagaggaccctctccatgtttagggacctcctgggcctcaggagcgtggcgcccgcccctgggcggactccccccatccgcgggcgcgaatggtccgggccgcgtccgcagtgctgctggctgctccctggttgctgggtgcaaagtgctgggttctgggtttctggattcgcgggccgttcacacgtagcctgtgccggctcctcgggtgagtccgtccgcgcgcggtgccccgggacggcctaggctgccgggggtccggggccccaggcattccgggctgcagattgacggggatcccggatgcaccgcgcgcccccgcgccctcaccgacgggtccagacctggtgggaagaaggtgcggggacgggtccctgaggatcccgatgcctacgagccaagatgctcaggtaggagaacaacccaaaaatgcagggacctcgggcactttttaatcgggtcattgatttgggagtcgcagaatgtggggcggtgggggcggcggtgatctcccgatagcagtgtagccaagtacacaagctctggactcagatttcacttccaccgttttagctttataggtgtgacctacacatgtgacttcacctcagttttgtgatccgtaaaatggacaaattcgaagctacttcacagtgctgttgagaggattaaatgaaacaatgcttgtaaagctctttgcaggaggtaggcatgggatccacgctggctgtcattgcccccacccccatcagtacacataggaaagtgcctgtctcccctaccaccatagtgtgttttctggttggtgcctaaatagacacaggtgtcatctctccttcaccgccagagtcattctgtaaataattgccagtagcccccctttcaccaccattatgacaactaaaaaaaagccaaagaaatttccaaaatgccccctgaagttgacagctcccctttgagagactggttgagagagaactaaacccttgggatgagaacttcagacactaccggtcttcctccattagcacttctgtggctcaggggtgctactctgacctcctctcacagggagcctcggaagcagggcctggccggcagagcacacctgctgtcaccagggaccacaggcagcatgaagacccccgtggagctggccgtcagtgggatgcagaccctcggccttcagcaccgctgccgaggtggctaccgggtcaaggccaggacgtcatatgtggatgagactctgtttggcagccca

SEQ ID NO: 6205 - DNA, 6000 bp, Homo sapiens
agcactggtacatcaggaaaccaagttacaaaaagccctctttgataagtacttgggttataaacacttatttttcactcagtagcatcctccttatgtttaatattctttcaacaaaggatgaaccatcctgaaattcagtgtcatatttaccacttggtatttactcagtagggtctatgtgtactacaatgtgctaggcactatgggagaaccaaggttagtgtcatatggtccttactctcaaggagtttacaatatagttagattaggcatttacatgagataaggaaggaattatgcagacagaactgtaagtattaaaaataaaaagatcgccgggcacagtggctcacacctataatcccagcactttgggaggctgaggcgggaggatcacctgaggtcaggagatcaagaccatcctggctaacatggtgaaatcccatctctactaaaaatacaaaaaaattagccgggcatggtggtacacgcctgtaatcccagctactcgggaggctgaggcacaagaatcgcttgaacccaggaggcggaggttgctgtgagcggagatcatgccattgcactcttgggcgacagagcaagaccctgtctcaaaaaaaaaaaaaaaaaaaaaagatcattttcatatggggtggtcagaaaatgcttcacagctaagcagaatttgagttgaacccttgagtacaggattttgatagaatttgctaggaagagagcaagcacacgtgaacttacatataaagggccttgttgaaaaaactttttattctgaaaaatttaaacatgtaaaagtcaacagaataataaacctccatgtactcatcacccagctccagtaatgatcaactcattgccaataatttacatcttattatacgaaaatcctaagggagcccatctgcatatgcctttatattcttcaccgagtccatcctcagacaaatctttagtggcacaacagtctccacagtttggtttttccaaaggtcacatacaaacaaagtgcaaatctgtttaaaaaaaaaaacagcaggaccaggcactgttgctcacgcctataatcccagcacttcgggaggccaaagcaggcagatcacttgggctgagttcaagaccagcaccggcaacatggcgaaacacaatacaaaaaatgcaataatcagccgggcgtggtggggcacacctgtagttccagctactcaggaggctgaggtgggaggatcgcttaagccctggaggcactgctgtgatcttgccactgcactccagcctgcatgataaagtgagaccctgtctcaaggaaaaaaaaaaaaaaaagagagatcaattgccgggtgtggtggctcacgcctgtaatcccagcactttgggaggccaatcccaggcagactgcttgaggtcaggagttcaagaccagcctgggcaacatggcaaaaccctgtctctagtaaaaatacaaaataaataaataaataaactagcagacgtggttgtgcacgtctgtggtcccagccacctgcagggctgaggcaggagaattgtctgaacctgggaggcagacgctgcagtgagcttagatcgggccactgcattccagcctgggcgaaagagtgagaccctgtctcacaaaaaaaaaaaaaaaaaaagtaatcaactcttgattgtttgcacaagccaagggaagagtgacaaagataactgcaaaatgacagataatccaaaaatcagtctacatagactactggaataccttttccatatttatatttcaataagaatgagtaaaatgatgggagaattcatgtcaaacaaaataaagcatcacaagtgaagtactttaaacataccacttggcctcccaagcctgtttcttcctctgtgaaacagggaaatatcacctacctcagaaacttgtgagaattaaatgtgtatatttaatgccatgtgtatagttccttattttattatattattagtcagttgaatcaggaacaactattaaataggaagctgtggccgggcacggtggttcatgcctgcaatcccagcactttgggaagccgaggtgggcagatcactgggtcaggagtttgagaccagcctggccaacatggtgaaaccccatctctactaaaaatacaaaaaaaagccgggcatggtggcatgtggctgtagtcccagctactcgggaggctgaggcataagaattgcttgcacccgggaagcggaggctgcagtgagccgagatggcgccactgcactgcagcctgggtgacagagcgagactccgtcctaaaaaaaaaaaaaaaaaaaaaggaaactgcccactttccccagtctccccttatatgccaccctctctccagataatgtaaaaattttcttcatctcaaaacctgccaaaggttgaggggctaagctccccgatttcaaggagtttctttgcctgtaaagcaaacagagctgacattgaaggaagtattttagtagaataaatttgtaaattgtcaaacttcacaaagtaatccctccttaatagagccaactaatgtcagagagaggtcgtgtgtgtccaacctacctagtaaaacattttcattttccccatttcttgaccactgagttttctattctttcaaccatccagggcctctgtacagcacagtaaaaacagcaaagcagccattaggactctcagggccacagccattagggccagagtatgagaagctcaagatgagtaaccacaaggcatgacagaaacacctttaccttcatttcttactctgtccagaaggaagctgaaattgtaatcttgtgttccctacgacctgctactgaaaggcagctgtcacgcaaaactatgaaattagcttaaacctctttttagagcacgtgttcaccaagattttaattcttcctttagggttactttgtctctcagttaccttcttcttgagattgcacatacatcaatgaagttctcttaagaattatcatcttcaatccccaactccctttctcttatgtgaagactcaatgagttactgacttataacctctaacactataaataatccactcaaagtcttctacctaaaaccattccttattttctgatattacccatttcttagatgtttctctaggataattataattaatgtagtaagatctgtggcacttcacagtttgccaagtgctttctaaatgtactcacttaatccttacaggctgtggaaaaggtaattccctctattttataggtaaggaaaaaggaccgaagaactcactaccatgtcgtatcaacaaagcaagttggtggcaaaccggacctccgaaataggtcttccaactccacacggcatgctcgtcccattctattatgctcttttctaagaagggaatgtctacagttctgtcccaaaccacatttgcttcaagagtaaaccatcttcaaaccatttctctaaattgcaatcaggtcccccactcctacgatcatgccatttcttgcttcctcactctccagctatgacttccttctcactacccgatttccactcttcatggatactgccatcattccttcaacccgtcctgcaaatatcccacctctacatgctaaagggagacccctcatgttccttcccccaaaccctggcactcccttctccggatatgtaggttgtcaccccataaactacacagtagcttctcgcttctcggcccttaacgagctacttactaactttaaaagccccacagaaatgaacttaacttgcaggtcctccacctccacacttggccctgggcgccattcctctgaaaataatagtaccaacccttacaaagactctgcccatgccccactgtcaccaacgaattccttttccagaaggaaaaggaaacaggttcttcaggctcctcttccaacctcttcaccagtgactcccctccaaggttcgtggactctacccccgcagttttcctcccctcactcccgggcctctgcccacctcaccaactctccctgcgctccctgtcccagagccaagcggcggccgctccactctcccaacttagaagttctgcctctatcacctgttctcactagagcttcctctcagcccagcggcccacctttgccctggcctgcctctctccaccccttcgagtcctcctgcccaggaaacacccccacgagtcagttccggggtgcctgtcggattcaacttcccatccgtgggattcccacccccggggtcatgctccccttctccatcacctgctccgcccatagccagatgacatccgccgctgcctcctcctccattccccttctcggacgccaggtccccggccactcaccgccctccgtgcgcgccagccgccccctccggtggggaagaggggggcgtgcaccccaacccgcgccccccccccacgacacgcacctgttcttcctcctcttcccctcggcgggccgcgccggcgccccgacccccacccttgccgcctcccggcctcccggagccccgcactcaccacgagtaggtctgctccgccatggcgctgcctctcgtgggctccgctgcaggctgtggccgggcccggcggcggcgggctcgctcgggccgtagctgaaggcgcggccggggtccggtgcttgcttgcttgctcgctcgctggctcgctggctgcacggcgggccgggaaggcggctggcggggagaggccgggctccgaagcggccccgctccctgggccccggggcggggcgggctccgctctcggcctccctcacccgcggcggcggcggcggctccgctgcagctccaaacccaacatggcggcggcggcggcgcggagaacaagggggccctggggcgggcgaacggcaagacgggcccgcgctcactgcgcgcggggccgcgggagcgccgcgctcgggcggcggcggcggcggccgggggacatggccggcgggcggaggcggcggcgactgaggggggcgctaggcgatgaggcgaggccactcgatcacacccgccgaggggaggaggggcgggggcgggggcgagccttggccccgcgcgggtcacgtgcccaaaacacgctcacgtgatgcgcgccccgcccctcgagccgggcccatgcgcagagacgtcggctcctgggttctaggcggctgctgctcgcacagccagagcagttgggccgcctcccgctgcctggtgccgcccccctccccacgcggagatgtcgcctcgggtaccctcttccgcccctctccgaggggctgctgcaccagccaatcgggaaccccgatgcgcgtctgttggctgccactcagctgtcaaccgtcagtcaacagtctgctggccacgggccccccaactgtcagtcaacctgtcagtcaacaggcagagggctgcattccttcgttcgtatgttccttggttcattcattcaggtagcaaatattccaggcagccaacctttattgcgcccaggcccggcaccaagtcgaataccccacgcttgccttcacagaatcaatcaacagatatttgttgggtgccaaccatgtgtcaactcactctgccttcctagagcttacattctaaaggaagagacatagtccaagcccacaaataagataatttcagatgctgctaagttttacaaaaacacattttgtaacacaaggtgaggggacagagagtgagcagaggtgtgggttactttagatagggtggtcaaggaaggcctcgcttaggaggtgacatttgagctgatattgaatgatgacagagagctggccttgcaaagatccacaggaaaagagttcctggcagagggaacagcaagggcagaaggctcaggaaaccgtccatttggaggtctggaaaccggcacagaaataaacacggtagagctagaccagagaccaacaaagtgaatctggagctt

SEQ ID NO: 6206 - DNA, 6000 bp, Homo sapiens
aatccacaccaactcaaacattcttctttgacaaagtaatagtttcactatagtggggaacagcaggcaatgtaagtagagagacaagcccttagcggcacaagttttcaaccaggcatccctcttgaaccaaaaatacacacaaggcactgttctgaagagtaagcatgtgcttctaggtagtgccacgttatgagaatgaacagacaggcaggagagaaacagcaccaggaaaccttcctgggaaagggggatctcttcatccctgcccaagactgggtctcttctgggattccagattctcgcagacaaccccaagtttcttaggagaaaccaagggcctctaccattgaaggcagttgaattggaatgtcaaaccgtccctcactcgaaatttccctttggaagccccatgcaccacatggaactgatagagcagggtttctcagcagtggcattgtctccattttggaccaaatgcttttctatgctgtggggcgctatctgatgcactatagggtatttagcagcctccatggcctccagtcctagatgcctgtagcacctacccccagtcttccgaataaaaaatacctccagatattgccaaatatcccctgggcatcctcacttgagaaccactgctttagaggaaggcttgatttgacagctgccattcactgacattaacaagcaaaagcaagaattttggatatatgttaaaaaattatctaagaagttcaatattcacattcatcaaccaacattttcaaactatttaagtaggatcaaactccagaaaataaaccaaaaaagcctttcagaactcctcattctccctgaaaattagtcaagtcctaccctataagtggccctgaaaaatgagtgcaggaattactaagtagtaggactctctaaattctatagatttcaaaatccaaccaaacaactcagcttctttatgatgttaacactctactgatactgaatatctgggagaaatgttaccacgctaatagtatactatgaaatgtgtgaaacaatgactagcttcaaaaactctggcatgcactgtggggaaaaaaaaaacaaaaaaaaacaccaccaaatgtgctggctcccggtaagcaatttatccagaaccaccaagaaccaatcagggtttattactggtaacctgagcaatgaacactctaactgcaacatatggctaaaagaactcttgtcttcatatcaacatatggctcctagaactgcatttcatatccaactaagcttcaggttaagaagtctacaaaatgactttctacaaagtcaaaggcaccatttgctatgagctatgtttaattgggacttctgtccccttatcattgaatttccactctttagcattcatcttaaagaacaaagatgttactactaaaatgtcaactgtgttttcagtgctattagtttaaaataacctaacctatacctcctgtcaacgaaataaaaaaccaccaaaaaaaatatcaatccaattagttgtaggggttttttaagagaaaaaaacactctcatgccaacaaactgaggttagaaaaaagaaagcagaaattagacattagcaaacaaaaagatgcaaaaaggatgctgtcaaaaagcaatccacataccatcccaggtatctccaccacctaaagaaaagttaagatatcttaacacaaaaagaaccaacaaaaagtttagctaaactagtcatgtatacaaatgagcaaataaagtatatgccaggattagcaaataaacagaaaaaataactgaagacacatggaacctacatgctcacaagagcacaaaatgactaagaaaatctgttagaagggacaaatgtaaagaacaaaaaaatcccagcacttcagaaggccgaggcaggtggatcacctgaagtcaggagtttgagaccaccctggccaacatggtgaaaccccgtctctaccaaaaatacaaaaattagccgggcatggtggcatacgcctgacgctacttgggagaatcgcttgaacccaggaggcggagattgcagtaagccaagatcacgctactgaactccagcctgggcgaaagagcgagacacaatcttaaaataaataaataaaagaaaaaagaacaacaaaaaaacaaacactagcctcaagaaacttttttattaattaggagacttgcaaaaaataaaaagcgtatttcacaaaaaggttttggttaagaaatttaaaaaaaataagtactccactcagacaggtaaaaatgtatagaactaaaattagctcttggaatgtgatgtaaatcttctgaatgttcatctcaccttctgtttccatatcttgtccttttggagcctccccaatatcaatggtgaacatcactatttttggagtcatggtggacatccggttactaaaacaaaatttgtatgttccatccatgtgagcagcaaatgtgtatttcccactggattctctgtctcctttgtaaattcctttgttatctggtcctgtaatctggaggcaagagagaaatgcataaaatgtcacaaaagattaagtcatagactttataagtaatgtctaatggcagtaagaaattcaccaagaatatggctgggcatggtggctcacgcctgtaatcacagcactttgggaggccaaggcaggcagatcacttgaggtcaggagttcaagaccagcctggccaacatggtaaaactccgtctctactaaaaacacgaaattagccgggcatggtggcgcacgcctgtattcccagctactcaggaggctgaggcaggaaaatcgcttgaacccgggaggcagaggttgcagtgagtcgagatcgtgccactgcactccagcctgggcgacagagcgagacttggtccaaaaaaaaaaaaaaaaaagaaattcaccaagaatatgtaactttcacttagcttcacttcggtaagtgataataaccattttgggctgcaattctcccactttataaaataagagttgacttcatggctttctaaaacacctttaggtcctgacatttatgtcttatttatccttattaaacccctcagaaacagaaagctcaccttaaatgtggtctctaactggcctaatatcaccaacaaacatggaactgtgactgatagcaaaactcaagaaaaaagaaatctctttaaaataaagaatttctgcatccctggttgacatcttgattgcaacctcatgagatactccaagccagaaccacccagctaagcctctccataattcctggccacagaaaccatgaggtaataaacgtttgtggttttttaaaatataaacaagatgaatttttatcacatttcaaggttttccagattactgccaaacagtgaaggaattctgctttatctgagatgcctgaaggcttaggggaaaggactagcctggaaatgagaagacccaaactctcatcccagtctgctacaaatcagctgttaggctgtgatcaagtcagtcgctctttcaaagtgcatgtcacttgcataacttcgagactgtaatagttgatcgctaaattcttagctaagtgtaagagtctctcccttccgttatccccttatttttggatttcacttgtattgtgtaacttgtgcccagccctactgagtacactgtcaaatggaaactccttagacccaattaatcatgctagcaggtgaattaaaataaaaactagcaacacatcattcttttggtttacaaaacatgagtggagatttagggactgctggtttcttaaactcctgtcttctcctgatacttcactgcactgcttactcctaaaacgcatgacccaactccccatctctccttggcagaagagactaaacgaggtagctggaggcgtaaagagtagaaccttaaggttgcttctatgaaaaataaacacaacgcgaaagtatgcctagcactcaataggtttttaatcctcaatcgattttaatcaattttttggaaaagtttccgtgccacgttccagcattaatccgtaacacgaaagaaggcaggtgctaactggatagagacccgccaccagctaactgtgactgagaagcgcctttggggcccggactgacacgcggcgcctgattcacaaagctcagcgagaggttccaacaggaacccgtcgttcaaggagaaaacccaaagcaaccaagcatgccgaaggagcccccaagggatcccggaacccaggcaagtcgcgggaaaaggggccgttaggaggtcgccgtggccggggcggggcggggggtggcggcctgggcttctccaggactcggacagcgacttccaagcccactccccacacaggccccgcgccggtcccaggtgccaccaatccccgagtggccacgcgaccaagcctcagctgcgggcagctagcccgcacctccacgtcgatgtccaggaagccgccctccgccacctcgaagatgaggcccatcttggtgcccgaggtgacccgctcaaagaagcactcttcagcatgggcgtcgatgctaacgaaatagcccgagaccgtggccaggagagcggccagaagcaccagcagttcagcaagcgtcaccatggtggggctgaggccgaagccaggacccggactgcggcctccacagccgccgccgccgccgccgccgccgccccgctgccttctcagccaccgccgcctaagctccgccccttccgcctgcgccaccagtgggggctgatgcgggcgcagtggattggcgggctcccgcagctgccacgtaaagggaggcacggcagccgccgagggacaagcgactctgcgcggcccgagcctggacggcggctccgaaggaccaaaaatttttccctagtcctttctcgtccaagctaaagttcctgtggacttcccaggaaaacgacagtgtccggaagcctctgcaatgccctcttaggattgtccaagaagatggcgaaacatttgcaggcagcgataggagttgagggaatgtgcgggctgaaactaaggtttttttcttttgttttgtttcgtttttgagacggagtcttgctctgtcgcccaggctggagtccagtggcgcgatctcggctcactgcaacctccgtctcccgggttccagagattctcgtgcctcagcctcgcgagtagctgggattacaggcgtgagccaccacgcttggttaatttttgtgttttttgtttgtttgttttttgagacggagtctctttctgtcgcccaggagtgcagtggcgcgatctcggctcactgcaacctccgcctcctgggctcaagcgattctcctgcctcagcctcctgagtagctgggattacaggcgcccgccaccacgcccggataattttttgtatttttagtagagacggggtttcactatgttggtcaggctggtcttgaattcttgaccgcgtgatccgccctcctcggcgtcccaaagtgctgctggaattacaggtgtgagccaccgcgcccggccaatttttttttttttttattttttagtagagacggggtttcgccatgttggccagtctggtctggaactcctgacctcaagtgatccgccctcctcggcctcccaaagtgctgagattacagaagtaagctaccgcgccaggcctgaagccatgggttttgaggggtgtttatttgtttgtttgcttagagatggggtcttgatctgtcgcccaggctggagtgcggtggcgcgatcatagctcactgcagcctccaactcctgggcaagtgatcctcctgcctcagccaacccaatagctgggattacaggcgcgaagcccactggtttttaggtttcatgttgcctctcccaccccctctccttccaggggactggggaacggtggaggctcatatagacctgaaaggggcacgagggatcctcccaggttgctgg

SEQ ID NO: 6207 - DNA, 6000 bp, Homo sapiens
agagggcagggtgagggccgtggcctctcaggggtatctggaaggctcttcgagttgagtgcagacccagcctgggctggaaaatggacaaaggtcatcttgctggggtgaaaagggggagagcagaaccaagaagaagagggtgagggctggggggctccagggcactggttaggaattgtggggaatgaaggctttctttagtctcatccccctgtggtaccatcttgtcctcagaggtggtttgtgctccccctactgcctatatcgacttcgcccggcagaagctagatcccaagattgctgtggctgcgcagaactgctacaaagtgactaatggggcttttactggggagatcaggtgagatcgaggtggagaggggtgtgtgggacccttccctcactttcctcgttgaggggaaagccacagggtgggctccctgctgaaccttggcttcatctcttcctttagccctggcatgatcaaagactgcggagccacgtgggtggtcctggggcactcagagagaaggcatgtctttggggagtcagatgaggttagtagccaagagagaagataagggatgtctttttccaagaaggatgtctcaccaagtctgtttctcaacagctgattgggcagaaagtggcccatgctctggcagagggactcggagtaatcgcctgcattggggagaagctagatgaaagggaagctggcatcactgagaaggttgttttcgagcagacaaaggtcatcgcaggtatctctggagaaagggacctttgagcctatccagggccacagagactcagagggtagggtcaggccctggagcctgtcttggtccccatgctgatccagaaaaggaaaaaggggagggggagtgacaatctttgcttggggcctatgacttctccagccccaaggtagatgccacctggaaatcccccaatgtccactagggggcagtaggccaccgttcttcgtactccggagaacctggctggagagctctttcttgttcacccttccctccatctgtatctctgccctgcagataacgtgaaggactggagcaaggtcgtcctggcctatgagcctgtgtgggccattggtactggcaagactgcaacaccccaacaggtaaccgggcccaggagccctgccctcatcccagcctgcctcaataggtttggacagacacagcccacatggggcaaccccttatttcaaagacacagagaccttgaacccagagacagtgacttgtccaagggcatccagtccagggcctggcttggatcagagccctggtactctgactcagtcagaaaccacactaagtgtccactggtgccagtgatttttcctcttagagaggcagaaaaggtcttacttaggccagcttcttgttctaggcccaggaagtacacgagaagctccgaggatggctgaagtccaacgtctctgatgcggtggctcagagcacccgtatcatttatggaggtgagtggctttggttcccggctgaggtggagtgggctgaggactagactgagccctcggacatggaggtggggatggggcagactcatcccattcttgaccaagcccttgttctgctcccttcccaggctctgtgactggggcaacctgcaaggagctggccagccagcctgatgtggatggcttccttgtgggtggtgcttccctcaagcccgaattcgtggacatcatcaatgccaaacaatgagccccatccatcttccctacccttcctgccaagccagggactaagcagcccagaagcccagtaactgccctttccctgcatatgcttctgatggtgtcatctgctccttcctgtggcctcatccaaactgtatcttcctttactgtttatatcttcaccctgtaatggttgggaccaggccaatcccttctccacttactataatggttggaactaaacgtcaccaaggtggcttctccttggctgagagatggaaggcgtggtgggatttgctcctgggttccctaggccctagtgagggcagaagagaaaccatcctctcccttcttacaccgtgaggccaagatcccctcagaaggcaggagtgctgccctctcccatggtgcccgtgcctctgtgctgtgtatgtgaaccacccatgtgagggaataaacctggcactaggtcttgtggtttgtctgccttcactggacttgcccagataatcttcctttttgaggcagctatataaatgatcatttgtgcaagaaaaaaaaaaaaacaagaacaggtttctataacaacatctcttactatttttacttgaaaaaatgttttgcgtagcagactgtcatagccttgaacgccggctccctttcttcctccctccaagtggctctggggctgttgatttccgcagagcttgggttggggtaggggctcagcctcaccagctttcagcagctggtctaggccagcagtgcctccccacctccccaaggggaggggtggtggcaagacctcagcacagtctgtggtatcacagggctcactggtagagcaggtagcgcttcatggcagggggcaagggcagggcagacacctggccgagccgggtatcccccaggttgtggcgcacacacaggcggctcaggtgcagaagggagtgtggctccgctgggagagagaaggaggggaatgtaagtatgggtgcagccaccagccagatgtcctcaaactacggggtcctactcagatgcctttctgctttcctgcttcgagtgtgcccacctggctgaaaggggaatttgagatacccggaagttctgcctcccagataagatttcacacatccctagtcagagctgggggtgaagagctggctaaggccctctaaacaacaggccaaggtggctctgacagtggtggagctggcccaggctttgactccagaggcttgggagctggggctgaggtgaggagggatggccctccactctacagcccacacaactgcagagagcagctccaagccctggacccagtcagttcctggggaggctcctcccctgctgccccaccctaaggccctgcctcctccactgctctcctccctggtgcccagggccccagtgtctccatccagaggtgtggctgaggaaggaagtaggtatgtggcacagagacaggttagagcccagggaatccggtatacagcctgggtacctggctctgcccatccttcttttggacctgtacatcaaacccagtacctaacgctttgcacctcttgctcaggggttgatatctcctgaattctctcatccctgcagttcctccctccattctgaaggttcaccatttactggccaagagaacttgagaaagttgctttctcaagcctgtttcacctctattgctgttgggttaaattaaataacagctgtgaagacccctagcctttcccagcactgaacagaggttgaggcaggctggatgaaggtccatcccctctgctcttgtcagaagagtttccatcccaaaccactgccaccagggacagaaagttctccccacgtctgccccaggcctcacctctcctttcgcccaggtagcggatgcggacctggcactggccccagacagcgcttactgccggatagagggtcctgcccttcagtccgcggaatgctggccccaggtaggtgcccccaatagcgtagcccagagttccctcctccatgtccagaaccaccagcagtctctctggcacctccagctgctcaccctgagttcccgctggatactggggggctccgggccccttgctctgatggtacagcttcccccgcccgatgtcccagccccacgactcgctgttgctgcccagcagcgccgcgtagtggtcagtctgcagcggggcgagggccgtggccacgcccaccacggcatgcgtgcccctctgctctaggggccagctgatctcccaggcgtgcaggccccttgaatagcccctcttaccccgggccccatcagtgctctgggccacgggccgccgctcaaagtacaaccctccttccttgacctcgatgttctctgaacagtctttggggttccaaccgtggcgccgctgggcccccaggtcaggagggggtgcagacagcagctcttccaagccctcgggacaggagaggtcagggtacagggcctgtggcgtgggggtgctgctgctgccccctgccagagctgtctggcccatggaggtgaggagctagaggactccccgaaagaggcttgctggggcgtctttctcttctgaaagttgagctccagtttggattgacctggaagggagctgggagaaaaggggcgtgaagagcagaatcctggcgggggctcgtcacccaggtaccccatcctttcacccaagtttgccaacgggcccgctcctccctcctcgctgccccaaagctcctgggcccttcatctgccctcgccccatctgatccaggtcgccagagactctcgcgagttcgccccatttgggcctcagcatggaccatcccccttactcgcccggagccctcgccgctgcccccgaacctcggttgacttcccagccctggaggtcgccgggcctctgaaggagccgggcggaaagaagccgaggcgcgcagggcgcagaccgccggccgcttccgcccccagctcctcccttgggccgagcccgtcccgcggccccgcccctccagggccctctggggcttaaccctctcatcgccgcccacggccgtgcagctccgaggccacgcccctgtggggccccgccccctcctgggcagttaccgctctataccggcagcagccgcggagagcatgccccgcccccgtggagcccaccccgggcggttaacctcgggtctcagtcccgggctgtgaccctccccgaggccccgcccccacggcgaaggcccggggcagttaacccttctcttgctgcggcagagtccgcacccgggcaggcccatctcagaattaacgctttgatggcatcaccgcgtcgggaatccctggggatggtgttctccaccgtcaagacctttgagccgcctgagcgactaactcctgcgcccctgagggtaaggagcatggggtcaaggaggggcttcattgtgccgaatcccatttctacttccctgtgattctgggtcactgtttctgggctggtccctttctgccccgggttgtgagtcagcctgtgccacctctgaggctgtgaaatctgcttcaggctctaggctgtacgcatcatagttctccctgctggtccagtcttcatactggatgccaatccattactgagccgttgatctcatttggtagagtgtcctgattaagacttcgagtttgagtgaagctatgccactagttaactgcgcgatcttggggaagttgcccgatttctcttttttttttttttgagacagggtcttgctgtcaccaaggctagagtgcagtggcgccatcacagcccactgcagccttgacctcctgggctcaagtgatcctcctacctcagcctcccaagtagctgggactacaggcatgtgctaccacacccagctaatttttaaaaaaatatttttatttttatttttatttttttcgagacagagtcttgctcttgttgcccaggctggagtgcagcggcacgatctcggctctctgtaacctccatctcccaggttcaggggattctcctgcctcagcctcctgagtagctgggattacaggcacctgccaccacgcctagctattttttgtatttttagtagacacagggttttgccatgttggccaggctggtctagaactcctgaccttgtgatctgcctgccttagcctcccaaagtgctgagattacaggtgtgagccaccacgtccggccaaaaaaaaattttttttagagacagggtctcccaaa

SEQ ID NO: 6208 - DNA, 6000 bp, Homo sapiens
gagaaatgcacatgttaattgacagcttcaggccccactcagctttgaaccctcctttgctcccaagagaaaagataaacagggttgacagccaggaatctcaggctcatgaaaggaggaggcatgttctcatggccactgctatttctcatctcctttcctaacatccctccattcaccagaggagtttgagggctcttgagtaagaaaactgagtatcatctttcatcactttttggttagatgaaaactttataattaaagtgctttttatgtgaataatcctatttgatctcataaaatcaatcctatgagatgcaagatagaaactgtcaaccacccccttttctaattttggttcaatgtctctgagccatatgaatagctgtagcaggctccagagcccaaacaaccagactcaggtcccacgttcttggtgataccccacagtgtggccacatctctcacctggtgaaactttcatcctgtaggttcagcacaaggttgtcagctgtgagatagatacgattctgtgatgtggcgatctacagggcaggaaataagacagatgcttgcattaagcaaagacctcaattccgacccctgcaattcagcagctacttaacatggaacacatgcagattagggcaggggtgcagcaatgagtaacacatggtttctgctcgcacttagggatccagagcgctgagcagcagctatgattagaacaaaaggtcagggaacccagaggaatcattcttgacaggaggagtatcggagaagccaattttttatttatttatttttgagacggagtcttgctctgttgctcaggctggagtgcagtggcatgatctcagctcactgcaacttccgcctcctgggttcaagtgattctcctgcctcagcctcctgcgtagctgggaatatagctaaacgccaccacagcgggctcattatcttttgtatttttagtagagatggggtttcaccatgttggccaggctggtctcgaactcctgacctcaggtgatccacccaccttggcctcccaaagtgcggggattacatgcgtgagccaccgcgccggccagagaagccaatctgagtagaaaccggaacaagcaaggttcgaattccctcacctcaatgtgccttaactgaaagcactttctcaaggcagccccatcagagacgctgggctgacacactcaccgtcttggagatattctgggctgctcgaatcttgcgaagtttgatgtagccagggttcttgctcagtgcttctccaaggtgaggagggttaaggtacacgcaagggcaggtctcaatccctggccctgtccttaccacactcccttgctccagtcctcctctgggctgtcagatccaaggttgcgctcaggtggcttgtgcccagccctaccgtggaccccacctgtgggcctccctgcaggctgctgccaggaactaggggcagcaccagaaatgaaggcaaggccaccaatgctattgatctggccttacagtggggagtcatggctcaggtactaccactaagatttcagatctcatctgtagtccccacccccaacaaggagccaagggccagagagcacggagtcgcattcgccttagtctcatcagcctgcccatgaaggagaatggggaactcaggtgccctaggggctgggctgagatctctccagcagaaggatatcatcttggcagcctcggcctcaccctcggcctgcacaattttctgccgctgttcctgctttgctttttctaccaagaattgggcccgctgggcctcctgctgggctgtggtgggagagagtcagggagaccctgtcctgggtcaggagccccacccatggagtctttcctcctcctgcatctcagaagccctcaccccacggctcttgcgactcacccacttgtttggcttctacagcagctgtgtactctcggctaaagctcagctctgtgatggccacatcatccaggatgaggctgaagtccttggccctctctgtcagctcccggcggatcaacagggatacctgagggcaggggtgaagaggggaagggaggggtggtttgaggggactggggagctgaaaggaaggttgcgacccctaacccttcactctcaatacaacatgcactgccttagcttcctgtcaggcaaacctgtaacataagcctctctgctcgaagaggtgcaggaaaagccaagacttggccattttcctctgtgcttcctaacaccgagtgctatcgagttctaatgctggctctccttatttcacagtggcaattagcacagcttttaggtggaaatggcactagggtgacaatgcttttctaataagctgcctttcctaattcccaatactctgggcctaggaaggaaaggctgacaccacgcagatggtggtgggagtcagacctgggcccgctgggtgatcagctgtgaggcattgaacttggccaccacactcttgagcacctcgttgacaatggacggcaacactcgttcctcgtagtccagccctaggcgctggtacatgctaggaagctcctgagcattgggtcgagacaacactcgcagggagatattcaccatctgtaggtctgagattgaggtcagcagtggctggtcaaggccaaacaccctttcccaagcattttctccttcatgttcctccctgtatgccctgtgcaatggtgtacagcctggcactaccctggggggaggagagttaatcaggctgacaaggaagacaagacgcagcacagctgaaatgcaccctcacccactgtgaagccttgaactgcaaaccccgtcaccagcagagctgactactctttccccctctgtactctgtgcaacctctaacgtgggcgctttcgtgctgtaccgtaatcatgtctcctgtaaggacttgggggacaagaattgtgtttaatgaatcttttattcccagggcccagtctagtaaatgaataagcgacctgcactaggtatagcacaaagaagtacattacaggttacaggtgagctacctgacccagggtgtatatgtgtgcgtgggtggggaggaggaagaggtctggggaactcaaaggcacggcttttatgtatggtctagaaggagagaacaggtgaactagtcaagcttagggacaaacttctccagaacagagtgtactagtggatgtaactgtagatatagtaagtcaagcagttagaaaaaaaaggctttaaaacaaagctttgatctaggcagtgaacaagacgagggacaaacaatactcttattgaatacacgtcagggaggagacagtaaaaagcacgcaaacacagtgtgttcagaatttgctgctttgaccccaggaggcaggtatttttgttacagctcttgcagatgtggaaagaggcctaaaggcctgacactaccatattcccctggggtttcttgccagctaccttgatcatcccacctgccatgtgattaccaagtgctcagacctacctttggagcctgtaggggaggagatttttcgaggtctggcccgaatgtcatagataatggggtactggaaccaagggatcctggagaggacagggataggtattaagaggccacagtttcggccgggcgcggtggctcacgcctgtaatcccagcactttgggaggccgaggcgggcggatcatttgaggtcaggagttcgagaccagcttgatctacatagtgaaaccccgtctctactaaaatacaaaaattagccgggcgtggtggcgggcgcctgtaatcccagctactcgtgaggctgaggcaggagaatcgcttgaaatcaggaggcggaggttgcagtgagccgagatcgcgccactgcactccagcctgggcgacagagcaagactccctctccaaaaaaaaaaaaagaaaaggccgcagtttcactagccttgcccggtttcccctcaccacgcgttttttggcctgctcctctccacgaccacagacaaggagagattctcttgtccctctggaaaacaacagtttgtatgctgctggaggttctcgcagcacccactatcctaggggcagggatgaggagggtgggaaaagagcagcgttgaatcctgttgcacgtccgactatagccactgctgggtcggcgtcaagggtgaaaggtcagggtcagcaggctctgcccgccattacctgaagtgaaggccctcggccaggatagtgtcctgctgcactccaccgatccgattgaagaagatggctctgtgcccgccttccactgtggggagatgggtggtgatcaggccaggccgctgctcagaggaaatgctaggcccgtggaggggcgcggggacagggcaaggggtttgggggagggactggaagcgtccggcgagcaggcggaggttgctcaccggtgaacacagattcgcgcacaccgtaggccacggcgccggcccccagcaacagcttcagggccgtgcccatgccccggggcccggcgggcagccgtcccgccaagtccttcaagttctgggccatgtctgatcttgaggccggcggcactggaggtcagaagggggtgccggcccgcctctaccccgctccggcttaggtactgcacccttcacacgagggttcgggcccgtaaggctggcgaaagaaagggcagcggaagtgcgctccctttgaaaccctcccccttagcccactacggacccgaacttcgcgcacaggaatcgcgcatacggaagtcccgcccctttctggaaggctgccctcccagggagggcagcgcaagacagcaagtcatctccatttcctggcccactttcaaaatggcagccggaaggaaatttgtgattagaagccgcgctgttcttatttaagagcgttagcgcaacttccggtattgttgcaagatggccgcgcccagtgatggattcaagcctcgtgaacgaagcggtggggagcaggcacaggactgggatgctctgccacccaagcggccccgactaggggcaggaaacaagatcggaggccgtagtttattgtggtgctggaaggggccagtctggagacagtcaaggtagtttgggacaggaagtggagaagtagtaaatcgataggttgggactccgtggaatgagggtaaggggcccagagtggatgtagaaagcagagaggggtgaaagatgcttttgaaggaaggtggcttggttggctttgcgttgatttgacatcctgggatggtagtactcatttttctttctttttttttttttttttgagacggagtctcgctctgtcgcccaggctggagtgcagttgcgcgacctcggctcactgcaacttctgcctcccgccttcaaacagttctcctgactcagcctctggagtagctgggactacaggcaggtgccaccacgcccggctaatttttttgtatttttagttcagatggggtttcaccatgttggccacgctggtctcgaactcctgacctcaagtgatccgcccgcctcggcctcccaaagtgttgggattagaggcgtgagccactgtgcccggccggtagtactcattttcttttgctctttttgaatgatattctagccctcacctccttgcttccaattggtttaccaggattctgtggtatagtagtctaagcagaggaaagtttcgttccttgcgtcattccacatcccaagacaagttactgggcagatgagaaacgtagttatgtagcctagtctgcccacactttttgtaagggcttcgtgtttcaattcattagtatccatagtcacctctctctaatatccacctatgatacactgtccagacctggttattatttaaaacttttacatctgcatttttatctatcattcatctctttccccacatgtaatagaaccagcagttctctatcttaaagccttgggcag

SEQ ID NO: 6209 - DNA, 6000 bp, Homo sapiens; identical to SEQ ID NO: 2753

SEQ ID NO: 6210 - DNA, 6000 bp, Homo sapiens
attcagggataactaacaacaaaggctcttaggtatgttgttgaatatgactttccttgggaccacattttcgagcctacacacctgagcatgggcaggtctgaagctgctgtagtccaggaattttagaaccaaatgtctttgtgttatatctagccttgtggctcacagcagcatccggacaatgttacccttctggactttttgaaagttctattccaaatatgttattttcattttccctaagagtgacaaaaaggaaacgctatacccatacatgcacagagacatcaatatttctatgtagtcttttgggggactaggcgaaaacaatcaacaaagaaattttatttgggggcatttctgaagcttttctgccttcttttttaatgcactgaaagctctttgggatcttgcattcttttactttgcctacctagctggtgtttcctccgtttgtcaaacttgatcccaaaccaccgatctgcctgctcctgtgccctgcaaatattcacggccaagtgcagtagcccctcaaagccaatgtaagcctgtttccagccctagtgttgatgggtgatcttatgtttaccaggctgaagttctgaacaccctcttcagaaaacagactgcactagctccaggctctcctcctcgttggtaagcgtgtcatccatgctccaagttttccagagctccttgtttaacttggagctggacaaaagcatggccccaggggcagcttggcttgctttatattaatagagtcctcaccacagtaggactgcactgtgcccttgcttccttctggctggaacttgagtgtagctgtgcctttgaccagcagacctggggcagttctttacagctacccagttctaacaggaaaccctggagaagaaccaagtaccatgaagttccaaagctgcttaacttcctcttaaggattcgccacccttagcaggtattttatcccgtccaggtctataatctgttttgtaaatgtcttcatagttcagagtcactgcaaagccagcacactttgggctgatgtatacagctctgtctaggtaccatttgagcctagcaggtcaattgaatacagatgatttaattctcctaatcggttggctctactctctgaatatattaaaactggctaatccaggctcatgagtgggtccacgcttagtggtgaggctctccttggtgatgtgtgtctacaactaagccctcatgtccagctaccaacagtcacagaaacgacttccaacttcacacattgcctgactgcagttcctcagaaactcacaagtgaatgattcttccaatcttggaatcctctgatctgcaattttatacagataaccagtactctctggctagaagcacaaccccagaatttgcttaaaaagcaaagggagaaagtgtcctgtagtctctccacacacagagaagggaaacctcaccatgaaccagggactagcagcaaactaaagaacatattttatttttaataaaatagtggagcatgaaaaatatcatatattacaaatatacacacgcagaaaccactctttcctggcactgtgaagagaatacactagacaaagtgtctctgccaacctagtgcttcctgatctgtttgtggaaatcatttgtttaacaatagaaagagtcaataagccctttgggtaacttttgaatgatccttctccctcttcccccctcctttccacaaatcagtccaaacgtctataacattggcttggtttccattaaaaagccacaaaatgtagcactgaagggtttctgagggctgggcctcttagttcttttgttaggagatttcttttgttgtctttatatatagcaaaatacttgtttctctttttattttcaaggaaagagaaaaaaatgtattgcacatcgtttgagttcacaaatgtgaggtttgatggaggtttctgtcttgcagagagactattggtgaaggccggagtctattttaagcaactccaaatccactggggtgtgaggcgggccccgggtcctgtctttcctctgcagggatgccgcccagcactgtggccttcctgggggtgggccctggggatggctcatttgttaacccaggggaggctcttgaatttgcaaagcagttatctgtcctcttatttgtaaatgggtagcaaagccaactcaaatacacagatgtatatttagggagggctctaaacaaaagttttcttctgagggctgaatcaactactttaccacaaattagttacacaagaggctacttcactggaggagcttcccttcgctggaaaaccaaaacaaaacaaaaccctttaagtacatttttcctttcagtgtatcacagcatcctgaatttcagggtaaacacttttttatgtatttctcttttgcttttataaaaaaaaaaaaagaagaagaagaaagaaaaacacaaccaagaaaagcaccacatcttagctccgggcgcccctgtgcccttccctccagccctgttcacacgcaggtgggcgactgggcagggatctcatatttcccgtggtgagttttctggggatgctgggcttttttgtaaatcccaccgctggtgatcacgctggccggttttctccggctcttcttctttaacctacggctgcacacctgctgccaggactgcagagtcttggaggtccaaatccacatcccgctggtgatccccaccaccagcagcataaagatcttcaccatgaagatctccacggcggggatggaggcggccatcaggcagtccagcgttttagtctggttgttcattttgcacttgtgctgcgccgccaggatcttccagtaatccatgttgaggcgttcgtaaaagtagcaggcgatcacacaggtggccggcacggtgtacagcacagagaagagcccgatacgcaccatgagcttctccagcttgtccgtgttctcgccgcccgtcttcatcaccctccggatgtggaacagggccacgaagcccgagaggatgaaggacgtgccgatgaccaggtagcaggccaggggaatgagcacgaagccggtgagcgcgttgacgtccatgctgcccacgtagcagaccccggtgagctcgtcccccgccaccctgcgcatgaccaggatcaggatggtcttcaccgccgggatggcccaggctgccaggtggaagtagctgctgttggcttcgatggcctcgtggccccacttcttgccggcggccaggaaccaggtgagcgtgaggaccacccaccacagcgagctggccatgccgaagtagtagaggaccaggaagaccagcgtgcagccggtgctctccagtccctcctggatgacatagagctggccgctgtcccggtcgcaggcgatgctctcggcgccggcgaagaggcggatgaggtagcccacggagtagacgcagtagcacatggagaggaagatgatggggcgctcggggtagcggaagcgggccgggtcgatgaggaaggtgagcacggtgaaggcgctggagaagaagcacagcaccgcccagatggccagccagaccactgcgaagcgcttgtcctcgcggctccagtacacgtccacgccgggcgtgcagagcggcgcgcacgacgcgctcttctccacgtggtggaacttgcccgggttgtcgcagccgccgcgcccggggcccccgtccttcagcgggtgctcctgcgcgctgtggggccgctgcggccggaacagcggcgggaacaggcccgagccccgggtgggctcgtccgagccgttgttgggcgcctccatgcacaggtagttggggtcgttcttgttggggagtttccggcagtccagggagtcgggccacttgaagttgaactgctccataatcggggagcacttgagccgggcctgctcgcacatgacccggcaggcggggatgggggtagagacctgctcggtgcacatcggcgcgtacagcgagcacaggaagaagcggaggtggccgtggcagccgtactccaccagcggcgcgaactcgtgcaactggatggctgcctcgcgctggttctcgtggcccatcaggttgggcatacgagtcatgttgtagccgatgtccttgcacatcgggatctcgatgggctggcatttgccgtcgcccgggcgctccatgtccatggagctgatggcggcgcacgagcccatcacctgcaggaccagccacaggcgggggcccgggcgctgcatgctggcgttggacgtgtcctcgcggggagctccgcgcccctcagcgccgccgctcccgggcacgggctgctgctggccccggctctccacccctgctcgggcccccgcccatgcccgcccggcctggcccgagcgctgcgcacagcgcccccggctcggctctccgcgcccggcgtccgccgagttgggggccgcggcggagagcagcaaagtttgcaaacaataccgggaagcgagggaagcccccggagctcccggcgcagcggcccggcgcgagctccaactcacggccgcggcaaacttcggcctcttcttggagcgcccaggtggcgcgtctggagcgggctggcggcgcgggcacaccgaggccggcccagctcgcggcgcccccacagcccgggcggctcctccctccctgcgccggcctcggccgggaccagccggcagctgtttcgaggtttgcgtcccgggatgagaagactcgcaaaaaggcaaaggggggcagaaaagccgagcgctgacaggccccgcccccgggccgcgcgccccgccccgccgctgctttgcatgagaaagcgcagcggcccggggcagcctcctccccgccgccccgccgcgggctcccgggccccgcgggggccgatcccccccggcctgcagcccagcctgcggggggcgcagcgcctagtcccgcccgcgtcgcccgccagccccgggacagcccgcctggcgcgcggggctctgcgcgctgcgaccctccccggcagtcccgcccgcctctcctcgccctctctctgcctggcctccaactttgcctctcgctatcctctccgccggcgccccctttcccggcggtccccgggatggtccccggcaccccgaggacgccgaggttacgggaagttcggggactggcgggagaaggggtttgggggtggtccgcggcgaggggcgcggggtgcatcttctcttccttttatggtgagtcccgggcggagggcgctttcaaagggaggtgggatttgcgttttatagcctgggccataaagtaggcccttgcttgtaaacctgcccgcatcttcctgaggctggggaggtgctaccagccccgggctccgggctccgaggagggattttctttgaaatttcaaagagacgagctaaggggagggggaggggctcgagaatccggattttagggccgctcatccgaggtctcctctaagaaggcgggaagggggaggggcgggaagcgtcccgggactttgaacaccgcctcccaccccgcgggaagtgcgggcttggtttgtaccgcggtgacccccgccccctccgaagccgcagagccggggcctcgcgccagcagggctggagatgccttcttggcggctgagtttatttattataggaagtcattcgctcgtggggtatttatgtgatttggcgagtgatgtgcccggccagcgccctccttggctgcagccccgcaggaggacccggagtagggtgggatggagtgggtcgtgggaggagcgcgtcagcgcctgcccggggacccccagctcccgcgaggacacggaggcgcgcacgccgctcggttttcctggaaagtggagaaggagcgtcctgggcaggtcctctgagctcatcccccctcggattggggcgggtctgtgacggggtcacttaggacacgacgtccccccgccattcccttcc

SEQ ID NO: 6211 - DNA, 6000 bp, Homo sapiens; identical to SEQ ID NO: 2774

SEQ ID NO: 6212 - DNA, 6000 bp, Homo sapiens
catgccaccatgctgggtaagtttttattttttgtagagatagggtctccctattttgcccaggctgatctcaaacttctgggctcaagcaatcctctcaccttggcttcccaaagtgctgagactataggtatgcaccaccatacgtggctagttttaaagttttttagtagagacaggatctcctcatgtcacctaggctggtctccaactaactcctggactcaggttatcctcccaccttggtctcccaaagtgttgggattacaggcgtgagtcactgcatggcccttccttcatctaagttttacacacgcagccaatatttctcctgtcctaaatcatctagggccagacaccaaactaaagagcaccttgaggccaggcgtggtggcttgcgcttataatcccagcgagcaggagcttgggcggccaagtcggacagatcgcttgagcccgggagtttgagactagcctgggaaacataacaaaaccctgtccctacaaatacaaaaattagccgggcatggtggtgcatgcctttagtcccagctactcggaaggctgagaggtaggaggattgcttgagcctgagaggtcgaggctgcagtgagccgagatcgtgccactgcattctagcctgggcaacagagggagatcctatctcaaaaaaaaaaaaaaaaaaaagaaaccacctcggtaccccagagcccaccaacatgattcaaactagccagtcctaaactattgcccctgccttgcctttctttcccccagaaaacacaataaaggctgtggcctatgctttttcctcggtcctttctgccctctgactattgctggtgcttccccaggtggccctgcaagcagtagtatgccccttcatcttgagaaatggaagaaataaaaatctcatctttcaatgtcattagcctctccgtgttgtttctcagagctatgatctcaatgtttgtgtagattcttatgttgaaacctaacccatgccaggtgcagtggttcacacctataatcccagggctttgagagatcaaggtaggaagatcgcttgagcccaggagtttgaggccagtctggacaacttagtgagaccccgtctctaccaaaaaattttaaaaattagctaggtatggtggcacatgcctgtagtcccagctactcaggaggctgaggcaggaggattgcttgagcctaggatttggaggctatagtgagccatgatcaccactgcactccagcctgggtaacagagcaagactctctctcaaaaaagaaacctaacctgtaatttgatcgtattggaaggtgggcctttgggaatgattaggtgatgagatgggctcttcacgaatgggattagtgcccttaaaaaggagacccagagagatccctttcccttcaccacattaagacatagcaaaagaatggccatcagtgaaccagaaagtgggcctttcgcagacactgaatatgctggagctttcatcttggacttcctagcttccagcactgtgagagataaacatttgttgtttaaaccacccattctatgatatttttgtgatagcagcctgtatggactaagacatctctataaatcaaaattccacaggtacattcattgatacaatgagtcaggtggctcacctatcacacaggactttgaaatttagcataaaagaaagagcaagctattatgcgttgaatgtttagtatgaggccatcagtgtgactctaacaactaacgctgagggtgaggtattgttcaatccagttttgggttgcccctcaccacccgaagcctagagccctcagatggaacagaagcagggatgcctacctttcaggtggaatgttatccgtgttgctgctgtggcgtctctgcatcttccttaacacctaaaacccaacacatgggtgagccagagtctcccaacactcccactgcctgtcagattgccaaggtaattgtaaactgcaaacctgcactagtcgtatcttagacccctagtgctctctggcattttccaaagtatgtttcaatctttcatgccattccatcctcaatgtgacattctatcccatgaggaaagctatcaccccatttcacagaggaggacgatgagactcagaggtggagaaagtcctcatgtgagaggataacgcggtaaactgtgcagccaagaggtgctggatgaagtgaagtgggcagcggactggcaggagacatggattctgggttgatgctgctgctaacttgctgtgaccctagacaaatcagtaacccctctgtgggttcagattccccatgtgttacatgggaggggtggagtggtcaaaccaaaacttccttccagctctcacatttaatcaagtagtaataaagatgcaaattctcttggagacgtgtcacctgattcactgtgaagagccacatggacttcagaactccatgttgacgacactggaggtaggcattcgggaatcctcagggggatgtgaccaatggatcccagagaggacaggcctccccctcctcttcgtctccagagggatgcacagtcaggggagcttgccagagactccaaacctggatggaacagaacacctggatgaacagtccctgcgataccttgaatctgctaagaagccttaggacattgttggtagctataagcagatgattccatctgctcagtatctctgggtagcctctcagtgatccccccttgaaactccttttttttttttaagacggagtggtgcgatcttggctcactgcaacctctgcctcccaggttcaagcgattctcctgcctcagcctcctgagtggctgaaattacaggcttacaggcatgcgacaccacgcccacccaatttttgtatttttagtagagatgggatttcaccatattggccaggctggtctcaaacttctgacctcaagtgatccgcctgccttggcctcccaaagtgctgggattacaggcataagccaccatgcccggccctctttgaaactcttaaggtattgtatttcatcctattgtcaaactaagagtcctgattggggaagccagaaaatatgttttaaaccctccaacggctgcccagtgcaatcagaatcaaacccgagctctgtccatagcctacgggttcttcctgatgtagcatcatctgtttccaactgcatttcctcccattctcccttttcccactcctgtccacccacagtggcccttctgttcctctaatgtgtcagcgtgtccctgcctcagggcctttgcacttgctgtgccctccccttggaatactttctcctctaaatgtggcagggcttggtcccgcagggcaaatgtcgtctcttcccagaggccttctcttctcattctcctgactccccgtaatattgccctgttttatattattcatagcacttatttgttcatgtttgcttatttatttatgatttgtcctccccattagaatataaatgccattcctgaaagtagggatcctgtctacttggatcacccctctgcctcagcatccaggacactgtttggcacagagtggcgctcaacaagtatttactcaatgaataaaacatctatgggtctcccagttccccttttctagatcccttgctccctgtcccacctttcaccctagcaaggtaataagggccatctacttcccatgaaaaggtttagcctccgtgaatatcttcttgtctctggaggcagagccaatattgtggatatagggtgtctatatcagtcagatggtgtctgacttcagtttagggcacgattattggctgttgaatgacttcctaatcctgaccaggcttcttgagggggcagcaatggtgtcactagggccactgattaaaaatgacccgccagtgaagcctcctttctcttttgaaaaattaggtaacaaaccggtcagcagcagcatcttcatatatcaagaaaaggtcattatataaatatttttcaagaatttgcaatctcaacttaatcctcctctcgcccctccctccattatcccacattgcaaatccttgggggaaaataaaattcatattccaaagttctcatccacacatttaactcctaaatcgaatgctcgaaactctactttcggatgcttgtattggaagaggcttcggattctttgtcggaagcaggccgtacataattctggaataaatttttgcacgcgggatgcatctgaatgaatgaaacgctttttaatcctctgctctgtacatcccactatgtccctttgaaggaccgcaccgagacttttcgatgcttgcgatggttcaagttgcgcccctggggcccgttacaggactgcaccgaaatgcactcagaggagcatcgcctgcatcacttggactggaagccggcaggtgcacttcgggaacaacgtcgcgagcgcttttcatccctgcaaccaacacacagcgcaaaacgctctgggactgcaagggcaggagactacacagaccatgatgggagaaaagaaaaaaaaatcgcgttctctttttacctgcccagacaattcagcaatcacagccgcatcattcaggtccagccaagccaatcacccgcgcagcctgggcagcatgtgacttccgatgcttccggcctcctattgggtggtttcttggcgtcgccgggtccggcgctaggacccgggcacagctacgcccgcagcactcacgcgattgtccgccccctttcccggcacttaaccaataggaggccgccgttccttagggaccaatggtgagaagatcttgcgcgactagcccttgtcgctgcggagcggaggcggggcgtagggcggggtcacgtggggctgcgcccaaggctgccgggagcagactgggctgcgggcggcggggccggcgcctgcctggagggatggggctgccgggcgcgtaggggccatgccgcccgggacccgggcctgccgcgttccgcgccccggccgccgcgccccacgtccgcgccgggatggtgaacctggcggccatggtgtggcgccggcttctgcggaagaggtgggtgctcgccctggtcttcgggctgtcgctcgtctacttcctcagcagcaccttcaagcaggtcagtggccgcccttcccctcctccccttcccttcttccttccttcctcccccttactttactttctccttccttccttcgttaccttcctccttttttccttcctccctgtcttcctaccccttcccttcctttctttctccccttcccttccttcctccttccttcccttcttcctacctcccctccttccttatcttcctccttccttcccctctccctgcctcccttccttccttaccttcctcaccttcctcctccttccttcctccccctttccttcctcccccttccctttcttctttcctcccctttttcctctcccttcccttccgtctttcttccttcccttcctccttccgtcctcctcctttctgtccccctctcccttccttcttcctttactccctttcttccctgacatcctctttcctcacttcgttcttcctccttccttcccttcctcctctttttccttactcctcgcgtttgtccgacctcccgacttctgcagcggcgccgccggggcgtccgagggtggggagaggtgcgcattcctgtcccggtctcagcacgggtgagggacctgcccaccgccttggtccctgcagcgggaaggggttgctaggccagggcagagctgggactagaaccccgagttgaggacccttcagcggtggggactgcttttatgaacacctccctgcttttcacctgcccggtccagagctaagagagggcgtgcatttgctggcttcatcttcgcagcaggcctgggagaagtggggttcccagtattacagtgggggaaaccaagacataggtggcgagggtcg

SEQ ID NO: 6213 - DNA, 6000 bp, Homo sapiens
gactccacctcaaaaaaaaaaaaacctccttagcaagttcaaacctatcccagttcttaacttattgggctactgtatattatatatcaattcaagttaacacatattcataaaattgctatcatgagcaagttactcaaagtcaggaaagacacttgcctttgtaaaatatttttatttaaccaaaaagttttctaaaaataacatttaaagatttctaaggccaggcacggtggagtacgcctgtaatcccagcactttgggaggccaaggtgggtggatcacctgaggtcaggaacttgagactagcctgaccaacatggtgaaatcctctctctactaaatacaaataaatacatagccaggcatggtggtgggtgcctgtaatgccagctattcaggaggctgaggcaggagaattgcttgaacccaggaggtggaggttgcagtgagccaagatcgcaccattgcactccagcctgggcaacaagagcgaaactccatttcaaaaaaaaaaaaaaaagatttctagtaataacagttaccaattatgaagtgcttttgaattgtatcttagtaaaattactgccaataaaatgaagtttggaacaaaagcaaggaaggaaatgcccagtgctagaattcacggtgtaatgattaatggatgtttctgtctgactaaaaaggataatactcacaatataaagtataaaacaaacattgtaagaaggaactgaagataaagattgtaagagagcacctgactactctaaataaatccaccactcctggcctgaacaaattaccctccagaattttgataaaacttgccagttaacccaataaaccatttgagaaaaatttgagagttcatgtaaaaatgggaaacttgctagaaacctggtaataactaaattaaaggcaaaaagatgtgaaatctgcaaaccaaaccatatgtcaaggatcttagtattgatcccaaataagattctagaatgaattgtccaaaagatgtgtttgcaaacaattagaaaaaaagtaactgctaaatcagcatgggtttacttaaaaaaaaaaaaaaaaaaaatgctgggtgcagtgggtcacgcctgtaatcccagcactttgggaggccaaggcaggtggatcatttgaggtcaggagttcaagatgagcctggccaacatggtgaaaccccatctctactaaaaatacaaaaaaaaaaaaattagccaggtgtggtggcagacgtctgtaatcccagctactcaggaggctgaggtaggaaaatcacttgaacgcaggaggtggaggttgcagtgagctgagatcaggcctctgaactccagcctgagtgaccaagtgactctgtctcaaaaaaaaaaaaaacaaaacaaaacctacttctaaactaaccatgactagaaagtcactgctgatcaattctactaactaggtataaccgaagttatttatactgagaagtgaataattttagaagtttaaatgttttataaagaaattttaaaactcttaatagctccatatagactacagaacagaaaattcttagtttgacttcaagactccctcctatctgagcttaaaactgttttactatctcctgtttggagaactcccttcaaccaagccagtcattctcccaaagcatcatgttcattcccgtatctgctccttttccacttgttctctatctaaaatgttcctccttccaaggcttaactctatttccaccagttacataaagccttgtttcaccacctcagttcatagttttcccttcttctaatttctatcacttgtcttgtagctcatagtgttacggggtctttggggtgtccattttctggccagaaacctctgtggccacagtgcctttacccgagttcttgtcctgcatccaggaaaagaatgaggtacgtggacaatgaagggtgaacaagacaaagatgaactttattgagtgttacaacagctcagagacctccagtgggtatttcctctctgtaggcaggttgtccatcaggtattcagttctcagtagagaggaggccctggagaggatggctcctctctgcaactgatcgtcctaatgtctgcagctctcagaagagaggaggccctggagagggtggctcttctctgcccacaggttgtctctgcagctgtcagcagggagggtaggtcctttttgcaactggctgttccatcatctccaactatcagcagagagggtagctcctctcttaggcttgttgacccataggtctctgccctcttggtcctctggcagtcctctgccctactctggctgaacccagggtttttatggacctccgaggggaggaagtacatgccgattggtccatgggcaggccagaagatgcaccacgagtccctactccagtctgcaggactggcagcctggacccctgtcttcaggccctccctgacctgaaggtggggtcttactggggactcacccacttctaccctggaatcaatctgcctcccattgccattcttggccccaagcccgctctgagattggagcaggccccgggagtagagagagtccaggcggtgggaacagacactcctgagcctgcagggattgcagtagggtgtcttgctggtcccccaagggtgcaggctgcagagatgcccaggtcctgcacctgggagggcagccacaatggcaccaggggctcctgcctcaactcagaaggggcggggctcccacaggctccatggagtgtgcagccccagtcacacctccctgctgcagctggctgccatcaatagggcaaactcaaaatttttcttaacttccccagacacattcacacatacacacacacaaacacacacacactttctttcaaaatttatatccaatcaaactggttgtccatgattggatcctgttatcactgttgactatttatacacatacattttggaaacatacaatggttaattatagcagtaagtcccttacaatgcattgtatatgttctcttacatgcatttgttcatcaaatcttgtgaattctaccctttaaaagtttgtcaattccatccatacttcttcagccctattatgtcctactgcatgaccttaacctcttccaactagactattgccataccccattaattggctttagtcccgtcttctcaattccaatccatttccttcattcctgagtaatgttgtttttgttttgagacagtcttctctgttgcccagactggagtgcagtggcagcaatcagggctgactgcagcctcgacccctcaggtccaagtgatcctgctgcctcagcctcccaagtacctgggaccacaggcatgcactaccacacatggctaatttttctacttattgtagagacgaggtttcattacgttgcccaggctgacctgggtgctgtttctacacacaaatctaacctcactctcctagttaaaacttctggtgactccaaaccctttagcttggtgagaccctttcgaatccgccccatggaagctcagtaataatcaatcaaaataaaaaagagcggcagcagctgttgcgccagttcgcctttacatagattcatctcaaccagttccccaacatgcctgtgcataattttcccattgttagaaatgccctgtttctctttgcctcatgcacgccccctcttatttcaaggtccagctcaaaagtcacctcctgtctacaacttcctctgatgctcctgagcagggatggctgaatctctgtctctttacaataagaaaatacggtctttttttttctttttgagactgagtctcgctctgtcacctaggctgaagtgcaatggcgaaatctcggctcaccccaacttccgcctcctgggttcatgcaattctcctgcctcagcctcttgagtagctgggattacaggcacgcaccaccacactcgcctgatttttagtagaaacggggtttcaccatgttggccaggctggtctcgaactcctgacctcaggtaatccacctgcctcggcctcccaaagtgctgggattacagacgtgagtcaacgcgcccagccggaataatattttacagcaattacactgcactgtttagatcattattcctatgccgcctcctcccccaacaaagtgcgtgccttcagcacacaacggtcttgtttctgcttattccgtagccccgcaggcaaagccagagtctggcacaagccagggaccgagtgactacctgcggaacagaatgattagaattgcgtctggggttcctggagggtgggccttggctgggcggatcccaggagcctggcgtctcccaggggaggcgctcacctcagatcgggcctaagagggccctgcttgccacactgaccgccaagcctggccaaaaagctcagggaagccgcggagccactgcccgcctgggtcagggtggtgacggagcctgactgagaataacggctgaacttgactaatagactgaccgagggttggagcgggtcccaaccaactgcctgacggcccaaaggcaggaagaaacgatggtaggccttgtcatcttcgaaggagaggaaggacagcaaacgaattgctatagcgtccccatgcgcacttggcgcttctcctcaagcggagcaggaacggaactgggcggacccgccggaagactcggcgagtgcgcgcgcgcaggagcccattttcccgcccgcaacgtggccccgcccttttacccaggccctacgcgagcttcgccgagtacgcgtgcgcagcagcttcccctccctcgccccgcccctcacgtggccccaccctctcaccctagacagatgggagcctcctggggtgtccacgtgagcgcgcgtgagtccgcccccccagtcacgtgaccgctgactcggggcgttctccactatcgcttacctacctccctctgcaggaacccggcgatatggctgccgctgtgccccgcgccgcatttctctccccgctgcttccccttctcctgggcttcctgctcctctccgctccgcatggcggcagcggcctgcacaccaagggcgcccttcccctggatacggtcactttctacaaggtaaccggggcgggggacgtcgcgcgcaggtgccgccggggcgcccggaagagcgcgcgcccgtggggagacgctggattccgggagctgacgggaggtggtctgtagcaacggtcccagagcttcccggcgtcctacaggcctagtggactctgagcggagaatgttatgaccaccgggcatgcacgcttcagggccccggcgcacccttgcttttgcagcatttatacttgcatccacccttgcaaagatgcagccgagggaactgggtgccccttcccttcacctgtggggagagggcggtgcctggcgagatccaaccctcgagtcccaagtgggagaaccggagggcggtgcgaggtcgacgccaccgggctcccggctgtggaagctgggaggggttggcggggggaaatgcaggcgcgttagcctgcgtgtccgcgcccctcttcccagggttggattgcagcctgctttgcagtgtgcaaacaatgatcagatatcatacatcttgaatagtgcaagcgtgaagaataagcttcagttcagccaccctgtaaagcaggggtccccaaccaccaggcccgtcggtggcctgttagaaaccgggccgcacagcaggaggtgagcggcaggcgagctagcactacagcctgagctccgcctcctgttacatcagctgcggcattacattctcataggagcacgacctttattgtgaactacgcatgtgagggatccaggttgtgtgcttcttatcagaatctaatgcctgatgatctgaggcgaaacaggttcatgtcgaaaccacccaaccccgtggaaaagttgtcttccatgaaaccagttcttggtgcca

SEQ ID NO: 6214 - DNA, 6000 bp, Homo sapiens; identical to SEQ ID NO: 1762

SEQ ID NO: 6215 - DNA, 6000 bp, Homo sapiens
gcaaagtagttctgtttacaccagcatcaccacgaacacgtaatatgttgtgctaccactgaaatgacagctacactatcactgggctacaggaatttttcagttccattataatcttaagggactgttatatacgcagtctgtcactaaccaaactgtcattatgtgcgcatgactgtaccttttttggctttccaatacctttttaaagataatttgcacataatgaagtatactttaagtgtacagtttgatgtgttttggtcaatacttgcacctgtgtagcccccactccaatcaagctgtcttggaacatttccatgcctccagaaagcccctcggtgtcccttgaccactgcatttctaccacatgccttttacaaattcaaacaatgctggaagacagctatagttatttccattttgtggatttggatgccacagccccatcagggtcagtcactctcaagctggagttgagtcagtgacggggccagtgaaggacatgggcaagtggtggctggcccagagaccatcacacctagtagattgagagctatgatacataagctgagaaaggccagcctcacctcccttctttaaaaagtacaaaaagccctgaaaatagtcgcgaggtaaagtgtggctaagggtttggagttagacctgtgcataaggccccagccctaccacttagtagctgtgtccagggccaaaagcctcacctccctcacagggctccctagctctgagtaaacactccaaacactcaaattatgatgatttgagaatgctcccgaagtctcaaactatcttctctttggaaactgtttccagctctaatggcagacggcatgactaagagataaaggcaggagccatcctgatctagaatgagactacagattaggcaacaaaagctctaaaccttttcagagctcaccctctccaaaggtcagtcaacctaatagtaggcaaggcccttgggggaaaagttttggcagcattcgtgtccttgagcccaagttacagtgaacttaggacacgaggcagtggaccagagacccccaccatagcaaacctctctagggaggactctccccactgttgctactggaatcctgcttttttttttttttttgagactgagttttgctcttattgcccaggctacagtacaacggcacgatctcagctcaccgcaacgtctgcctcccaggttcaagcaattctcctgcctcaccctcccgagtagctgggattacaggcatgcaccaccacacctggctaattttatattgttagtagagatggggtttcaccatgttggtcaggctggtctcaaactcctgacctcaggtgatccttctgcctcggcatcccaaagtgctcggattacaggtgtgagccaccgcgactggctaattttgtatttttagtacagacgggatttctccacattggtcaggctggtctcgaactcccgacctcaagtgatccatctgcctcggcctcccaaagtgctgagattacaggcatgaaccaccgtgcctggccaggatcctgctttttgacttgtttcaaaggtttgatttcattaccaatgaagctggggaggtgaagcaggagacagcaaaattggttacatgaaacagagaggcaatgaatacttgagatactggctacggatctgattcaatcagaagtttattccagttaaatggtcagtctctcttctctccatctcccctgaatataatgttgctgattctaaacagtggctctccagttggtgacaatcgaaatcagctgggagctcaaaactcctgacacctaggtcctaccatgaaaattctgatgtaattggtccgggatgtggactaggcaacagaatttttaaaactccctcaggagattttaaagcccaccaagattagagcccactattctaaaaagcactgtaccccttatttaagctaccattaactccacggtcttggcccagtgaattcctgacctgacacattaaaaacaaaccaaaacaccataaaccaaagccagcccccacttcacagcttcagagccacagggaggaagcaactgtatgcatgcatgaaaatacaaaaatcagctgaagggggaaaatcatcgactgaaaaggaggctcaggcaagtacagtaggaaaaaacgcaccaaatccctgaccccacgttttctatatgcttctctgtagaagtcttgtgtgcctgtgtgtgtgttaaggaaaacgggatagtctcggcaaacctggattgcaatccagttccaccatttccttcgtgaaattcaagcaatttaacccaagtctcagttttctaacttgtaaaatggagtgttaaagccataatcttcaaaaccctcagagaatgaatgttaaagcatttggcacctagtcctttgtgtagtttcctttgggcgtctcaaacattgggatcagtggttcccaaccctggctactagaatcacctgcgtgtgcttaaaaaacatgatgccaggccaggcacagtggctcacacccattatcccagcactttgggaggctgaggcgggaggattgcttgagcccaggaattcgagaccagcctgagcaacataagacctaatctccacaaaaaaattaaaaaaaaaaattaaccggtcatggtggcacacacctgtagtcccagctactcgggagactgcggtgggaggactgcttgaggcagggaaggtgaggctttagtgagccaagataataccagtgcactctccagcctgggcgacagagcaagaccctgtctccaaaaaacaaaaacaaactcacacacacctgtgcttgcctgggctacaccccagatcaattaatcagtatctcagagatgcggaggggtggctgatcagtcactagtgtttaaaaagctctttgggggattcggatgtgggaccagggcttactgccacctagctaaggtatttaaccagctttatctaagagttgccagggatgtgaggcaaagcatcacctcaggggattcctacagcaaagaagtttaagaaacactgtattgaggcttgtataaaaccttcccaaactgagggcatttctacaactcagaaaagtctgctgttacatttcaactaaactaagtcacataattgcagcattttacatccaaaatttgcttataagacagctaccgccaattgcaacttccatcaaatgacattctctccctgtgtttaatacacaaactcttggtctatttctctcaatgttctagtgagaaagatgtttatcatcaaccccacttttttggggagaaaactaggaatcacacctataagagccctctgactcccaactcctttgcccctttcattacacagtccaaatcaagaaatcattagtctaatcccttgcagggcttgttaaaaccgatagatgggctccaccccaagaatgtctgattcagtagtctctgacagggcttgaaatttcagccattttgaataagttaccaggtgttgctgctggtgggaccagagtttgagaaccactggtttatgctgccttcttcccatccgctggtccttattttgcacaaaatggagcggactagtcaacgtcagctacaggataactgacttttcttcagcagcgtcactgggactgattttcccttaagactgcactttccagggacgtgacaaacaagcaagcaagtagaaagaagatctgggccaatctttggtcatctctacccagggacaatgagctactcagggaacagacccttgaggatcccaagcagacaaaccccacagctgagagacagatcttgaaacatcctccgctccttaggcgtggtcacctctggcctcaatggaagttacagataggtacccaggcgccagctgaggcactgaactccgtggcgcaggtatcctaacctcaggcccctggcatctctccccaggattccaagcactgaacgcacatcagcctgctgggctctctcgatttctttccctcactgggccgtgtgttcagacgcacctgggagccccttccccacttcctggaaactcagcgactccagccacaacctccaaaacgccaaacgctccgccccaaggaatcctacctcaccttctcataacctgcccattcattctccttcataatcctccaaatcctcattttccacccccaaatgtccgttttcaattgatatctctttgttctcctcgcaatcaccaactcccatctccaaccagcactcaggactcacttggagacaccccttcctcacgcacacacgtatctactccgcaagcccaaatgtgcttcccggattcctaaccgccagggagcctccctaccaccacccccgcccctaattctccacccaaagcccttcccccaccccgggcctttcccctaaccaatcccccaaatgcctctccactatcgtgactgcccctcatcacaccccctcctctcggtcccttcttatactctgctgctgcccagctccctcggccgccctcaacccctagtccatgggcaccgccctccctaccatgaaaagtcggaggacgcaggagtctccaaacccggactgagagaggcaggaaacacccagctcacgccagccgggggcggaggcggggccggagcgataacttccgctgtccgcaccccacttccgccccgcagagggcaacgtcttaagccgtccgttgtgcgcctaggggccagttttctttccagcctccccggccggagtgggttccagcttttctcggctggggagggcatttatcccacctccgctatttcagctgccagaggggaggcaaggtgtggggaagttttccttcccgggcgaagaagctctgcggaactgtcattttccggaactggatgcttgcttcctggcggggttctgaaagcgaacaccgcggggcaagatggcggtagtgcgtcggctgctgccccgggtctggcagaactcgggtgttttgggctgagacagtggcagctgcggccccgaccccaagtgcggggacctccggcgaataaaggtcggcctgcgggtaggccggtagggcctgcggtccggcctgcgggagaactgggtcgtcagtcctccgagtggtggggctggggactttgagggagttggctctagggcacagtccctgcctggccaggtcggaggaacaagtgctgggatctggcgtgtgtgctccaggggctctttccgcggccctttccacctcttttcactttggggacggtaggcctttataaacggactaatgctgggtgatttgttcctgtggttgttgatgccgaggaaagactctgggccccaggactcacctaaactggagttcgaatactgttcgctcgctgtgtgaccttgggtgagttccctcacctctctgagcctcagtttccttctgtgtaaatggagtaattagcaggtttcacagagggtgtgaatacgttttagtaccgtgcctgacacctagttctgaataaagaaaaacttgatcgtaatttaactccagcttagcccccacaggcaatcttgcactctcaacttctctttgcttggccattctgtgaacgggggagccctggatcttgtttgttttacttagtgataaataactgttttggatatacatggattcagattcaaaagcatccaccttagataggctgtagctttcaataaatagtagctgttaatatgaatagtctctttaagtcgtgtttcctattctttaaataaaaattagattattgaggctggccacggtggctcacgcctgtaatcctagcactttgggaggccgaggcgggcggatcacctgaggtcagaagttcaagaccagcgtggccaacatggtgaaaccgcatctctactaaaaatacaaaaattagccgggcgtggtggcgggcgcct

SEQ ID NO: 6216 - DNA, 6000 bp, Homo sapiens
acctaagagtgccagatactgtgctgagtgtaataggctgcatcctgctgaggaaggagacttttgggcagagtcaagcatgttgggcctcaagatcacctactttgcactgatggatggaaaggtgtatgacatcacaggtactctctgtcctctagaaatacaggctcatacttcctgatcttttatgtgctctaaactgcgacgttttggctaattatttctcatgtttatagagtgggctggatgccagcgtgtaggtatctccccagatacccacagagtcccctatcacatctcatttggttctcggattccaggcaccagagggcggcagaggtaggtggtatttctgtcaataatctatccactatttcagttttgaatacggtttcagatgacctgctttttaggacacccaggggccttgttttctaggaagtttgggaactgataagtatatctaacttaggtaaccatatgactctaacatctcttgccttatttcttctgttttacctcagagccaccccagatgcccctcctgctgatcttcaggatttcttgagtcggatctttcaagtacccccagggcagatgcccaatgggaacttctttgcagctcctcagcctgcccctggagccgctgcagcctctaagcccaacagcacagtacccaagggagaagccaaacctaagcggcggaagaaagtgaggaggcccttccaacgttgatgccccttctctttcctcaaatcaatgtcagggagtcaaaagggctgtagcacaggatggagtttgatttatccctcctcccccaacacctaggaactgaatctttttctttttattttttgagatggagtcttgctctgttgcccagctggagtgcagtggtgtgatctcagcttactgcaacctctgtctcccgggttcaagcaattctcccatctcagcctcctgagtagctgggattacaggcacacaccaccacacctggcccagctaattcttttttgtatttttagtagagacggggtttcaccatgttgcccaggctggtctcgaactcctgagctcaggtgatccacccgtcttggcctcccaaagtgctggattacaggcataagccactgtgcccggcctgaatcttgtcttttgacaataccaaagaaatagggggtagctagagtaaagaacctagggcctggacctgggctggacagtgtatccctttaggtgtgggaactgggtatttccctggggtctgtatgcctttgtcttgtcatttgcttttagggcagatgacactttttcccacccttttaaagctacaagtctatcttctttcttgacccatttcaggagggagccctctcctttatcctgatataatatttaaaagagaacaagaaagcatgtagccctaatgataggagattatcgcatagagttcagagactggaaactgaattttccctcgactttcactttgtgggtaaatcacccaattttaggctcttttctgcaaggatggccaaaattaatcatttttaaaaagtagattcatgcccactgcccttgggtgagggggaagaatacgggggttcccagaagcccccatgtgatccaagggtttgtattttttttttaagtttgttcatatttgtatgtacatgactatttaaagccaggggattatctttctataaatgtataactggcaacctgtatcttccctctttgttgcccatatagccggagccctttttctcatttgagaatctcttccctactaagtgttaagcttagagtgaagggcacctcctactggaccaaaggagaggggattggagaattgttttaagttttatacattaggtcagtattccatcttcccacccccagccttatgaggacagctctctacccatcctgattaaactgcagctatagctgaaaaaaattattgtaagaaaaatacacagcaaaacagagctggaaggtggtaagtgtaaaagatatggaaagatgtaatcaccaaagaagctgcccaaatggcttcctgctatggaggagagtgatttggcccttacctcacctgccttcctgattcaaagaaacttgccactagcaggactgggcccaggagccccatttgccaatctcttctcttcttgggagtctgggaaaggttgtatagttctcaggctttaaaggtgtagaagacagtatggagaataagagaaggatgttttatagtcctctgtttcagtgccttccccatgcccatggagctgtcccaaaacccatccctcagtatttgttgatgccaaagacacgaaccccatggaactggggcaacttcggcagcagtacacttagcaatgaggctgtgttgatgaggaagtgcgcagcatcatacttggtatagaagctggccaggagatagctggggagagaaaaaaatagggtgagtgaggttgaccttctctatccatattcttttttttttttaagagacagttctcaccatgtttcccaggttggagtgcagtggctattcataagtgtgatacgtgcagtacaacctcaaactcctgggctcaaacaatccttctgccatagcctcccaagtagctgggactccaggcatgcaccacagtgccctgctctttctcttctattttaaatgaccagttttactgtatatagttctagattatctaaaactattccagctatatcaacagcatttactttggggttcaggagatagcacccttaactggagactgtaagtcagtatctgttaattgttaatgacatggcaaatgacggctcaagctatttcagtctgtatgactgttacagtcctctttgcttccactccctacagtgtttttgaagattaatatcagttctgcctttatttacttcttttggcagtgtaaaatcatttggttttatttggcacttatcttttctcagtcccttcatttccttactaccaaggaggcagcaaggaatgcttgattacagtattgactgtaatctacattttactgctctctgtaggcttagaactagtataccataatatcttcaaagggttttagatgagaagtctgctttttaacagcttccctatgggcctttctacctggctcttggagctctttctaacccagcatatctcatttcccccatagactcacagcacaataggagagatgctgaggaacttgcgggaagaggtaaactggagcccatagtccatttgctcccagtgtgtcagtagccgagcctttccttggtcaggagtctcaaagggtgtccctttcaccgtatgaaggaagacatacgtagcctgggaacagggaaggtggcagtgtgaggggcagaaagtagtttttcagtcaaagaattatgttaagatcccaaaaggaacacataaatccccaaacaattggtgattttattttgcttttggttgggaaaccctggggtgggtacaagggcgtggtttagtgctcaccaggttatggatgacgttggtcagggtccagacaacaggaatgctgaagaaggggatgctgagtagaaccatatgcagcaatcctaccaagatgatgtaggccagccagatgcctcggctattcatcactcgggtgttggggtttacttcgctgtgtgccacccccacattcatcctagccgtaatgggggatcaggcaggagtccagctcagttttttctcaacccctcttgagctatctcccagttgtctctcagatagccccaatcccctgaactctattgggaatgaagaacttacccatcacgcagaaaataaaaactgaagacttggggaaaactttaaaagacaagaagagtcctcactacatttcagagacatagtcattattgctctgatctttacacgtcaactgtaacatgaaggtgtatgtgtaggcttggggcactcacttcagggagcaagggaaataggagtatctgactttgctgaagaagttaataaccatgaagaggtcacgtacacccagaattccaggcgaaagtcatggaatcatcaaagaaccactaagaagggatgacagagtaaagctcactctggtccccactttgttctctggggcttgtccaccctctctctcacctccgtggcatgtaaacagtctgcatccccattacttctctcaagcgtggggcacgacaacaacttgcccacggcttctggactgggttaggaagggacctgagctcaatacctcgaaaggtggagccttggctctgactccaggggcagcagtgattatctgaactcggatctttaaaattgtggtagctctaaagctgatgatgtctggttaggaagcggctcttgcccgccccagccccaccgccagttccttaagcccgccccatgcccctcccagcttcctcctcatgttcatcggttttttcagggctcccttcagcgctcccctctcagtatttaggtcaccactccctcggcgcccctttcgcctcccaccatttttcctcagcaacccttacagtctttgcagctcctacctgccagctcagatccccgtccggctatgggcgcggcgccggctaccacacctgaagtctccaggaagtaacgcctctccttctgcccctttcctattggaggaacagaatcagcgctgccaccacccattggttggtggtctgtaatgcagaagcacagttggttgccatttctgtcgttcgcaagatacagtgcccgcccctctcccagttccaccttttgaaagaggtggggcaagctgcctagagaagtgagagcgacgtcagctattgaccaatgggaagagctgatggtatggcgtgggagcaagagtgacaacgattggtcagccttgcatctctacgcctaaggcgggagctcctggaggcggaggccgcgggtgggggcctagtggagtgaggggtaacaagatggcgaccgagacggtggagctccataagctaaaggtaccgtgaatcggggaagggctgagttggacttttctaggaactgaattctacagggtagcttgcgccttctcctacgtcttctccgtgcagccttttccacttcgtttctcggctcccgccgtagctcttttgtgccacccttccacactacgccttccctaatttcccatttctcctcacggctttactgctatatttatttgttatttctgcttccttcatcattgtatcgtccgtcacccttccccactgggttgtgtaagtgccttctacctgttatactcttcgttgcttttcagggctgcattacgtcagttggtccctcctttttgccccatgtcggagccaggatccgtttttcttccctgggatgatgtttccagtctgtcgtccgaagctgagatttccctgttagcaaatggtggcatttttgtgtatttctgtctaaataggtaccagacactcagaaaatacttccactccccttttctaggtgggattacgccccaagccgaattttgaaacagggagaggcctctcagaagatcggtctcgccttagaagcctggggttgaggaggtcttgagaatagtagaagtacagacacctcagatttaaaagttttcgagttctgtcacgcggctctcggcccgccagccttcctcacacaccatctccaaccaccagagagaactcacacctgcaatatttgggaaaaacaattccaaggttaagattatctctgttccatttcatatctcgggtgggccctgcatctcctggtgttaccattggctgacactgaatcacagaagctattttaaattgtcttatgagactcttggtagttttttcacacttagatatataaaaaagttaaaaaaatatattaaaaagaagaacattttaaaaagtattttcttttagggtaaattaagatatcttgagtaa

SEQ ID NO: 6217 - DNA, 6000 bp, Homo sapiens
gtaccagatggatgacagatctaaatgggaaaatgtcaaataaagcttttaaagaaaatatctttgtgaccttagagtaggcaaatatttttttaacagcactaatcacaaaagaataaggtttaattggattataataaggagcttctgttcattgaaagacacgattaaaagagtgcagaggccacatatagcccaaggtaagatatatgaggtatatacagttgtctctttattcatggggaattggtcacaggactagggcaaatacccagtccatggatgctcaagtcccttatataaaatggcatagtatttgcatataacatacacacagtctcccacatattttaaatcatctctagattatttgtaatacctaatacaatgtgaacactatgtaaatagttgttatcctgtatagtttttttatttgtattattttttgaatatttttgagtatttatttatttatttagagatatggtctcactctgtcacccaggctggaattgtagctcactgcagcctcaaattcctgggctcaagcaatcttctgcctcaggctgtggagtagctggcattacagacatgcatcaccacacctggttaatttttttcttttttttttttaatatgcagggttttgttaatgttgaccaggctggtcttaaactcctggcttcaagcaatattcctaccttagcctcccaaagtgctgggattacaggcatgagccacctcactgggccagagtatttcctttattttttttttttgagatggaatcttactctgtcacccagagcaacctccgcctcctgggttcaagcgattctcatgcctcagcctctggagtagctgggactacaggtgcatgccaccatgcccagctagtttttgtattttttagtagagactgggtttcgccatgttggccaggctggtctcaaactcctagcctcaagtgatctgcctggcttagctttccaaagtgctaggattataggcgtgagccacggttggtccaatctgcagatgtggaactctcagctaaggagggccaactgcatctctaacaaaggacttgtatccagtgtatgtaaataattccttcaaatcagcaagaaaaagaaacaacccaatagaaaaatatgcaagaaatttgacgtggcttcacaaaatggatatacaattggctaataaacacattaaaaatcttaacatctttatcaagaaaatacaaattaaaaccacaaggagataccaggacatagcccctagaatcataaaaagaaaaacactaaaattagcaagggttgatgaggatgtggggcaatgggacctctcatacattcctggctggagaataaactggtacaaccactttggaataaagtttggcaatatctacagaaatatctaggtatttgctatgacccagcaattccattcctacatatatatccaccagaaatatgtttaaccaaacacatacaaaaaggttcacagtagcactagtttaaacctgggaactactcaatgaccattaatagaagaatgaatttaaaaatgatcatatattcacatggaatactatgccaaaataaaaattctcatgttaacaatatggacgaatctcacaaataaagccagagaggaaaaaaaaaagtcagaaataagagagtatataaatggaaatgcacagtgtctaaacaataaaaatagacaaaattaatctaggttattatgtttaaatagtgatcattttggggtagggagtagtgatggaaaggaccaggagggagcttctggtgtgctggtgatgttgtttcttttttcattttttatttttttggggcagagtctggctctgtcatccaggctggagtacagcggtgcgatcatggctcactgcagccttgacctacccaggctcaagtgattctcccacctcagcctcccgagtagctgggactataggcatgtgccaccacgcccaaataatttttgtcttttttgtagagatagggtttcaccatgttgtccaggctaatctcaaactcctgggttcaagggatccatctgcctcagcctcccaaagtgctgagattacaggtgtgagccaccatgccccatctgtcccgtttcttgatctgggtgctggttacatgggtgtgctcaacatgtgaaaatataaccatccacacacttgtgatctgtgccctgtccttatgtaaattatactgcaataaaaattgtgtatatcaaagagcaaacaaacagcaaactggaaatttttctgcaagtatgacaaaggcttagtaatatatgaagaactcacgcaagtcaatttttttaaagctagcatctaataagaaaatgagcaacaaatatgaagagaaatgttcaaagaaataaaaatagctaataaatgtataaatgcataaaatgtaaattaaaacaatggaatgttatttttgcctatcaaattagcaaagattaaaggaaactgttaaggctgttgttgaggatttggtgaaaccaatactctcttattcttaatggaaaccggaattggtataacctttctgcgtaagtcttaaatgttcatattctttcacccactagttctacttctaaaaattattctgaggaaaatcagagttgtagttaaaaataggcttatatcactgttgattacaatggtatttttttaaaaaaaggttatattatgatacacgtgaggggatattataatattaatgttttcagagaatgatgaatgggaaaagattcacgataaagtcaagtgaaaaatatatacaaaattctacgtggtataccttttgttttaaaaaatatcacacacacattgtgtcttaatatagaggctaaaaaattacacacacataaacacacatttacatagaaataaagtctataagaacacataccgtactgttaatagttaccatctttgggtggtgggataatggatgattttaacttgggggcttattttctacaataaaatgttccttgagcatatattactattatattcagaaatcaaaaataatgggtaaaaaaaatacacccatcagttacccttactctagaaaatatttctctctccttcagctaccacattcaatctataaacattgcctcgattttaacttacaagtgtctgtccaagccattattccattacgtctctcatttcatctcaggcccttgtcttccctaatgaacgcctcatatctagactcttcacttcggtaaaatggccacattttccactgcttcttcattgcagccacatcaagccactttacatagccaccctccacaccccgccccctaaaaatgcacaccaggtactttcacacttcccaagcttggcataatcagttctctttccctgtaatacattttctcctgccggtttttctaatccaattcatagttaaagattcacctcggatatcgcgtactgggtgtagcctctgggaggccgcaagaacagaaattaatccttcaatgacagtttgtacatatttcaacatttagcattctgtcctgtctgtgcctcgctctctcgctgtatggcatgggccacttcatttttaaattttcttaaaatctagttggataaatgaaagtaaagcgtatacatgcaatacacatacgtacaggggtgcgagttttgacctgtgtctgatggaaaaaaatggcatcaaaaacactcgcccgatttttttcattcaagatggcagagaacgtcttaaaatagtcccacacaaaagcactcacatctagagccccgagtcagaagaactggctacacctagcgcaacagcaaaggacaaaagaatcgaatctagatgctgagatgccctggccctaactacccacagtaggtcccacaaatagactttaaaccgtgttagaaaacgggcacctgctgccttcattccgagggccacgccttgacggtgaacagtgacctgaagcactctggatactgacccaaaaaaatcgcggatggaaaaggaggaggctaagttgtgactatctaaaaggcacgattcggccccgccccagccgggcgcagtcccccccgccgcacatccattcccaggaaggaagagacaccgctccagcccagagcctggcaaccgggcaccgtctgggaattctgggcgggcccgagatagaggccggccacggccagggcgcctctggctacacctgtcaggcgacgacggactctaggccctgaaatcgctggggttcggtggtcgaggccagctggagcgcgtcacccgatccctcgccccgggaacgccttgcttcctcgatttccgtctcgtccttctcaaacaaaggcaatccacacccaccgccattttcctcttacctcaaaaaccacctcttcgtcaaactccggtgtcatccttctccgccatgccacccgcctcagcacgatgggaaatgaaggcgggagtacaggcggcacggagctccagctcctgcccgtcccgtgggtccagaaaactacaattcccaatatgcctcgccgctcacgcccccttttcgagcccgcttattggagaagagagtgagcgtgtaagcgagagaggcgggagcgagctgaagctcgagccctccgattggaggaggctagggcttttgtctgccttttacggccgcgactagcagggggcgcccggagcactgctgatttttggagcccgagaagggcacgcgccagcggagccgaagagagcactgctcgtgcccgcgcctggctgtcagcctgccgctctgcggggcggtgctagtgctcgcccgcccgaccccggcggctcgcgcccgggagcgccgcagggtcgctagagtcggccgcgtcctttgtgtggcgctcaggctgcgccgcggggcggcgggacggaatgtgggcgctgcgggggcttttctctcctacccgaactgtgggaacaatggactgaaaggggaagatggattgaggggccgagcggggaagcgagctgcaccggggaatcatgacttctgcagccggtaagtgacggcgctcgcgctgccgcgggaaagtttgtggcgagcgctgctaggcttgggctcgcgagcaactttcttcgccggggtgggcgagttgtgtgccccgtacctttgccgagcacctcggcaagcgcggagctaatgggattcgctgccggctttctcgtcttttcctgcccagaggggctgtttggaaacccgggatttctcgggatctcccttccaagggggactgtgctgggggctctgcaccaggtgaaatgcgatgtgtgaagggcgttcgctcatctctccagcagtgcgaggacttcgcctttgcatgtgaaaatagtgtagattcccaagttaatagatcagttattataggtaaaggcagtgttctcagcgtgttcaatttggccactaagtgagtcgctttcaaccttgtatctgctggtaaaccttttacccattttaaagaggcgtagacattgtcatgtcctggtggttttacctctgttacctgagaagcagaggagttgagattgttgaggttttttttttttttttttttttgcttgtctgcacccaattacaattattttgtttgtttctacctgattagggtaaacaaagctttattttctgtctgcctcccatagttctttccccttcatccaaatgacaaagcctctatctttgtgtggattttcagcaattctagacgttgtgtttctgaacattcttaaggaacaatttctgttttacaaaataattaccaaagtggtgttacgttcacttcgtaagtacataggttaatttttaaaccagaacttatgtattaagtagagtgttatgggttattttacgtttttgtccacgttgaaactttcattagaaattttatagtgaaatagtttaaagcttcttctc

SEQ ID NO: 6218 - DNA, 6000 bp, Homo sapiens
aaataaatatttaacatacaaaaataaataaataaataaaattagctgggcaggtggcacacctgtagtcccagctactcagaaggctcacttgagcccaggagttcaaggctacagtgagctatgactgcaccactgcactctggcttgggcaacagagtgaaatcctgtctcttaaaaaataaaagaattaggccgggcacagtggctgacacctgtaatcccagcactttgggaggccgaggcgggcggatcctgaggtcaggagtttgagagcagcctggccaacatggtgaaaacccatctctaccaaaaattcaaaaaattagctgggcggggtggcacgtgccggtaatcccagctactcaagaagctgaggcaggagaatcgcttgaacccggaaggcagaggttgcagtgaaccgagatagagccatccagcctgggtgacagggcgagactctgtctcaaaaaaataaaataaagataaataaataaataaaaacagaataaaagcattattacagtataatagcattaaaatacggagggagggaaccctgcaagaacaaatactgaaaagttaagggtaattctgtctggagagtgacattagggccaatatgtcctacctccacttctctttacatttatttgtaagttttgtaaagacttcaaagaaaaaaataggctgggcacagtggctcccacctgtaatctcagcgctttgggaggtcaaggtgggagaactgcttgagcctagcagttcaagaccagcctgggcaatgtagcaagactccatctctacaaaataaaaaattttaaattagctgggtatgatggcatatgcctgtaggcctagctgcttgggaggctgaggtgacggaaacacttgatcccaggagttggaggttatagtgagctatgatcacaccactgcagtccagcctggacaacagagtgagaccctgtctctaaaaaataaagtaaaataaaaggctgggcacggtggcttacaactgtaatcccagcactttgggaggcagagacgggtggatcacttgagctcaggagttcaagaccagcctggccaaaatgaagaaaccccgcctctattaaagatacaaaaattagctgggtgtggtggcttgcgcctgtaatcccagctactctgtaggctgaggcaggagaatcacttgaacccaggaggcagaggttgcagtgagccgagatggtgcactgcactgcagcctgggcgacagagccagattccacctcaaataaataaataaattaatttaattaaattaaatgacaaaaaaatacaaccattaaaataatagttaatatgcggccaggcgcggtggctcatgcctgtaatcccagcactttgggaggccgaggcgggcggatcacgaggtcaggagatcaagaccatcctggctaacatggtgaaaccccgtctctactaaaaatacaaaaaattagccgggcgtggtggcagacgcctgtagtcccagctgctcaggaggttgaggcaggagaaaggcgtgaacccgggaggcggagcttgcagtgagccgagattgcaccactgcactccagcctgggcgacagagcgagactcgtctcaaaatagtaataataataatagttaatactcaatgagtgcgtactatgtatgagggaccctactagcacttcataagtaaaagttaactgaaaattcttaatagccccatgagataggcaggcttattatccccccattacaggatgggtgtggtgggtatttcaggcacagacagattacgtatcctgcccaaggacccacagctaaataaaagccaagctttcagctctacggtgtgactccaaacctgtattcccagccattacactataattcctcaaagtctgggccatgtatttaggcagcacctagcttcaatcatcaatatatacttgctcatatatacagatttaaaatacatctttcacttcagctttaccatgcagcctctcagaacagttagaaacatacttccaaaatgtatgatttttatatcatttttatataggagttgttctcttagatttaggtgtccgaggaaggggaaaagagtatttttttttaactggtgagtattttttaatacagtaaaagtgctcatccttaactcccaatttaaaacactcagagcagccgggagtggtggctcatgcctgtaatcccaacattttgagaggccgaggcaggtggatcgcttgaggtcaggagtttgagaccagcctggccaacatggcgaaacctggtctctactaaaaatacaaaaattagccaggtgtggtggtgcatgcctgtaatcccagctactggggagcctgaagcaggagaatcacttgaacccaggaggcagaggttgcagtgaactgagatcacgccactacactccagcctgggcgacagagcgagactccatctcaaaaaataaataaactaaaaatttaaaaataactaaataagtaaaacactccgagctagcctgttacagctcctatttatgcacattcccgtttccgctgagaagaaccaaaaaaaaaaaaaaaaagactcagcagatctgactgcagacctttgaacttgcaaacagcagcaggttccttcctcaagctgtgggctctgggctcaacccactttgcctcccaactgacctagtcaatggcagctgagcaactgacttcttcctcgaatcattggaacaactccaagcaaatccttgtgcatccacagggaacagtacaacgttttgaaacaaggcagcgaaagtaaacatcattctacttgctgctaagcccgtagctctctgcccagcacacttcctgtgagtttttttttcttaagtttcctccagatctggggatttattttgcttttaaatctcagcagtggaaaggcagaagaggaaatcccagatgagacactactatttggcagtcttaagaattatggttgtattgtcgttttggtttaactttttaccacagatattttcaaacattctcaaaagtgcagagaatatatacgtgaacttccttgtatccattactcagctttgacaattatctcccatgtttactttgaaggcaggagaatttattaactcacagagaagaggtttcttaatgttaccattatcataatggctagtggtttctatgttttaactcacggctgtccaaccttttggcttccctgggccacgctggaagaactatcttgggccacacataaaatacactaccattaatgatgagctaaaaaaaaagaggcaggggggttgttcatgcataattttcatgatatctgccaccatagattaaagtcctcgcattcaaatgcttcaacacggttgtttaactgtttaatatatgactgcttgcctgcctgtactgcctttgcccactggctttcaactggggtgatttttgcccccatggggacatcggcaatgtctggagacatcttgactgtcacaacttgggagtggggggattgctggtgggtggagtccaggtatgccactgaacttgcttcaatgcacaggtgagacctcccgaaacagaattatgtggctcaaaatgtcaactgagctgctgttgaaaaatcctatcttagctaatatccccactttaggaatgaggaaattgaagcttggagtggttaacttgccttttataagtttcaacccaggcagtctgaatcagggaccctgcctgcttaaccattaccctatatacacctacgactagaaccagtcccctgatttgaattcaaacacgtcatttttccagacagacaaaaatgaggcccagagaggggaagagacttgcccaaggtcacacagtggaggagtagggctagaacccgggactcctgcgtcctggtccagtgttccctccgcgggctttgcttctgcctctacagaggacccaactggccagcgctggggaaagggcctaggggaagaggttcagctaccatcccgctgtccgctggggcagcctgacccaggcacaagactcctgtggggtcacctaagggcgccagggagaagagcgagggagggaggaagaaggaggcaggacagctggctccagctccacgtgctcccagcccctggctgggagcccacgtgagggtcgccctaagaagtcgggggcgaggagagagggtgcaaagccccggcccgggctggacggagagaagcgcggtggagacttccctgcgccccctctgggcccgtacggcccacctcccacaccagagtgctgcgccgcaaccccttactccgcgtcctctgacccctgatccctgccctctccctcgggccaagccgtcgcatccctcggattcttacacgcgccgccccagcaacccggaccgcgcgccggggtccgcaccgcgcagcctagcccgccggcgccgccgccaaaaccccgagcccgaagctgttgcagccgccgcagccgccgaagccgccgccacttcagccactgccaccagggcagctgcgccagctctcctatccaccgcctaccgtcctctcaaccccgctggccccgccccatttccccttcacagcgtcctactggctaactgggctaccgtgatgaactctgattggccaactatcacgtccttccgcaggtctcgcccgccgccgatgcggtactccctgcccgcctccttaagaaggggcgggacgaagaatccacgccccttactcctcccttgttccccgccttactcgttgagtccaacccagagggagtcccaagtctttccattggtgaaaggtcaaaatggcggtgcttctgattggtcagacttcaggaggtggggacaactgagcggaacaataaattgaatggtgaaaagaaaggtcagtcagacaccgagtctcgccttctgagattggcgggtaacctagcaacgcagggaccgcggcggtaactgtggctagggaaacctggagcggtcagagcaggtgagtagccagttgggaaagggtcgcggatcgggggagatgtggaatagggttcagccctctgtcctttggctccctgaggaattagaagcccccgctgcgatctcgtctcagcttcaggaccctgtccctcagctcctgccttagtctggacctttcgctccacaacctgcagggagccggcctccattctgcccttctacctgcccacttcatggctccactccctcatccctaaaacgaggaggacaacagtcaagcagagtcatatcgtagttaacttatttcaagtcaaacatgggagctgtgggtgggaggggagtttataagtcccctcccatttcacccaacggccatacgttcctcggtgagcaggcaatctcacttcagtgtttaaattaggtagttttgtttgtttgttttgttgttgttgttgttgtttttgccgagcatggtggctcacgcctgtaatcccagcactttgggaggccgaggcgggcagatcacttgaggtcaggagttctaggccagcctagccagtatggtgaaaccccatctctactgaaaatacaaaaattagctgagcatggaggcgcacctgtaatcccaactactcgggaggctaaggcacgagaatcacttgaacccgggagacttaggttgcagtaagccaagatagcgccattgcactccagcccgggcaacagagcaagactctgtctcaaataaataaataaattaggtaatttttattacaccacttttgcctttatcctaactttggaatttaactcccatctccatccttaagatgtgatctcattgtacctactgaagacagagagtttcttgtgatgattaaatgaggctaagggccgggcgcggtggctcagcctgtaatcccagcactttgggaggccgaggccagcagatcacctgggccagcagat

SEQ ID NO: 6219 - DNA, 6000 bp, Homo sapiens
caggctgcccttcctggaacctggggactctagatctgctcaatccagggatctcctgctgaagcataatttccttgttagaggaagtaacatattgctttgggaggcagaggcaagaggaggatcgcttgagcccaggagttcaaggttatagtgagttatgattacgccactgcactctagcctgggtgacagactgaggccctgtctcttaaaaaaaaaaaaagtttctaattttttaaaagggagtaacatcggttcctcagcactgggcccattttggggcaggattggcctgatccccaatatcaaacagacttaatggaatgttgcttcttccctggctcctgcccatgctgactgccagggttgctgggaggaatcagagcagcagcagcatcatccaccattaattaggccctggcagtgtgcccagggaatccccttgccgcactgtgatgtttggatgcattattaccctcattttgtagatggggctgtgcaagatcacacagtacatggcaaatttgcctagatccaaagcccagattctatccattcttctttctggccttctcaaagaaggaaaaggaagaggaattgatttcaggagagattgctcaccccctttgcttgggagtaaggtcatatccccttcccagacctgggtgtcctgggctcaggccccacctggtgtgagcccagccagctgggcagggctagactcatgaactcggcagacaaaggtcaccatttccacacgctgctcctcccggtggtgaaggccataagtctgtaatggacaaggggaccctcagcccagggttgggacaagtccgttcatccctcaggctggtcatccaacccccctgacccctgtgtgcagcttctcccacctggatctcaaagccgaaggtctggttatcctccttctccaacgtcagcactttcctgcaagagacacaggggtcaagacaattaggattaaaaggtgtagaagtcccatagcttgggcctccctggatattggcaactggtctagaacattccagcaggactctgtctccagtgacagctcagtctcatcacagattattggaatgtctttcccatacccaattgaaatcagcctcatggagccacagagaaccaatccagcctctagtggtgggagggaagcacagagaagggccggtcccctgaaggatgagccggctgagttttttagccccatcccagctttccagtgagccctacagtaccacttactgactagctaaggcccgaaattcagccacagcctggagcctcctctgttccacagctttggagagaggactggccccacccccagaggccagtcacgaggctcagcaagaccacagctgctcctcccagctatgctggggccagcccaccagatgtgggggctgggggaggggagcctcgaggccgccccttcccgcactgaaggcctgcccgctggacacaatggtctggagctgctccagatcctcgcctgctgggggagcccagagtttcctctgcccactcccacccccttccttcccgcccagccagaggcacagttaaagcagcctccaaaggccccttcaagtagctcagcctcggaaaggccctggagaccaggcttctccgcttccagcctgacccagagattcccccaaatgctgagcagcacctccccactccagctcgagcccctctcactctgaacagcaggcctttcccctctctgtactattggggcagggagcagggtggctgggagttccgcgtctaccccaatgttctagggttttttggaagggtcagcaaactttttctgcaaagggccaaatggtaaatactttaggctttctttgcaggccccttatgatctctgtcatatattgttatttgtttttatttttacaactctttaaaaattattagctcaagggccaaacaggccaatctggctagcaggtcagtttgctgatccattttagagaaagtcaagcccaaatcagggatgggacatgagtagagaagggaaactgtggggtcccagggcctggagtcagcacctacttctgcccacgctcagatccctcctaagagggctgccacaggctgggaccagaagaggactgacattctggaggcaggggcagccagccccaagcagctggacacagcctggctaaggtctgggcccgtggggtttgccaaggctaggagggctcaggggagcccaggaggcctgggttaggacgttccccatagactttgcctacaccccctcccaactcccacatccgttcatccagatctccccagggaggggtaactggcagggactgggggtgtgttgaagagcacctaatgactcaaaagtccctacctcctttctctgccacccccttcacacagccctcacccccacctgccctcactcccagcgggggagccatgtttaaaggctaggagaatgactaccctcgctaggctgagatgctgtcctggcaccccccaacccagcacctcacccctttggaccatggcaggggctgggtgttggtgactcaccgctgctgttcaggactctggctgagattcttccagcggaatcctgagccctgggcagtaagatggtcagaaggagcaggtaaggcgggactgtccttgagcagacactgagaggttaccctggacacagcgacccacttcctgtctgccccttcccagctccacatccacacctgttttggtgctggtggaactatttgccaagtgccactactggcaccactcctcaactttctctacaggccttaccttcatacctgggactgcagggacacaaccatcctcctgggttccagatccatgaacctctaagcccttgctggtttccacactggcagcaggtggggagatcattattctaaaatggtctccacccctagggcccatgtctgtagaggctcaggccatccagactcccaaagctgaggcaggggctcttccccagtgggattcagaggataggtgtcccctgggctcacctatcaaggtgctccgaggaccttctgccagttgggtctctccatctaatttctcagctacagacagtggcttgggagggctggggtcagggaccctgtcccgaagggctggcaatcccagccagaatgtggggtcagaggtgccaggtctcctaaggtacaggccgtttcaaggaccagttgtggatcccagctgcaggtgaccagctgtgcccagctatacctgggtctctctctccattgccatatattttgtgctttctgggacaaaacatcttagatgtcaaacttgtcagcaagtctcactaaaggaccgagactgggagttctttaggggtggtggtggggggtgtggaggaaggatgagagatgaaggttcctgtctcttcagggtccttgataaactaaagtagtctctcaccctccctaactttttggtcctgggaggaggtccagtcccagagcagcccttttctttggagcctgcacagcccagggcctttctgttctgtgcctttgctaaccctcccccaaagctgcccaaggcaaggaagagaaggttcagaaccagattggcctcaggggtggggacagttcccaaacggccagggaggaaggactgggcagcacagagagacccctttgtctttcaacatgattttcataaaatgcaaattctcaacaagctgttcattgtgtgggggctagctgggggccggggcgaaggagggcggctgggtgaggaaaggccaccaggcccctcttcttaacctggtgttgtgtaggttctgagcctcaggtctcctggggccagaggaagaggctggcagaggggactcagaggtgggcgcggcccgcatccttcctgccccgcgggcgccctgcgacccctcccactgcgtccggttccgacagaagtccagggagcagtggccctcgcgccccgtacgtcagacgtggggccaggcggcaggcccccagcccaggaatcggggagtcccctcggaagggtgtgctatccggagtcagcggctccccacgcacttcctcagagtgagaacgcacgcggcgcagccaccggcccgcttctcccaccgggggctctcggaccttcaacttgcctggggctgtctctgtccctcgggcgaggggctcctggggacccaggacacctggccacggggaggcggggcatggggggcagaaagccagatggagcgggtaggagaaggggggtgctgggaggagtcaaggagggagagagggggcgtgcatggggcgcggagttaagagccaccgagcctgggcgcggtgtgcaggcgagggccacggccttcgcagcagcggggaacgcggggagtcgaggcacccagcgggccggggaagaaggtgggggactccgcggacgccgaggagagggcactgcggagtcagcaggccctgtagggagtcggagaggggctgagcagatcctgaaggcgggcgggggacgcacctttcggcggggcagggtgcccccggacacggcgagcgcgcggtacagctcggcagggtgatagtcctccagcgccgcgtacagctcgtccgctgggggcccaggggtggcggctgcggcagggggtcccggggtcgggaccggagcggcgggcgcgacttccgagtcgggagtccgggcggcggggtccggggtggccgccgcctcctccttctgctgcagcttcctgagtcggcggagggtcatggctccggcgccggacgcccctcagagacggcgctggctcccctcggcggggctggcggcggctgggggatgccagccgggcgggccgcgggtcgcctccctttataggctccgagagcggggcggggttgggggcgggcggggagctgcctcgggtggcctcgcccccagcacggaggaccctccccgcgaggcgccgccgccctggagccccgcccacggcgctcgacggccggggaaactgcgggagctgggcgctcagtgggggaaaacgagccgcggacgcgaaggggcgggatgaggcccccggggcggggctcggggctcggggctgcgtgatacctggaggggtctgtgaagggacattgcgcaaggtttgaaatttagggacgaatagctctggcgattcatggagtggggcacggtaagaggtcactgtaagaagcctggggagtcggggaggtagggagagtcacggagatccaaggggctgcaggagactccagggcagggagagcggcagcggggctgcgcaggagtaggggtggaggcccgatggaggagggaggagactccctgaactcactgcgcagaagcccccagggagggagagggcccaggattttcccttgacgcagctgccccagaagagctgaaagaggctgccccctgttcgcacgtctaggaagaagggaagaggtggaaaccctgaaagcagtaggcttagttctggcctgtcccctccaaggggcttgagtgatccctgctggcaacacctttcctcagctcctgatgccggggtcagatcccccttcccaggagacagacgcttactgtggacttgactcaggaggttgggatgagcccaggctgagtgggagttcagggctggggggatggccatgctcagccgttctctgaccccatcttagggaccatcccccaggctgttaccatggctgccaggcggtaggagaggcgggaatggcccagccgaagtctctgtcgtcagtggtgcccgaataagaagtgagaggaggaagtggaaggcagcgtctggtgtctaaagagcggctagccaccacagggcgtcagcagcacaggctggggactccatgtcccaacacccatcggccaagaagcagaggcggcaatgcggtgcccttgtctgtcccctccctcctcccc

SEQ ID NO: 6220 - DNA, 6000 bp, Homo sapiens
ccttaagcccacactaaacttcaaccagactgacaggatcacgtgtagcctgtccagcatctttctacaagttagaagaaggcatcctttttttctgaatgattgcaactcagggtcagcagcttggtgaggggacagccccatcgtgtgaattttctccgggtagatgcatctcgtgccacagcacatggcttggcaagcagaacgtgtgtgctggatttcagatccatatacagcccccaagagggaagcaggggagtcctgtgactgggaggagaacatgtttgtaaagtgacgtaagactggcccaaaaagaaggaaaaggagaaagagaatcacctcttcaagtggttaagacaaaaagaggatagtcgaaaaaacttgggcaaaaagtaaatggtaggtctctcaaaggaggctcatgtgaacaccatgcatacttgttcaggtagaaaaaagaagtgagagcatactgtttacagtgtcccagatggaacactatggttattcatacttttctgtcctaagcatacaggggccacagggtggtactgggttcttcctacctctgagctcctctgcgttcttccttggggggatatctgattttctctttcactcatggctatcagtgggagctggtttggacctggccatcctaaagtcaatttgaggaaatgcacaatccggtagtatgaatacagtgtcactaggttatccccataacttatactgaaactttccaagccccaaaacagacacatccattgacattcccctagtggggcttttatgaaccctgagggaggttccagaaaactggcttagagtcattgatccctccctcaatagggatataattattattgtttgcatttgctcttggtagcttacatgattcaactaagtatccttattgacttctgatttttttttttttttttttttttttttgagacggagtctcgctctgtcacccgggctggagtgcagtggcacgatctcagctcactgcaacctccacctcccagattcacgccattctcctgcctcagcttcccgagtagctgggactacaggcgcccgccaccacgcccagctaattttttgtatttttctagagacggggtttcaccgtgttagccaggatggtctcgatctcctgacctcgtgatccacccgcctcggccttccaaagtgctaggattacaggcgtgagccaccgcgcccggccgacttctgatttttttaaatcttcctggaatcctggaggcaatgagcaaacaggatgaagggtaattaaacaggcttttagttataggaagctctgtggaaaaaaaaaaaaaaaaaaagcattggtgatctagaaacagggcccagaagactttttgaggttcaactcaggtggtagtgagtctctgacatcacaacatttcagagcgaataaaatgtgggagcaccaagaataacaagaaagatctttgcaaaaaaggaaagaggagtaaaccagatggctctggctggctcctcatggcacattgtgtcctagctgatggaaagaatagcagggctttgggtagaactcctgccattttacggcttgaggaggctgagccagtgtgatgagccttggggatgggtgagacagtcctggtgtggtctgggtgctctgccaaatagtgagggtggtgctggggtcaccaccctaggtacacaggcatcctcctggtgaagctgcaccaagcatatttgcatgggcaatgtccgacccacccaggtaagccagggcttgtggagctgatgatcttccctctgtttcatccactctcttgccccgtatcactcttcccttcatccctgtctgcctgtctttttctctctctttcctagacacacccactcatttattcatctatggaatttcgatgtatgaatagaaatgagtagtgaatgagacgttcatggaaacagcacttatgaaacttgctttccataaaactgtaccataataaaatatgatgagtcttatgaaggaggacgtggaaggtgctatgggtgccttaggactcctcctctctccttttattctctccttctctcccatcacactttcccttcttttcttcttgtctccatacaaactctttcactctctctccctggactccctcacttctctgctcctttcctgtcccagctcttttctcctctctcatctcccttctcactctcctcgctctttccctgatttcttctctcccttcctttttctcttcctgcctttccttccacccatctcccagcctcaccctgaaccctgacaatgctcagttctcattttaaaagacactttccccaactccagccccatgtgcacacacctgggcagtcacatccctgcccacacataaaacacctccctatggggttccagcatttgatccctgttacctgggagcagggggaaattgctgcttcccttgctgaagttggatgcacaggcacataaaattcagaggcattagacttccatggtgagccggaatcacaaacaaaccccagaatgtgttgaaatcttacccttaagtttaaatgaggaggttaaaatttggcacagagcagtttatagatcaccttctgcatctacttcacaaccctattaggtcaggttgataactatcactattgttatcatcatctccatttacagaccaggaacctgaggctgagagagagaagcacttgctcaaagtcacacaaccacaatggcacatcaggattcgatcttaggtcctctaacaaagccctcattagttcatgaaaggagcacaccgcaaaatggaagcgaggcccttgccccagagattgccacctctcttcaacagcccctaccacacataggcgtggggaaaggaaagagagatcagattgttactgtgtctgtgtagaaagaactagacataggagactccattttgttctgtactaagaaaaattcttctgccttgagatgctgttaatctgtaaccgtacccccaaccccgtgctccctgaaacatgtgctgtgtcgactcagggttaaatggattaagggctatgcaagatgtgctttgttaaacagatgcttgaaggcagcatgctcgttaagagtcatcaccactccctaatctcaagtacccagggacacaaaacactgcggaaggccacagggacctctgcctaggaaagccaggtattgtccaaggtttctccccatgtgaccatctgaaatatggcctcgtgggaagggaaagacctgactgtcccccagcccgacacccgtaaagggtctgtgctgaggaggattagtaaaagaggaaggaacgcctttctgcagttgagacaagaggaaggcatctgtctcctgcccgtccctgggcaatggaatgtctcggtgtaaaacccgattgtatattccatctactgagataggagaaaaccgccttagggctggaggtgggacatgcgggcagcaatactgctgtttaaggcattgagatgtttatgtgtatgcatatctaaagcacagcacttaattctttaccttgtctatgatgcagagacctttgttcacgtgtttatctgctgaccttctctccactattatcctatgaccctgacacatccccctctccgagaaacacccaagaatgatcaataaatactaagggaactcagaggctggcgggatcctccgtatgctgaacgctggtcccctgggcccccttatttctctctacatactttgtttctgtgtctttttctcttccaaagtctctcgttccacctaacgagaaacacccacaggtgtggaggtgcaacccaccccttcaataggcctaaggacaggtctatggcccttgggattcttattcttctcgttgcctgcacatatgtagatataatgataatgcatgtgcacaagcccacacacgcatacacacacacatgctcacctcccccatactgcttgctctaatttccacttctactcacttcattctcaatacccatctcccatttgaaggcacagaattcagtgtcagatgcttcaatgagcgactgagatgaaaatgtgacctctcacccatttttccttccatatccctttttcctaagtgccccaaacacacacacccacacacacaccttccaggttagcattgtaaacttactcagatcctgcaattccacctccaagtgggagagtctctttatcactgccccgtagcgtttattcagatgtaaaggaagctccctgtggagaccacccgtaaacaggttttgtaaagtccccttgctagaaaataccagaaggagattgacagcaatggccagagtcagcccaatgaagagggctttggggagtttcctccaaaacatcatcttcttcctgggggtcgtccactccctgtgggactgagtgtgtcactgctggagcaggttaagaatcagaaccagcctagcttttgtgggaaagagagttctaggtgccagttgagttggtctcccctgtgtgagacacccatgggaagccacgggtggcctctgaggagcaaagtctccttattgccttctttgtctttatgccccgagaggataaccgctcagcggctttccacaggttgctcagcggctttccacaggttgctcagggagataacactcccttgaagcagaggagtataatcaaacatcttggctcctcctgaaacccactcccacccatttcagtcattaaagatcttaagtagtttagacacacgcctttgctcaaggaaattcacagaaaccgccactgttacacatcttatcgaatgactcactgattaatccttttcctcatcccttcctccccttcccatctgccctaagaacaaagagcttgtaaaccaataaattgggtggagcccagagctctgggccgtgagcaagcctccaacgctctggtcccctggacctgccttttaaacgcttgttctgtctctttctaactcctttgtctccgccggactcggggtatccgctgggtggtgtggggctggtttccccaacagctttctctccacccagcttcatagatgacaccctgcctgctaggccagatgttctccggccaagaacactattatagctgcctggcttctccctgagcagcgtcaggtgtgaggagtgcgcatggcagctgcccagtgacaggtaagtcacctggacacaccttgtactgtctcagaagtcagaagaatgcttgctcctgcagctagctcaggctgcctgggtgagaggcttttctctatatatgtttgtttgatgtttaatgttctctctccctggaaaaaccacctgggagactctgatagggcatgtgaggtctggtcctgtgggtataagaaggggataaataggatgaagaagaaatcacgaagcaagaagtctctgtacacttagatccttgcttttttggagagctgggatctaagatgtctttttacctaactctacagggttttggacatagtaggtgtgcaacaaatgcttgtcccacaaacttaaggacagactttcttgctagttcctaggacttcactgcctagaagcaggtggagaagagctggaggcggtgcccggggttgagcctcaggggatgactccgattcactggtctctgtcctttgcttgtcctctgcacaacttcatacactgggcttctgccctgccccagcttccagtaactcctttgcctccacacctcacacttataatatgttttggacaaatcaccagtgatcatcattgtagaataaacacataaaattgttccccaaggctaaaagttcaaagttctcagtctactgtcaatcccgtcaaaatcacagcttccaccccggcctggctctttggactatttactacgtcccaaacacagcacatggtgacatgtgctgaggcggacatgtggat

SEQ ID NO: 6221 - DNA, 6000 bp, Homo sapiens
aaatattacgtaaatttagttaataaagcagtaacaaagtgtgagagaactgactcgaattatgaaagaagttctacttggctaaaatgctatcaaacagcatcacatgctacagagaactccttcgtgaaaataagagtctataatagatgcagcaaacttcattgttgtcttacttaaataaattgctacagccaaccccagcctttagtaaccacaaccctgatcagtcggcagccatcaatgctgaggcaagaccctccagaggcaaaaagattatgacatgctgaaggctcagatgattgttagcattttttagcaagaaggtatttttaaattaaggtatatacattttgtttagacacaatgctattgtacaggaaatacacaacagtataatgtaacataacttttatatgcactgggaagccaaagtatttctgactcactttattggatattagctttctctcagcagtctggaaccaaacctgcactatctctgaggtatgcctgtatttagaataatcaaaatcctccccgtccattccaccattttctatccctttatcttgctttatttttcttcttagaatttatcacttccttctctatcagggtagtcataggcaccaagagtgcctgtagtataatagctactcgagaaatatttcagtgaataaatgagtcatgaagaactactacatcttcccagaaaaaagctacatattagcctgtaacttgttttgttagagaaaaaatacttgaataaaagaatatgtctggtcaggcacagtggctcgctcatggctgtaatcccagcattttgggaggccgaggcaggtggatcaccagagatcaggagttcaagaccagtctggccaacatggcgaaaccctgtctctacaaaaatacaaaaaaattatgccgggctcgttggctcaagcctgtaatcccagcactttgggaggccgaggcgggcagatcacctgaggtcgggagttcaagaccagcctgaccaacatggagaaaccccatctctactaaaaatacaaaattagccgggcatggtggctcatgcctgtaatcccagctactcgggaggctgaggcagaagaatcgtttgaacccaggaggcggaggttgcggtgagccgagatcacaccattgcgctctagcctgggcaacaagagtgaaactccatctcaaaaaaaaaaaaaacagtgttgactaagtatgctctgcttctctaagtgtcacattaaaatgttcagaaaaaatctgggagttggagatgcaaagcattcaagatgcgggtaagttcccagaaaataagtttagtgagtctttccagaggtgagcacatgtggcaaattaggcattacgtaacttaaccaccagatgctgcctatcctaccctccagcccaatccaaaggctcatatgttgctgaatacattttcttgatctttatcacagtatgcaagtacaatgactcagttacactctatagtctgctctagaaaaagttattattactgtgtacattcatatattactctatgttactcttcacgcgtatatagccatggttctttccaaggaaattcccgcaaaaccagttgcatatgattattacggaggcctgtttgcaattacaatgctgatcataaatattttatcattcgtcttgttcttgataatattaaagcacaaaaggctgcaaatggcaaagagtaattgcttatgaataaaaagattttgggaatgtaccaagtctgttggctgtaacagtctctcccaccaccacttacgtatattacacattatcaagacatgaaaagtttaggaagatgataggtactgtgattatcaacataactctgacaaaccaatttgatatctgacatcagttttaatactcacattctgtctgttgtccatctctctgctatcctaggaattgactccctctccaatttctcttcaaggtactgcttcctgtaaattgtaattgtctagttattcatttactccatctacttaagctccttgagggaagaggctgtgatttagccccctcgccaatggacactccaataaatacttctggaagaaaagtgaaaatttatataattctattgatgttttagattaactcaattctgggatcctcaacaaagtttattctactcattcagtagccattgagaagcattttttcaaataagggttctggggagagacagctgaaggtaaggtaaaaatgtctctcctatattttgagttgtttctctgtcaccaactagcagtttccccatctgcaaaatgagcaaggattggattaggtaatcttgctgtcataaaattctgtgatttaatgtggtttaccttgccatataaaatttaaaacacttagaacaagccacctctcctcatagcatcaccttagcctaaactgcttcagtgagccacagtgaagttggaagtcgtgattctgcttaaccagttaccaaatgtgagtctgtttcctcctctaccagctctgctgacttggactgatagttctgaaggtctgctgagatacgttatgttgaacacctgtgttatttcctgagtctattaggaggaggagaattaggacagactgtcccttccactattccacatcctccttatttcattttcatttctctctgctaccttccccaccctgcgcctcactgtttttgttcctgtatcagctagttcttatcttctaggtcattcacacttggaaaaaacaaataaagtcaaaccaaaaaaaacctcagaactcttttaactcaaataaatatacttttcaaaaaaagtaaagtagtatggtcagcccagctccaagaacccagtgaagcccccacccacctgaagccaaaatgttcagcaagtggaccaaagccaagaccaccaagaagcgaccacagcacaaggggccacatccaatgtcttcgtgatgttcgaccagttccacatccaggagtttaaggaggctttcaacatgattgaccagaaccatgatggcttcaatgacaagggggacagcacgacaagctggcttcaccgcggaagaaccccatggatgaatacctgcagggcatgatgagcgaggccccagggcccatcaacttcaccacttccctcaccatgtttggggagaagctgaatggaacagacccccaggatgtgatccaaaacgccttcacctgcttcaacgaggaatcctcaggtttcattcatgaggaccacctccaggagctgctcaccaccatgggtgacagcttcacagatgaagaagtggatgagatgtactgggaggcacccattgataaaaaaagacaagttcaactaggtggagttcacctgcatcctcatacatggcgccaagggcaaagatgactaggccaccccagccctcgcgacaccctggcccccccgccagtcatctccccacccccggcacacactggtctgtaccagctctctgcccacgaccttctctcaggggatcctccctttgagggcttcgggtcccagctcccagtggagaaatcacgccaagagaagtgcagtgcaggactgaggcaggtgttctcactgtgaccctagggccctgggctggagtctctgacccctccagggaaagaccgccttatgaagagatgggcctccaggacctggaggtactgagagaaagcccccaagacagccattcctgggctgctccccaaggaggaagggaacctgtgtgcccccaggaggaagggacccttagtcctgagatccaataccatttcacatgcatccccacccaaacacaagttcaccaaagtcccctctcagaggacaggacactagactcctcccctacaccctgttgagacaccagcgcacacccacccagagcagccacccatcgtgggagtgtgctcaagaagccatctgtcccaggggaggcagaatctccaatagagggctgagcatggaaaaaaaacaaaaaaaagaaaaagaaaaaaaaagtaaggtactatttatttatctgtaaaattaactcagattaattcttcttaaaaatcaatggaaattctaaatttagtctgtgtattaaactgggacaaaactaataacagtattttaccaaggacacttggccttactccccttctgtcacacttcagacataaatcactgaatgaatccagcactgaataaatgaatgatccataatttcctaagacaattccaattttcatcttgcacaaatctacaaagctgatgcacccgcacagcacttgaactcctggtaggtatctttcaaggccaaggcagttcctcctcccgaatccagttccctccgcctggatcatgctcccaaggctccctcatttcattcaggtctcctgccaaaagacacttcctcacaaaggcctctcagaccgaccccttccccactcccaacttcacagtccactcccctagccctactacatttttattcatgaagatttacggcattttgttacgtatctatacattttcttgtctgtctcttccctagaatatacagtccagcaaggcaagggctggggtggcttcgtttgctgtgggatcccagcacctagagcggagcccaggacatagtaggtgctcagtaaatcacaaatctcttctccaaggctccaaggctagtttcccagagccgcagctctcttctttcttagcccggcccacctccgagtagccgcccacctctactctagctcggccacctctaccccagctcaggtcctcattcccgcaccccccggccgcagggacggcgcggcgcacccacctcccagaccccgcgactgcggttgggccccgcggcttcgctcaaccacgcacctcccgggccgctgcgcccccgccggccccgcctgcagccgttgggacccactaactgcctcgaaaagcctaggattcgactttgaatggtccgttaatgtggttacaaaacgtgactcggttcatcgggagccctccgtaagcaagacaagcacccacctgcggtcagagcaggggtccggctcgcggtcggggttgtccggcccctcccggcttctcacctgcgcaccgcacggtccagccccggcggctgctggggatccctccgagcgccccctcaggcgtcttcctgcgaccgggcgggggaactctttacggggaaacagttttgggacccaccacccttggcgccgccgttaggagggtgtgaacgtatctattttcaaagatacccgagcccctcaccgcctgcagcagggagatagtgcccgggctatccccgcgggcgggccggctgggctgggaaggcccagggcgagatcctgtaaagagttatttcgggccgcgcacggtggctcacacctgtaatcctagcacttttggaggccgaggagagcggataacttgaggtcaggggttcgagaccagcctggccaacatggcgaaacccagtctttactaaaaataacaaaattagggggcttggcggtgcgctcctatagtcccaactgcttgggaggctgagacaggagaatcgcttgaacccaggaggcggaggttacagtgagctgaactccgccattgcactccagcctgggtaacagctcaagattccgtctcaaaaaacaaacaaacaaacaaacaaacaaacaaacaaacaaaacagttatttcagactcaggagctctttttggatgaaaagccccgcggtcgttctctccacctcctggaaaagactctctaggttttcggctttggagtaataaagatcatcccctgctgccccattggtgccatccagggtaaggcccctgcagacagcacgaaggtgttttggagagattgttctcccctagcccaagcataaggcttaccttggaattacctggagccttaccacgacagcatggccttcagt

SEQ ID NO: 6222 - DNA, 6000 bp, Homo sapiens
aatcacttgaacccaggaggcggaggttgtggtgagccaagatcgagccattgcactccagcctgggcaataagagtaaaactccatatcgaaaaaaaaaaaaaaaagcatgtgatagtagtatctgtgccaaacatgcttaacctaaatccagtcatgaggaaatgaggaaaacaatcagacaaatctaaatgttgggatactctacaagaccactagcctggacccttcaaaaatgtcaattctatgaaacatgttctagattaaaacaaggaacagcacaactaaatgcactgcatgattcttgtttgaattgtgtacttagaaaaagcagtaaaaaaaaaaatattgggacaagtggagaaatttgaatttggagacatttaattattttttaaagagaagggtcttaggttgggcacagtggctcacgcctgtaatcccaacactttgggaggccgagatgggtggatcacctgaggtcaggagttcaagaccagcctggccaatatggtgaaaccccatctctactaaaaatacaaaaattagctggtgtggtggcgggcgtctataatcccagctacttgggagactgaggcacaagaatcacttgaacctgggaggcagaggttgcagtgagccaagatcatgccactgcactccagcctgggagacagaatgagactgttaaaaaaaaaaaaaaaaaaagagggtctcgctctctatgttgcccagacaggactcaaactcctgggctcaagcaatcctcctgcctcagtctcctgagtagctggactacaggtgtgcaccaccatgccctggactttatagttgagactattatcatatcaattaaaaaatatctaaaagtatgaagatctgtggcatactaggcagtcgtgtggggagatagggacagtctgccctagcagagaggagtattttatcactgataatattcagaattgccagtgtcgggagatggtgagactataaagccatctgacttttagctgattttatttttgttctgaaatattttacagtctgcactcccttattgcctgcgctacgggtagactacttccccactttggtttgtttctgacatgatggctttgtaactatgaaggattacatccttgtccttcattgtaaactaatacatgctatggatgtatttggggtttaaacatgcgtttcggggttcaaacatgcgtttggggttcaagtgttatcttctgcaacttactctcagttcagaggaaaatacacacgtacacatatacacacatgaggagtcgggggagagagaatgtggcaaattgttaacaactggtggatctaggtgtagggtatataggtgttcattatattattatttcacctttttttgtaggtttggaataaaaagagagaaatacctacgcatgccaggagtatggtagacactggacagacatgaagacctttttctaatgggtcaggatagatttaggttggaccacagagaggttagagtgttctggggttttccaaggataggacggttgcccctaattttctctggacttggctgtttcttcttggagactcaaagaagcagggcacagagtattggattaatgggctctggggaaccctgtcatcatgttctcaatttcttgtgccctcgaggatgtgctgagctggagagggcaagtactgggtttactaataagatcatgaacaaatgatgcatccctgagctttacccctgaagcaccagagcagcctagcatttcactgggagaaaaccgggttttggctcgataagactacagtggacagcacccatgtacagaatagcatcatgtgtcttatttcctcatggcagcccagtgagatgagaacgatctccattttggaaataacacaggttgtctgtgtgcctggggacgttcaggtaggggctgcgaagcattctcttgtggactcagggtttttgttgttgttgttgtttttgagacggtgtctcactcagctgcccaggctggagtgcagtggcgcaatctcggctcactgcaaccaccgtctctcaggttcaagtgattctcccgtctcagtctcctgagtagctgggattacaggcacctgccatcatgcccggctaatttctgtattttagtagagagggggtttcaccatgttggccaggctggtcttgaactcctgacctcaggtgatccacctgccttggcctcccaaagtgctgggattacaggcatgggccttcgcacctggcctgactcaggggtttttaggaagaaaggaccaaggcctaggggtgccctgaggtgaccagtgtggatggaggtggatttgttccctttcttcttctgtgccccatatcttaccactttagaaaagcaaaactttctgtgacttgcttttcttttcttttcttttttttttttgagatggagtttcgctcttgttgcccaggctgaagtgccatggtgtgatctcggctcaccgcaacctctgccttccgggttcaagcgattctcctgcctcagcctccctcgtagctgggattacaggcacccgccaccatgcccggctaattttggtattagtagagacggggtttcaccgtgttgaccaggctgatctcaaactcctgacctcaggtgatccaccgacctcggtatcccaaaattctggaattacaggcgtgagccaccacacctggccttgcttttcattttcttacctgcagttcgcacagtcccctgggggctcagtggcaagttcagcgtcgggtgccagagcgcctcattcttggtgaccctgggagtcttcatcaccaaggagatgctaggtccccctccagagacctgcatgttggccatgaaccaagctgctgtcttaacagtggtctctgtcatctggagaaagtagcgggagatctcacaggtcacctccttcccactgcagtcagcatggagcaaggcctcggcctggggaatctggaccaggtccactggggagaagcagggcacacacagagggcaaattagcgtgagaacaccagggccaacgggaggcagtatgtgtggctgtaatcgggacctgggctgtcctggtggagggagcccgggaggaccaaggacacaggtggaaggcttttacctgaggcctcaaagataataggtgggtcatcttgggccagtgtgcccccttggaaatcggtgaagtcctccagggagccatcgtccagcactggcacctgcttcagcacaagggaggcccttgccctgtcctcactgctggcgagagctccacggtgcgcaccgtccttcgccaggaagcagtctaggaccacgtccactgcccgccactgcccctctgctgggtggggctctgcagacaaaggctggggtgagcaccgccttccccagaaagctactccacacttgcttcctgcccccgccctcaagctgtggagtcatcaaagggtaaaagttgccatccaagatcctagctgtttctgtgtccctctattctcccgtcatccccaaaccagctttctggagagcacctgctagtccaggcaaatacttcttggtgagagttaaagtcctggatttgccttgctcagaggagtttatgcttgcatttccaactgttgaataaaagactatcttttcagtcaaaggaattctcagaaaacaagcaagtgccaccgcagagagaggagactggacagttactgttgctggggcactgacagcctgcactgctttctcccatttcgggtagccttcccctcccccgccttcaaggtcaccttccaagtgatttcctcacctggggagtcctttcctcttctgaagtgtcagctcccaggccagtgccctctctgtaggacagtggctcctgaccacagccacagaggcagcccctctttagcattttccctgtggagtccccaccctccctccacacacactattggttccttcctttgccagccgctgagcctttcccctgttgggcttagaaggcgatggggtcatccccggcccctttgctcttctggaatctcggggagggtggcaccctggggcttcagtagctcttctcccagccagctctccccgactcccagactcactggtttctgctgctccagatagagccaggcagagcagcaggcaccagccctcctgtgtgcccatggaggctgctctcgagttccctccttgcccaccgcccttctccacagtcctacgctgcttgcgaggcccggcggaagaagggggctctccaagcacacctggcagcctgcagcctttaggtttcttccctgttccctctgctgccgacttttctttcactttcacttagagcaagatggcagcccgcgtccctgtgtgaagccgtctgcagcagctgccagagccctgcttgctgtttcctttctcaccacccacctcacccggaaatcccctggtgatttcaagacctgacctctgcacccttttgctccccacctgtcccaaaaaagtggagctataactgtgggaaaaggggatctgaagtcagacacaggatccacagtagcctggggacctttctcacccccgcccttaagcaggccccaacataaccggctgagaaacctcctctgccagatcctgacctgagccaggaggcggccaggaaactggattttgggactgggatttcagagaggaagctggagagctgcagggtggtcatctgtcactttattttgcccgtcttgtagcatgtgggtctttcgcagcaggaagtgtgttttacaaccagagcccccgccctcctgcagcgcaggcgcagctggctgggctcctgcttcccactctccacctcatccatatttgtcctcgtccctgccagtctcgaaaaggcactctgtcacgtgtacacaggaaagggccctgacaagaggatgggactgcagttgtggctgccaggtctcactctcccttggatggtcggcggggtgggggtggaggccagggctgtagtgcagctcccgcaggtgctggctcagggggagcaggcaggctccggttttcggtaatcctcctggatggggatggtgctgccctcctcctccctggggcagctgtaatgacaaggctctgcaggctccacaggactttctcctttgtctgcagaaggagatccgatgagtcttggccagcagtgggggcagggggagacgggagaaggagatgggtagaggcgggtgcgcttgggggaggggtgtcaggagcacgccagctaaggggagagaaggggtaggaccaaggctggtgaagtggagctggtgggtttcagtgagattccaggcgtgggcagtggggttgagccagtggggtgtggtgcaggggcaggaccggaggcctgtgttctgtctcttacttgatctatatttccttcgttgatggaggaacagggccccggccagggtgaaaacaaggaacattccagagaagatcacaaggatgcgaataaaatcggagctgcacagggatctttgggctgtaataggaggggacacacaggggttaggggagggtctagcccttggctccctcagcccagccctcctgtcaccttgcctctcccctttcccccaccttattctatcccacccgccaccgttggccaactcctctcctaaacagtggactctgctttttcccctcctcttatccctaatcctaggagctttctgtctggcttccctcctggcccctcgtgtatgcattctctctagcggtggggattaaggagaaaactcacgtggccagtgggtagagagagtccgggcaggcagctgcctgaagtcagccagagtctgcatgtgcccagctgtcctggcctccagcatctctggaaaaacagagacagaatgagtagcagcaggggaccccatagggcacatctgaaggcctgagaggt

SEQ ID NO: 6223 - DNA, 6000 bp, Homo sapiens
actaaagaatcaacgaagaacataaaaactgaccattcagatttaattagatattggacactattgagtataccgtattctgaaaaatacaaatacaaaaattcgattcgattacctgtcctatgtccccatttataacagaaccatttcttgtgttaagatataaatgaaatgtgatggaccacgagagttggtaattgtcaaaactggccagtaagtatatcattctctctactttcctatgtttgataatttctataataaaaaattttaacaagacaacaatatatgtggtatgtatagataacatttctaaaagctaaaaagtgaattttttaaagttatttatctttatgaaaattattcccataaccattgtatgttattttcctggcaatgtcacctcagattccacctagtcccaaataagctactattagtacctttattacatatcatgacagctactagaaaataattattcccttccatctggtcaatactcttgcccgagatgcaaaaacctaaatgtttgtttctgctttctgatcctcagtccttttattgttttttgctcatccattacaaaattccagaataaaaaagtgaaaacatcaattttactgtattcatgtgtaaaatgtaagggaaaaaaaccaaatattattttgttcaatattacagaagaccaatagttataagtggccgttccttttaaaactcatttcccatggtaagagactgttgcatctgaaatgaagttaacatgtctgtcagtcaaaggaaattagtaaatcttactctgaaatcaaggaatctatgaaagtatatataacaacatataattactctacatgcaacaatctaatagctcaaataatgtcctttatcccggggccatattccatagttcgacagagaacacatagcagtaaggggataaaacacctttcatctcagagtttttggctaattttagtttaataaagacttatctacagctcaatagccaatgctttacattgtctatagagaaattgcaagtgttgaatgaaaccttaaatgcagatagaagggcagtaatattttgcggtttgtaagtaagactatatgtaataatatccacatcttaattcattacttgggagctaaatcccttttctcatgttacatcaaaaaaggaggctgtgcctaaagagacagtgttccttatacttatgatttgggaaggaagggaagggaaagaaatctcaactgtcactacagtaactcttttctaagtattaaaatctccatttatttttacatgagatgcacctgagaggagccatgtatacaaaccactttttctaacatggtctttattaaactttgaatataagtacacctgctcgaagtgttcatctatattatttaagaacaagcaactgtaaaacagtaaaatcacaaaaggtaagttgttggaagacaacaaaaaagaattactatatctgatcctgcgtgtttattttagaatctgttaataggcctacagctaaaaaaaaaaaaaaaattgtaaagccactgtcatactggtaggtacctttatttggtggcaatggctagttcaaaccacctattaaaagcagctattactttccttcttttaccaagaatatccagaccatcaatattattataaacacaaatcaaaactagtttctcatctcatctcagaatgctaaaatcccaagcttcaataaaaaaaagatttcccatacaattgcagaaatttctctcaaaagagaaatgagagaatacagaaaaatgaagacaattcccccttacacgtcaaaatggggatgccaataatgacagctgcgataaaaatcaagaaggcgtaccccgaattttcaccattttaataaaagaaaatcacgaaattttaaattaaaggtggcgctctgtcctcaactcacccgaatgtgactcacttttgcagactatatggtaggaaattaacagttacttttcaaagatctttgcagttacacccaagccaaaatcaggacagagatccacccttaattacagcaatttagctgtcttatctaaagcaaggtaaaaactaaaacgtcctcctgaaatcatagctaaataagcccatttcatatactagctatcaaaggttcccaattaaaaaaaaaatgtttctatttacttcaaatttgaactcaccaggaggataaagaaaaagagaggggaggaggaggacccaaatgaaacgcacaagtacaaaaagcagattctcctccaatccctcttaattcccccaatccacccctgccacacacaaggacagggagtctcgggaaggctggcatcggggcaagtggtgaaggccctccattcactcacgtgggccaccatccaaagggttacacaccctctgccagatgagagcctcatacaaaccaggcccttacaagtacttcttattataaaatacacccacgctgaacaaaagccttattttaaaataagactgtcctcaggtgggggaggttaaacacaacaaaggcttccatgttgacaggcagacaagttcagatatatgcatatacctacacacgtatgaaaaaaatctatgtagctaatttatcacgaacagcaatcgataccaacagaagccattagattattaataaaccaagaaaagtagcgggcacagaagcgaaaggtggctgtctgcagcgctctaacccaaagaaaaggtaaatatcagcctgtcgaggagggtcgagccctccaagtacctgcagacccctttaacccacccggacgccctgccctcccctccgagccaagcagcgcacagggtgcgagcactcccagcgctgcgagtcccgcagaaaactggtgaatgaaatgcgcacagagaccaacctggctggtgaccgcggcgcagaaccaggggtcgctaaccagcttagccacaggattctcccgcaggatgggataaagagagcacagcccccaccccacacccctgccactggaacgcggtcctcctacagactccttcctcaaaaagggaggtgggggcgcaggcttttttctcttaaactaagtgaataaacacgaatcggaaacaactgtgaacatcctggggggccagacggaaggcgtgaggagaaagaccaggcggctctccaactcccgaggaatcaccgtcctgacacgccaacaatcaaccaccagggccaggggccgaccaggggcccccgctcccctcccgcagtgcgtctggggggccgaggccaaggattagaggggtgaccctcccggggcgcggggagagggagtgccgggcacggtgccctcaaggtcaccacgcgccgtggcgggggcgaccggtggcgggatgggctgtggcgcggccgaggcggcttcgtgaagccgaagacctgcgggtgtagaccagaagccccaacaagccccatccctcgggcccggagcagcgactcccagactgacccggcgctgaggtgcacggcgagaagcccgctcaccttcacaatctcccggcaagaggcaacctgcgaggggccccgaccgcccccgtcagcttctcccgaatccggcgcaacccgctgcgcacccagctatcaggatccccgccgcgacgcccgacctccgtgctccgcctggcctcccccgcaggtgacctgccccgccgcccccggccgcgggcgggcggcggccgccactcacctcgcccggcagtgggaaccattttccgagggggaaggaaaggcaggctgcgggagggtcgcggggcgttaaggggcagcgggaaacgcagaggatgggggctccgtcctcagcgcgtccgcagccggctcgcagggctcggggcgccacgcggaggtgcagctgcacctcggggatggggcggccaaggagccgagaggctcggcgtccaccagccggggctccctactcacgctgcactgcgaggaggcggcggcggcagcgaaggaggaggaggcggcgcccggccgtccccgcccagagcccggcagccaccgagtggccgcccgcgtccccgcaggacccgcctcctcggctccgcagagcggcacacagggcgcgccgcgctcgctcggcacgggcagctcagccggcctcacgccgccgtccgcaacagcagccgcgggcggggtgcagccacctccgtgagcgccgcagcccgccccactcggggcggggcccgcgggcaccggagagcggacggccgagcacgagggggctgcgcgcagctccgggcagggaccccgtctgcaccgggtggcctgcaagattgccggggtaggcagggggaggagaacgctcacccgttccggtctggcgctcccttttctccacacccacacgcctcccgctccacgctggcggcgcagctgctcccgctgccacagccgccaccgccgccgaagctcgcgccgccgccgctgccgccttggctgagcgcggtcacgtgacgcgatccgcggggagcctgggggcgggcgagtgcgcgcgcgcgcgcgcggaggaaccgcggctcggaccgggactgggagctgagcggcactgggagggcgtttaaggggaggacccggcgagcgcgccctcggctggcgagcgcgcgcctggcgattagaacttgccgcgcggtcgggaaagggtggccggagtgaggggcggaggtggggacttgcgcctccgcacgcccctccctttcttccttcccctgagcgccttggcttgccgctgcccccgccccctccagcgcgccccttccctcctgccgcagcctgcgattggctgagaggctctgacgtccgtgtttccatgacgtgttggtgcaggagggagcggcgggggaggagggggtggccaggcgcgcggggaggtgactccgtcagtcacagctgctgtttcggcgcggggccgggccgctgccgcgacgtgtggaggcaggagagcgatgattgccgcaggagaagtgcgggcgcccttcacctggggcccctcccgaaccgcccccgggcccatgcccctccagggcccaggagcgagccagcgggagggcgagggcgagcgctcctggcgaggacagattaaggcgaacccccagtcagcggacatttgagcggctcctcgccgcgtctctgcccccactccaaaccggactcgacgcctgtcccgggccgtgacgcacgcaccggaggaaaaagtgcttctcggctcgctccctctttggggaagagagctcactccccatgcgggcgcgggacactccatctctgttcctgccggtcgggtccgcaaacaccggggatcccagctgcggcgcccaaagggttaacgcaggcgttcggccagtgcaaaccggcctcgcaggatccgcgcttaaaatccgggtgttttcattttgggtttgtttcttctactatgccaagctggtggctctcttttaattctcttgtaacatctcaaccctgcacccatctttcctgaggggaaaaggaaacgggataacttgcggtatttcgatgctcaaaggtaaccggcggctctgctccaaccttcaagagattttgcaagttgaaaaaaaaaaaaaaaccatccttcgtaacatctacttaaaaaaaaaaaagcaagttttccttcttgtacacgcatatacacagtaaagatgtgtatcttacctaagataccgcgcttcatcttcatctaatctttatttgaactcaccgtcgccactggcccagagaccttgtcagtgttattttcagtatcagttaatcagaacaaaaagataagttctgcaatcttctttctcttaattccagaactggaaaattaatatttatatagcctcctcaaaagcatacaggcaataggaagtatggtattatgttcacgatctgatgatagcatttgttttaaaatattttaaaagattagacacaa

SEQ ID NO: 6224 - DNA, 6000 bp, Homo sapiens
ttgcaacaccctctttgggttccattaatttgccagggcagcgcacagaatttttgggttcttatggaggctttattacataggcatgattgattaaatcattagccactggtgatcagcttaaccttcagcctggctcttacccctcttcaggttggtagatggggctggaagtccaaacctttaatcctgccttggtctttccagtgaccagcccccatcaggaagctacctaggggctgccagccatctgtcaacttattagcatacaaaaagacacttaccactttgaaaattccaaaagttttaggagttgcatgccaagaaactggaagaatgccttatatatttcacaatatcacagtctggttctaaggaacttttctcctggaagacacaggtatgtcttactcattttcagtctcccaacacctgacccagcacctaatcctgaaactagcacagaaggattgctcaatcaatgtttatgaaggaagactggggctagtatcagatttataggtgattaaacctgaagtaggtaataaggaaagagaggtgggtgtgggaagataagtctatgtaaaaatgtgacagttgaaaagggagccaatagctggatcattatctctcaaaggtaatggaccatgtcctctgtctacccctcaatgacatacatgaccattagtgatggggatcagacagtaaactaccataaacagactaggaactcaaagcaaccaaccaaccatccacaaacaaaacctcattatctgaacagtctgaatagttcctgatagtcttttttggaaccacttttcctccttcagcaaagcttgaccacagagaacagaattgaagaaacaaaataaagcagcatactaatctgatttctgcattctggctacaaaagctgttcctatagcattctacatgaacaagaagagatgctgaatttaatccgctgatgagggggcgaaaagcagccaaggacactcttttgcacacttggcagggtagcacacaacctaactcccaggggcttgcaacaatatgtgatctccaccagcacaacaggggcttcaaaccacacatttcccactactactgcctggatgtggcttcagtggttggttgttggctctgctttagaaataagtggcctattgcaaaaatgctctaatgccaacaggttgccacacaagcacgcctttggaaataatttctgctggctgtaacttaaacaaacaaggaaaagacatccatagtgagatgtactatccttgattctccagatcagttcattctaaactaggaggcaacactgacataaagtactgaacagccaggcatggtggctcacacctgtaatcccagcactttgggaagccgaggtaggataatcacttaagctcaggagtttgaaaccagtctgggcaacagtgagaccttgtctctaccaaaaaaaaaaaaaaaaaaaaaattggccaggcatggtgtcacaaggcctgtggtcccagctactcaagaggctaaggttggagaattgcttgagcctgggaagtcaaggctgcagtgagctgtgactgcgtcactgcactccagcctgacagagggagaccctgtctctaaatgaataaataaaagtacaataaaaatacagtgtttcaaaagtaagcaggaacccactgtttaaaaggctctaaattccagctactagagggcacatttccatatacatacataaagcatctctatgatataatcagggaccccatccagttagaaagtttttttttggggggagggggaggtctcttgcaaattaggccattataacgcccaatggtatacccaggaactcgtgtcaaaataattctaaggctgggtacagtggctcatgcctgtaatcccagagctttgggaagcaaaggcagcagaatggctagaggccaggagttcaagactgcagcgaactatgatcttgccactacactctagcctaggtgacagagcaagaccctgtctctaaaaataattctcccagtctgaattataaaggtaatattaatagagggatttcacagaaatcttccgtacccaagtgggtttcaaactattatacaactactgacagtgacaatcaagtactaggagaaatattagttaatagcgtaaatacagacgtgcattgcaaaattaaaggcagaggttaaaattatcttcatttcaccagtctcctctcccacagttggaaataataattattttgtaaaaggctttggaccactatcagcctactcctggtaatctttaaaaaggcttattcttttgtaaaggcataaacttaacattggcatagttaagtattttctgatataaaatcactacaacccacattaaatttgtacttccaaaaaaacaaccaactaggtggatatggtggtgcctaaagtcccagctacttgggaggcttaagtgggaggatcgcttgagccccgtaggtcgaggctgtaataagccatgaccacatcactgcactctagcctaaacgacagagcgagaccctatctcaaaaaaaaaaaaaaaaaaaaaagagaaagaaagaaacagaaatcacattcatagatactgggtgttagaacatcagcatatcttttcattcactgagaagaaaaaaatattgccaagacctgtttaaatggtacctgctgcttgacgtaaaatatgttgagatgacccctacagtagagaccccagggccccacaggaatagtgggaaatgccctactaatattaacactaaagtattagtattagtagtttctagagggtggggaggagtagagatatttaactttttcttaagtctatctacactgtttgactggacaaaactagcatgaatgacatgtcattaaaaataaaaagagcttactgccacacgcttaagatgaatttatacgatgcctcaataggtaaacacagactagaccaaattactttctaaactgagatctactgctggcacagtaaaacaaagctcagagcctcttgcttacttcagtttccatttgagcttctgcccttatttacttacaatactcattataaacagtgcagctcaccataaaagacaataatactttcctgggaaacagactgtgtcaattttattgtaactttttaaatttcactcctatatttttatgtaatcatcaggtactacttaatcttgctaaacagtagtaacagccagagtgacccagtggtaagagcattaatcttcactggttttacaagtcagaaaacctgggtttgaaagtgtgagaagctgggcagaccaacctgtgcgcttcagttttctctcctataaaaactactactatttgctctctccttaaagatgaataactagtaaattgttcttaaatgaatgaatgaaatgtgaaactaaatcatggagtgtaatctcctctattcgatttgtccctggacaaccaagaagttaccaaatttttttgatcgaaatattccgtgcccaaaatgtaacagaaataaaaaccacacccaactcctaaaattaagttacttttaaagttattagataacaacagggctttagaacatcagcaggatgttctgctttaaaattgatttggcatccaggagactaagccgagtcgccacaacagactggcttggtaatttaattagagtcttctggagggacacattatatcatcatcccccgacagtgttctctttagggacctgattttctctctagtcctctcattcctttccccttcctcacctcctctcatcccttttgtttgccctttttttctttttttgctcttaaaacagctctccctccgttcgtcttgtcacttccatgcatttttaactctaactagaaatgggtcaccccaggtttgctccccaagccccagggcccctcaggacgagtgaaaaaggccctgcggtcctccctgcctgggggaattcctcctccgatcacagctccggtgggctccgcagatgggaaagggtttccagcgcgcgcctagcggccacaaatcacttcccggggccgccccgccaggcctcaaacctcccagagccgtcggtcggcttttactttaacgaggattcagatgggtcacaccctgtcctccaaatgcgggcctgctccccggaccccgcccagggggctcgccccagtgccgaggctcctgggcaaccctagcactctgcgagtcggggaagtgaccccaaagttgcttctgagtggagacttccgcacgcagaggcgtccccgcagctgccaggcttttcaggggcagcatcccccgcccgtcaggagcctgtcctcggggccaccacgcgccccgcgcctcagccccgcaggggccgcaccggggcctcagtctgcaagcagccggggacagcgggcttcctcccctgcccggagcggccgagcgtctcggccaacctcccccgcggagagcacagcgcccccgcgcagtccccgaacttcttcccgcgtcggctcgggctctcgggtggggacgcggggacccctcgctcaccgatatccccatcgtcgtcgtcctcctcctcctccatttgtagcaaaacattcctgctcatctttttcatgtctccctcagaaggcggctccgaacttggcgcgaagttgggggctcccgggttccagaacggcgcggctctcccaggggccggatcggggaccgcggggcgtgtgtcgcttgggctcaggggccgctgagcccagccagcgccggggaaagccgagccgaggcacccaccgaccggagcccagagccggaggacgcctctcgcctgccgagcggagcccggagactgagcatgcccagtgcggccgccgcggctcgctgcggaatgattgaacttccccggttttacgaggcgcgcagaaggaagtcggcaggcgagactgcagagggagtagtgcgatcctgcgcgcgggggaactagctggagggcaaggcgggaacacgtgagtgcgggagtggactgggttccctgagcattgatcccaaacagggcagcttttcgttccaaggtcgtctgtggacacacactgtggcttgctttgttttaacgtctgatactggagaggagggaaatgctgctgcagcacaactgcagaaccctggaaggcgaactcgtttgaatggcttttaaaggcgacgtggagctaataatggggggatcttaaattactctagctccgaagtgggaaagtggaatctgtacgggtaggttaagattacggtggagtcggggtgggaggagaggcaaaactcagagaataagcaaaagaagaaggggcgggacggacgggagtgggggtggagagaattttctaaataaacgtgtgcacaaaggcaggaggatttccgcatacattgaggtcgcggagagtggagaagcgccccctactccgcccgcgcgagcacacagggagtggtcggaagataatcgctgaagcgtccagcctatttgtacaattgaaactagtcctctgtgtcaaagagggagaagaagccgaagaccactagagttagatgtaaactcttctaaagcaatgtggaaagctataataagagaaaagaaagtcgtgaaataaaattaaggcagagagtttttatttttatttttaatgctttcctggaaaccaaagggaccgataggacaaatacaaagggatttagtactttaaagacccttggagttgtttgaacggcaggttttggggatcgcgtgtctacaaaacttttttcaaaaaagctggtacattcaggttgttcaattttgacttctcaaaagggctagaaggtatatttgaaatcttggttatatgtgttattgtctactcattgaaattgtttatattttttccactgaagtgctagggttatcacaataacactaaatctactgtgcatg

SEQ ID NO: 6225 - DNA, 6000 bp, Homo sapiens
gggcagtggtgtgatctcggctcactgcaacccccacctcctaggctccagtgactctcctgcctcagcctcccaagtagctgggattacaggcgcatgccaccacgcctggctaatttttgtatttttggtagagatgaagtttcaccatattggccaggctggtctagaactcctgacctcaggtgatccacctgcctcggcctcccaaagtgctgggattacaggtgtgagccaccacacccagcctggaagctttattctattgaatgtttccaacacgaagaaatgatagatgtttgagatgatatatatgctcatgaccctgatctgatcactatgcattatatgtattgaaacatcactacataccccatgagcatgtaaaatgatttatcgactaaaacataaacaaaaataaaataaaataaagctttattcgtaattgcctaaacttggaagcaactatgatgtcgttcagcaggtgaatggatgcactgtggtacacccagacaacagaatattattcagtgctaaaatgaaatgagctatcaagccatgaaaaggcacggaggaaccttcaatgcacattcctaagagaaggaagcaatctgaaaaagctccctactgtatgattcctaccatatgacattctggaaaaggcaaaacggtggagacagtacaaagatcagtgtttgccaagggttagtgagaaggaaggggtgagtaggcagggcacagaggatttttagggcagtgaaactactccatatgatactgtaatggtagatgcatgccacatacatttgtcaaaaactataggcctgtaatcccagcactttgggaggccaaggcgggtggatcacctgaggtcaggagttcgagaccagcctggccaatatggtgaaaccctgtctctaccaaaaatataaaaaaaaattagccaagtgtggtggcacacccctgtaatcccagctactcaggaggctgaggcaggaaaatcgcttgaacccaggaggtggaagatgcagtgagctgagatcatgccactgcagtccagcctgggcgacagagtgagactccatctcaaaaaaaaaaaaaaaaaaaatcaaaaacaaacaaaaacaacaaaaaaactatagaatatgtttatttaatttttaatgatttttttgagacagggtctcattctgtcacccaggctggggttcagcagcatgacctctgcccatgcaacctctgcttcccaggttcaagtgattctcccacctcagcctcctgagtagctgggatcataggtgtgccaccacaaccagctaattttcgtatttttcatagagacgggattttgccatgttgaccaggctggtctcgaactcctgagttcaagcgatctgcccacctcgacctcccaaagtgctgggattacaggtgtgagccactgcgcccagccaaaaactatagaatatatgaatcctaatgtaaactgccagctttggatgataatgaggtgtcagtgtgggttcactgaccataacaaatgtactggctcgtgtgggatggtgatggtgggggaggctgtgtgtgctgtggctatacttgctactcaattttgctgtgagcctaaaactgatcttaaaaaaaaggaaatctattaaaagtggttaaaatggtaaatttcgttatgtagatgttatcataataaaaagaatgttcatagcagcttcattcataatgtcttttttttttttttttttttttgttgagacagagtctcactctgtcacgcaggctggagtgcagtggtgcaatcttggctcactgcaagctccgcttcccaggtttacgccattctcctgcctcagcctcccgagcagctgggactacagacgccagccaccgcgcccggctaattttttgtagccaggatggtctggatctcttgacctcgtgatccacccgccttggcctcccaaagtgctaggattacaggcgtaagccatggcgcctggcctcattcgtaatgtctttaaactggaaacagcgtaaatgtctgtcagctgtagaatgggtcaatgacttgtggaatgttcactcaagggaatagaaagcagtcgagaaaaataacaggggcgcttctacgggggctggaatgttctgattgggatctgggtgctggttacatgggtttgtccagtgctctatgttgacttttttgtttttgttttctgagacagagtctcactctgtcgcccaggctggagtgcagtggcgcaatctcggctcactgcagcctccgcctcctgggttcaagtgattctcatgcctcagcctcccgagtagctgggattacaggcgtgtgctaccacgcctggataattttgttatatttttagtagagacggggtttcaccatgttgcccaggctggtctcgaactcctgacctcaggtaatccgctggcctcagcctcccaaagtgctaggattacaggcgtgagccaccacacctggcctctatgtcaatttttaaagtatgtgtaaatatacacatatacagacatatacatatgattgcacattcatatacatatattcacatacacatatacatacgactctggaatcaagatactctaattctggagcgttctaattctggtctgctactcactaggtttatgactctagacagattcctgtacccacctcactttccttatctgtaaaatgggggtaataataccttaagcagtcaacaaagatacatgtcagcgctggctggcagcacatgttgattcagtacttgctggtaaatattcttcttgctgctgctcccttcggtgactgagcccagagtgtctggaaggaggagagggtccatggagagggccaatctaaactgataagcaggccaggcgcagtggtctcagttctagaccagcctggccaacatggcgaaatcccgtttctactaaaaatacaaggccgggcgcggtggctcacgcctgtaatcccagcactttgggaggccgaggcgggtggatcatgaggtcaggagatcgagaccatcctggctaacaaggtgaaaccccgtctctactaaaaatacaaaaaattagccgggcgcggtggcgggcgcctgtagtcccagctactcgggaggctgaggcaggagaatggcgtgaacccgggaagcggagcttgcagtgagccgagattgcgccactgcagtccgcagtccggcctgggcgacagagcgagactccgtctcaaaaaaagaaaaaaaaaaaaaaaaaaaaaaaaaaaaaaacaaaaactttgggaggccgaggcagggggaccacgaggtcaggagatcaagaccatcctggctaacacggtgaaaccccgtctctactaaaaacataaaaaattagccgggtgtggtggcgggcgcctgtagtcccagctactcgggaggctgagccaggagaatggcgtgaacccgggaggcagagcttacagtgagccgagatcgtgccactgcactccagcctgggcgacagagcaagactccgtctcaaaacaaacaaacaaacaaacaaaaaacaaaaaaattagctgggcgtggtggcgcctgccgataatcccagctattcgggaggctgaggcaggaaaactgcttgaatccgggaggcagaggttgcagtgagcggagatcgcgccactgcactccagcctgggtgaaactctatctcaaaaagtaaataaacaaataaataaactgataggtacaacacactcatcttgcaaactgctgcaaacggagagggggtgagggtggggtggggtgctgcatgtgccaggcctgcctggtgggtggctggggagccgacctgccctgggcctcctggggaaaaagggcagttaggcgggtaatgaacattgatctggggaaatggatcctttcctagatagcagggcctctcactatcactgggcaatcaagacgactgtaaaacgttaaacaccttctcgggccgggcagctctgcacgagaaaaccccaaatcccacatacttccaccactcccagaagccctgtggtggttaactggggaactctgtagggttcaaacgccatatttgccccttactggatgtgtgacctgcggcgggtccctgtgcctctctgggtctcagtttcctcatctgtaagacggtgatataatagtacctagctcaaaggtttaatgctggtagattcctgagcaaaggtccggggagagaagaggctcggtctgcaagagttgtcatttgttggctgcggtgagaccacgccccgtcgccctcccacacctgaccccgccctcccgcgtccattgggaacgccaccggaagtaatgcgagacggagcgttttggtggagacactcactggggcaatctgaggtaatccaacagactgtggcggagggaccggaagcgccaggcagggacccggggtagatgctaaatccaaactgaaacgtacagggctggatgattgaagcaccagcgggaactagtcggacctccgagctctttaaactgtcctcagctcggctggttctccacgagctccgggcagacggcggggggtgggtcggcgtttaagtcaaaggccttggggctccgagtcccttcctctccccgtcctgtgaaggcacgacccagttcagctgtctgtaaagtggagccattagtccctgcctcgtagtgggaaaactgggaggcggaacgaggaggccgccggtcccaacccggcccaggagcatctttctccgcagaccgtttcctggcgaggtgcgtcttcgtccttttccgcccttgggaacttagagcggccccttggccgctggttccgcgcctcccgcggttgggggcgtgcccgaagtctctctacggaagctggtagggctgtgggtgcttcactatggcgacggtgggggctccgcggcacttctgccgctgcgcctgcttctgcaccgataacttgtacgtggcgcgctatgggctgcacgtgcgcttccgaggcgagcagcagctgcgccgggactacggcccggtgagtggccgctgtcgtccctacggagcagtgggcagagaggggtagtggaggagggaagttcgtccccagggtcgtttgctttgcgcacgccgcgcaccgtatcttcaaatacaagaatgacggcctctctctgcctcggttttctcaccgtaaaggggtaatagtatctccctgtgagattgtgaggaaggaatgaacaagcatgtagggtgcttaggacagggccgggctcagcttgccgcctcacagcaacaccagcccggagccctgtcctgagcttgacagggttccgcagttcattctctccatgatcctttgaggtcggggctcctctccccattttaagcaggggaaactgaggcttagagagtgaagggatttcctcaggtcatacagtcatgctcagtgttctttctgctcccagatcctgcgcagccgaggctgtgttagcgccaaggacttccagcagctgttagcagaggtaccagtcccctgcccctgcacagctcctcctcgttagatttgtgtccgcagcttgaggacacagcttgagcctagcctcagtccctgatccctgaagggtcacttaggccctcactttcctccttcctgccccccactcatccctccacacctgagtcttggcaccaggagagagaaggggaaatgctaagttgctaagttgcctagtcatgccgttcttaacagctctgtgagataagcacaagcaccactctcattttggattgagaagctgaggcttaaagagggatcccttgcccaagcttttacagcaggagcagatgtgatcccagccacagcttccaggcccctgggctcctcacaccttaccatataccccgcaggctgctgccagggctgctgccccactccctcctcctccttcccctg

SEQ ID NO: 6226 - DNA, 6000 bp, Homo sapiens
acaggatcccaaggcagaagaatttttcttagtgcagaacaaaatgaaaagtctcccatgtctacttctttctacacagacacagcaaccatccgatttctcaatcttttccccacctttcccccttttctattccacaaaaccgccattgtcatcatggcccgttctcaatgagctgttgggcacacctcccagacggggtggtggctgggcagaggggctcctcacttcccagtaggggcggccgggcagaggcgcccctcacctcccggacggggcagctggccgggcgggggggctgacccccccccacctccctcccagacggggcagctggccgggcagaggggctcctcacttcccagtaggggcggccgggcagaggtgcccctcacctcccggacggggcagctggccgggcagggggctgacccccccacctccctcccagactgggcggctggccgggcaaaggggctcctcacttcccagtaggggcggccgggcagaggcgcccctcacctcccagacggggcagctggccgggcggagggctgacccccccacctccctcctggacagggcggctggctgggcagggggctgacccccccacctccctcccggacggggcggctggccgggcagaggggctcctcacttcccagtaggggcggccgggcagaggcgcccctcacctcccagacggggcggctggccgggcggagggctgacccccccacctccctcccggacagggcagctggccaggctgaggggctcctcacttcccagtaggggtggccgggcagaggcgcccctcacctcccggacggggcggctggccgggcggggggctgacccccgacctccctcccggatggggcggctggccgggcaggggctgacccccccacctccctcccggacggggtggctgccgggcagagacgctcctcacttcccagatggggtggctgccgggcggagaggctcctcacttctcagacggggcagctgccgggcggaggggctcctcacttctcagacggggtggttgccaggcagagggtctcctcacttctcacacggggcggccgggcagagacgctcctcacctcccagacggggtctcggccgggcagaggcactcctcacatcccagatggggcggcggggcagaggcgctccccacatctcagacgatgggcggccgggcagagacgctcctcacttcctagatgtgatggcggctgggaagaggcgctcctcacttcctagatgggatggcggccgggcgcagacgctcctcactttccagactgggcagccaggcagagaggctcctcacatcccagacgatgggcagccaggcagagacgctcctcacttcccagacggggtggcggccgggcagaggctgcaatctcggcaccgtgggaggccaaggcaggcggctgggaggtgtaggccgtagcgagccgagatcacgccactgcactccagtctgggcaccattgagcactgagtgaacgagactccgtctgcaatcctggcacctcgggaggccaaggctggcggatcactcgcggtcaggggctggagaccggcccggccaacacagcgaaaccccgtctccaccaagaccagtcaggtgtggcggcgcgtgcctgcaatcgcaggcactcggcaggctgaggcaggagaatcaggcagggaggttgcagtgagccgagatggcagcagtacagtccagcttcggctccgcatgagagggagaccgtggggagagtgagagggagagggagagggagagggagagggagacggagagggagagggagagggagaggcccccttacatttttgcacgctattaataccattttcagttcaaaggtggaatggactgattgtgactaaagattctgtataagcaaaagtagatctgacatttttaaaatgtaaaacaatgccattcttttcactaaattattttttatttagaaaatatagttattttccataaaaatgttaacatgtagtaagtttatcctttctaaatgacttaaattttccaaaaaaaattgttttaatttctgataagatcaatataataagcgtgtaaaggaatcccaagaccaagaagtttgaaaacctttggtacaaaatattacattttataaatcaaccattggtttattcctgtgttctgtcaatgaattttatgtggtatgtaagtccgtgtatgtgtcccactgtgtataagtatgagttcttctaggtagggaatatacctcgaccattttaaagcattgcattaagtaaaggtgaaaatacacagacttcagaaatattaatagaaagtggaattagggctgggcatggtggctcatacctgtaatcccagcactttgggagaccgaggcgggcagatcacctgaggttgggagttcgagatcagcctggctaacacggtgaaaccccgtctctactaaatatacaaaattagctgggcgtgttggcgcacgcctgtaatcccagctactcaggaggctgagccagaagaatcacttgaatccaggaggcagaggttgcagtgagccaggatcgtgccactgcactccagcctggtgacgaagtgagactccgtctcaaaaaaaaaaagaacatggaattagcaggacttggacagagcaacaggcaactcagtgtgcaagggccataggaagaacagctaagaggtaggaggaaaatgaggaaagagcaatatctgagaacttctgtatttcttgaacgtaatttgggaaaagagatgcagtaggccgtatacacctgccttgatttcttctcagacctagcttcagtctacttgatgcatttccagggattagtggtcaacagcctgcagctgcaggccttttttttggagcagctaaggacttagatactttttgctttttcctttcatttttctagagctttgtcttgaagtccccattatctagggaatgggcaacatggggtcactatctgaatcccagaagtcttcctgttccttactgattgtgcagatcagggattccatgggagaggcctgactgcaggggccccactgactgttctgcatcatgtagcatgccttttggatgagaaaatcagtctgcttcctgtaaggtattcagggccacccactgtgcctctagttctatatataggctccttccagctctgtgatgagccactgcaatgtttagttggacccttaagccttgtttgtccattaggagataaagtttcccaaaaacagtagtttagtttccttcatctttgcaaattcagcatagtgcctataatagagtgcatattcaaaggcatgaatgaaggaatgaattagacttttaaatatactaaggccacttttctagaactgcttttatataactggtgaggggacataagtaaaaaggagtaaaagggtgttttactcagctgtttaaagcacttgtaatgctaaatcatggcatggtattttaacaacatgacattttcataataggtaaattattttttctggtgccaagtgcctattcaaaagtcttgtcctggtatgttaaacaagatacagtaaatatggactatcagaatataagttttctctaaaatgcaatgtgcacttatatttttgggtgaggtagctaacttctcatttgaaagatgaggtacagtatatggttaacttgtaaaacagaaattcacttgctttataagaacgaaatctcatttaaataaaccaggtttcttaggcatgcttcctttttttatatcaaatgttctaggtttttttcagcctctttaaccttgctatattctgaattcagtaatttccatactatgcatggtttcataaaggacacaaatttaaagaaaaaaggtacccatagattgcctcagaacccctttttctggcaaccagcaggagtttaccaggccatcattaaagacatgttttttgggtatatgtcgtaaatctctagaaacattgcttacaaatagtactgtgtagctatacttttgaaactataatgtaaaaagggtaccatttgttgaactcttacagcatcaattaggttgtattatgttcactttagggacaaggaaattcaggcccttatgacattaattactcacccatatcgttcacaagtgttggaagcaagagtacaacacagacctatatggttccaaagcctatgccagtagaaatagttgtacagtaagtgttattcgtgagctaagacaatcgtcctaggcttagcattgtgtctgatacgtaagtgatcagacaggtaaacattgatagaactgaaatcctttgatcattttaccctttaaattcttctctggggtaggaaaagcttgttttctgtttttggtaaccgctttgagtataactgacatgcaataagttgcacatatttaaagtgtgcagtttgatacggttttacatatgtgtacatctgtgaggccatcacccgagatgagaaaatgcacaggctgcaaataaaaatgatctcaatacggcctctggaagaacacctgatctaggctgacttgatctaaggaaatacatgagtatcatgtaaacgctgaggtcagatctaaaggtcggctcggagctccctatctgacaagtagggtcccctggccaggttcactccataggttagtctcggggctaccctgcccacgtccggaaagcggacctacctggggcctaaccttgaccggacacccgtcagcattctccaaatccgacttctacacctgtatgggacggaccaagtttctaggtccgcgatcacaccaatggcggaagctcgtcagcgcccgggttccaaaatcccgcctctcaaggcttcttgagacattttgtctcccggcgtgcaatgcgtccgccccgggtggcctccgcccggaagacggaagtgcaaagacttccggtcggcgtgagcgtgaggtgtgggtgttcgtttctcaggtgagttcggttcctcaccggtccagtgacacatgggacttggggcttgattccgccacccttggagaatttcgtttcttgacactcgctgggctatacttgagctccagtccggagatgcaggccttgttgagggcgagggttccccttgctctttttggtgggggccctccggcttccgagtgcactggataaagtggagcccacccctgtcgttcactcccgctgaagttaacttcggccctcaaggttgtttgccgcccgctttcctagcccctcgcaagggttgagttatgtagacaagggagcggaatgactgtgattgccggcgttcaaaaaatgttagtggttcgttcaacaagtatgcaaaaagtgtgcgattcagcagtgaacaagacctttccctctaccttcgtggagtctacagtctggggagagggtcggggggcgtgacagaaaacaatggtttcaggttgtaacacttaataagcagggaagggagcttacggaggtcagaggagtcctttctgaggtagcgaatgaaggagcaagccttgagaagagcagttgccaggcatagggacagcaaatatgaaggcactgacgtagagatagtttggactctttacagacgtagttggtgcctgcggggatggggatggagaatgaaatgaaatagagttgaaggaggcaggggacagatcacaaatgaccttgtagatcttgaatatatatgagggaggaggtctttaaagaactcgaagaaaggcagtgaatgcttttttaaaagatcacactgagcaccttgtggaggatttagggcggaactgagtggaaagaaaacaagagtaggaatagataagtttacagtcgttaagttggcttgagaggatggataatgaagatgaggtgaagtgtttataaaaatcatttgtaatttgtaagctgttgcataaatg

SEQ ID NO: 6227 - DNA, 6000 bp, Homo sapiens
gccagggaactgcctcacatctacagctgcacgtcggggagtggccatcaaagggcactttaatacatttcccttattttctgaaggggagtaaggttgcaattcagtgtctgtactgggaatggtcttcatatttcttgggggagaagagcaggtgatgagggttctgggccaggctgggtggcttccatggaagaaaaggcaatattcacataaattctcctgctaaggacactgaccacacaggtgtcaaggcaacttatcatacttcgaaaggagctggatcccttgaggattggccaggaagggaggtgctgggcccttagcggtgcacagaaggccaggaagatgtccaaggcagatgggggctgggctctcgcaggtgggacctttctggggagctgctttgacttatgcagcagatggcttcatgaatgttcatagtgagcctggcagcataagactagggggcagaaagcaccacagtctctggatcctcacttctcccactgcctgcccaaccaacaccttcgcaaagtcctcctttcccaaacaccccccaaaatagacctcgaagtacacatgcattaaggtcccagaggacagggaacatcagtaaggaaaggaaggaatcaagcatcactctaagacaaactcagaccatctcttttcggtctgaaaaaataatccgtttaattgaaaaacctggaggatactattccactcccccagatgaggaggctgaggagaccagacccctacatcacctcgtagccacttctgatactcttcacgaggcagcaggcaaagacaattcccaaaacctagaaggaaagatggggacaggggtggagaggagtcagaagggctagctacctcagacccatgcaagagactccaaacacacactcccaggccagtacctcctgttcagcaccctcctcccctcagccccttccctccaggcaccctggacagagtcccagcccctgctcagggttatctcttacctcgacaaaagcaattccaagggctgctgcagctaccaccagcacatttttcctcagccagcccccaatcttctccacacagccctgaaggtggcaggcacaaaggacaaaagcaccatcagaaacttcccaccccaaccccctcccttggtccatcagtctcttccctgcccctgtacctttcaccccacccttagcatttccagatcccctccccatccctgaccctgtccacctccatcctgggtctcttgcattctaaaacatttcccaggtttcccaagtcccatacacagtctcctccctacctccttatggatcgccttctcgttgaaattaatcccacagcccacagtaacattaatgcagcaggagtcggggactcggttcttcgacatggaagggattttctcccaatctgtgtagttagcagccccacagcacttaaactgggggagggaagaaatatggagaagaaggttgttaagtgaaccttcaccttcaatatggagatgagaattctttttttttttttttttttttttttgagacagagacttgctctgttgcccagacaagtgcccagcggtggctcaatctcggctcactgcaacctccgcctcccgggttcaagcgattctcctgcctcaccctcctgagtaggtgggattacaggcactcaccaccacacctggctaatttttgtatttttagtagagacagggtttcaccacgttggccaggctagtcttgaacttctgacctcaggtgatctgcccacctcggccttcaaaagtgctgagattacaggcgtgagtcaccacacccagccttggagatgagaattctctattcccaccacccctgctcccagcaaccccactcacatctgcctgcatcctgtccaggatcgaagcagtgtggttgtttttcgggtaattctccatctgctgccggaagttgttattaaactctgacatcacctgagagtacggaggagcactgttgcagtcagaattcaagcaccagggtcccagacccggctgaggcaggcccttcccattattccctgcttaccttatctctaaacacatagccagcaatggctgcggccacctccaccaacatgataagagacagaaagatggcaaactgcaggagcaaaggacagaagtcaagtttggagtctatgcattacaggggcccgttttggcacagccggtccctggacactcacaaaggtcttcctcacccacccacctcacccaccttcctgagcccgaaccaagctgctctggcagtcccagaccgcccatgttggtcccgcccccaactcaccgtgatcataagacaatagttctccttgcaggccccgcagcagcccacaaaagccaccaggaagaggaagacacccactgcgatgatgaccactggcaacagagagccaggggtagccccctggattatggtctgactcaggacaagctgtgccccgacacccacggcaatcagtcccactgcacaggcctaagagaaaatcaggtgaggattaggccatatccacaacacagtggccctccatggtggagggcagggggtacacctaggacacagacttgaccccatccggaagagagattctcacacctctagggaatttctttggctgtggggtagggggatgacccatccttgcctgcccctacctcccctgatcccctcccggctctttaatcagggacatgaccaaattcaaaaacctcccagaaagccttgacctcaagacacgtatttctgacctagaataatgctttctacaggcctccagggctcccagctcaattctctcccagaactgccccctcactatcctccagtgcacatcccacgcgcgcatcagctgtgactaaggttcctctggccagttaggccaggagaagggaagaggaaaagggagcaagagtgatgtgtccctccctagacaaacagtagcctctcaagccaggagcccagggcaggagcaaattgaagtgggcagagcccttcctcacccccaagcgctgggaggagggaaagggggagaggggctggacagggatgagagggttggggagggagagaggggagaagggagagcgaagggaagccccatggcgatagcatcaggcggttggctggttgccccactgccccatatcacaagtggttgggtcaccagacaggaagggccaggagggatgggggtaggggttgctgcacacccaggatggccattctcggtggaaacaagcctcaggtgtccaggaaaactggaggagggagtggctgcgctgtctttccctggctttctttccacatctggtctccagctgccttaattctcattccctcagccctcaccactgtggagccaggtctccccgcaccctgccggcgcgccccccaggacccctcgccactcacgcaaaaggccagcaggaggacgtagagcaagaacttcacacatttcattcctccttccaccgccatggctgccgggcctggggcagaggggagggcggggggattaaaactggccgaagggggacctcggtttccgggctcccggccggccctcgagggcttcccttcacggccccgattcccggcccctcccacccggaaacccgcggtcggatccacgtctcccagccccctctttacccgcaggagaggggtgggggcgacggccgcgaagcccggaccccgccccgccgcctctggggcccaggacagatccaagggcgccggcaggggcttgagcctgacgccgaccctcggcccgccagtctccgggcgtcaaacaccctttccccacccaacacccagcctggagaaacggtcttcagcccaaccccgacccccgccccagcccctttcccctgggctctgacctccccgcccaccaaaaaaaaaaaaagtgcagccagcacccccgccacaccctgcccgggcccagggaacttcgaagcaaagttgctccagggcggctggagagcgccggacgagtctccgcgggcctggggcgagccctggaggaagggactgcgggtggtctctcccagcccgcgccgaagtccgccgggtccccgcggcctcacctgggcttcccaaggctggctgcgcgttcctctcccgccgcggctccggggctctctagctgcgccccccggctcccgccccgcctgccgcgcggccccgccccgggctccagccacggtcccctcccccgccgagtggccgccggcctccctcatgtgacgcggtaacagctgcggcctgagtcactgggcccggcgcggggtgggccgagccccccgcccggccagggccacgtggcccctacccggaagaaggcgcccacccccgcaaagggaaagccgcaagggcaagacctcggggcgcctggggcccccctctggcgctatacctccgtgccaactcggggtaggagagcggggcggagcgcagcctgggtcactctggttcagagaagcggacgaggtgggtgagagttaccctctgagcgccggggcggagagctgaggccgggtgacaatgtggtctgtgaggtttccccatcctaccgtaggggatgagccagctctctcctctggctccaactctgtgcaagccccctccccatccgactgtgcagacagctggggactgcctggggtcgggtggggccagaacaaacacttccagaaagtccctggctcacatcctgggtgtctcccaacattctacagcattctagagtggggatttctggcccccctctattagcacagcttctccattttccagggatcctagtctgagaaaaggggaggaagcccttccccgaagccacgctacccagtcaatcaagacacgtccgcgtcgggtcccgccctctgggggaggattgacaaggtctgtgcttccagcctcccagacagctcctgcatccgtctgtgatagcgagggcttgggggaagacacgaaggcaggagaggcttacatcctctggatttccccgtcttatcccagaagacaaagccaggtgagggctggaagcgggctagggggatcaagctgcctccctcccttgtgtgccaggggtggtccccagaaggagctgatctgaacaggccggagagtaggaccggccgtcacacccccacacctccagcctcggccccactccttgggctcttaaggtcctgcctcaagaaccacttcctgagtcttagtgtatgtgtgtacacaaagaatgaaagaagtctctagagctaaaggaaggagatccgggctgggctgagaagcatcttccaggatcacggccttcccgcgggacacaccaagcccattccggatcttgctcttcctgaccatggctggcaggctgtggaggaggagcggagagcagaagaaaggagtattcatcaggttccttattgtgctgccactagatgccaggcatgtgctaggcttgggggctgcaaggagaggaagacagcggccctgccctctgctagcaggcagaaccgagttctggccacactgtgaagaaaggcagaagcctgcggtggcagctggttaagctcagagggagggaaagggagaggagaatggatttcacggagcagaaggatgtgctcaaggtgaccttggagaataaaggggagagctccagggacagagaagcagtcgactgtggaaaaaaaaggagcattttgtaaagtacatggcaggttggggttggctggctcaaagggcttgggacggatgtggtgagatgggctgaaggtggtctgaagatcaagattgagagactagatacataacaaccaactgcaatgtttggtccttcattgaatggttgaacaaaccagctgtgaaagacattttgggacatacagacatggactgagaattagacataagaaaattattttgttaactg

SEQ ID NO: 6228 - DNA, 6000 bp, Homo sapiens; identical to SEQ ID NO: 2773

SEQ ID NO: 6229 - DNA, 6000 bp, Homo sapiens
gtaagcctgtttccagccctagtgttgatgggtgatcttatgtttaccaggctgaagttctgaacaccctcttcagaaaacagactgcactagctccaggctctcctcctcgttggtaagcgtgtcatccatgctccaagttttccagagctccttgtttaacttggagctggacaaaagcatggccccaggggcagcttggcttgctttatattaatagagtcctcaccacagtaggactgcactgtgcccttgcttccttctggctggaacttgagtgtagctgtgcctttgaccagcagacctggggcagttctttacagctacccagttctaacaggaaaccctggagaagaaccaagtaccatgaagttccaaagctgcttaacttcctcttaaggattcgccacccttagcaggtattttatcccgtccaggtctataatctgttttgtaaatgtcttcatagttcagagtcactgcaaagccagcacactttgggctgatgtatacagctctgtctaggtaccatttgagcctagcaggtcaattgaatacagatgatttaattctcctaatcggttggctctactctctgaatatattaaaactggctaatccaggctcatgagtgggtccacgcttagtggtgaggctctccttggtgatgtgtgtctacaactaagccctcatgtccagctaccaacagtcacagaaacgacttccaacttcacacattgcctgactgcagttcctcagaaactcacaagtgaatgattcttccaatcttggaatcctctgatctgcaattttatacagataaccagtactctctggctagaagcacaaccccagaatttgcttaaaaagcaaagggagaaagtgtcctgtagtctctccacacacagagaagggaaacctcaccatgaaccagggactagcagcaaactaaagaacatattttatttttaataaaatagtggagcatgaaaaatatcatatattacaaatatacacacgcagaaaccactctttcctggcactgtgaagagaatacactagacaaagtgtctctgccaacctagtgcttcctgatctgtttgtggaaatcatttgtttaacaatagaaagagtcaataagccctttgggtaacttttgaatgatccttctccctcttcccccctcctttccacaaatcagtccaaacgtctataacattggcttggtttccattaaaaagccacaaaatgtagcactgaagggtttctgagggctgggcctcttagttcttttgttaggagatttcttttgttgtctttatatatagcaaaatacttgtttctctttttattttcaaggaaagagaaaaaaatgtattgcacatcgtttgagttcacaaatgtgaggtttgatggaggtttctgtcttgcagagagactattggtgaaggccggagtctattttaagcaactccaaatccactggggtgtgaggcgggccccgggtcctgtctttcctctgcagggatgccgcccagcactgtggccttcctgggggtgggccctggggatggctcatttgttaacccaggggaggctcttgaatttgcaaagcagttatctgtcctcttatttgtaaatgggtagcaaagccaactcaaatacacagatgtatatttagggagggctctaaacaaaagttttcttctgagggctgaatcaactactttaccacaaattagttacacaagaggctacttcactggaggagcttcccttcgctggaaaaccaaaacaaaacaaaaccctttaagtacatttttcctttcagtgtatcacagcatcctgaatttcagggtaaacacttttttatgtatttctcttttgcttttataaaaaaaaaaaaagaagaagaagaaagaaaaacacaaccaagaaaagcaccacatcttagctccgggcgcccctgtgcccttccctccagccctgttcacacgcaggtgggcgactgggcagggatctcatatttcccgtggtgagttttctggggatgctgggcttttttgtaaatcccaccgctggtgatcacgctggccggttttctccggctcttcttctttaacctacggctgcacacctgctgccaggactgcagagtcttggaggtccaaatccacatcccgctggtgatccccaccaccagcagcataaagatcttcaccatgaagatctccacggcggggatggaggcggccatcaggcagtccagcgttttagtctggttgttcattttgcacttgtgctgcgccgccaggatcttccagtaatccatgttgaggcgttcgtaaaagtagcaggcgatcacacaggtggccggcacggtgtacagcacagagaagagcccgatacgcaccatgagcttctccagcttgtccgtgttctcgccgcccgtcttcatcaccctccggatgtggaacagggccacgaagcccgagaggatgaaggacgtgccgatgaccaggtagcaggccaggggaatgagcacgaagccggtgagcgcgttgacgtccatgctgcccacgtagcagaccccggtgagctcgtcccccgccaccctgcgcatgaccaggatcaggatggtcttcaccgccgggatggcccaggctgccaggtggaagtagctgctgttggcttcgatggcctcgtggccccacttcttgccggcggccaggaaccaggtgagcgtgaggaccacccaccacagcgagctggccatgccgaagtagtagaggaccaggaagaccagcgtgcagccggtgctctccagtccctcctggatgacatagagctggccgctgtcccggtcgcaggcgatgctctcggcgccggcgaagaggcggatgaggtagcccacggagtagacgcagtagcacatggagaggaagatgatggggcgctcggggtagcggaagcgggccgggtcgatgaggaaggtgagcacggtgaaggcgctggagaagaagcacagcaccgcccagatggccagccagaccactgcgaagcgcttgtcctcgcggctccagtacacgtccacgccgggcgtgcagagcggcgcgcacgacgcgctcttctccacgtggtggaacttgcccgggttgtcgcagccgccgcgcccggggcccccgtccttcagcgggtgctcctgcgcgctgtggggccgctgcggccggaacagcggcgggaacaggcccgagccccgggtgggctcgtccgagccgttgttgggcgcctccatgcacaggtagttggggtcgttcttgttggggagtttccggcagtccagggagtcgggccacttgaagttgaactgctccataatcggggagcacttgagccgggcctgctcgcacatgacccggcaggcggggatgggggtagagacctgctcggtgcacatcggcgcgtacagcgagcacaggaagaagcggaggtggccgtggcagccgtactccaccagcggcgcgaactcgtgcaactggatggctgcctcgcgctggttctcgtggcccatcaggttgggcatacgagtcatgttgtagccgatgtccttgcacatcgggatctcgatgggctggcatttgccgtcgcccgggcgctccatgtccatggagctgatggcggcgcacgagcccatcacctgcaggaccagccacaggcgggggcccgggcgctgcatgctggcgttggacgtgtcctcgcggggagctccgcgcccctcagcgccgccgctcccgggcacgggctgctgctggccccggctctccacccctgctcgggcccccgcccatgcccgcccggcctggcccgagcgctgcgcacagcgcccccggctcggctctccgcgcccggcgtccgccgagttgggggccgcggcggagagcagcaaagtttgcaaacaataccgggaagcgagggaagcccccggagctcccggcgcagcggcccggcgcgagctccaactcacggccgcggcaaacttcggcctcttcttggagcgcccaggtggcgcgtctggagcgggctggcggcgcgggcacaccgaggccggcccagctcgcggcgcccccacagcccgggcggctcctccctccctgcgccggcctcggccgggaccagccggcagctgtttcgaggtttgcgtcccgggatgagaagactcgcaaaaaggcaaaggggggcagaaaagccgagcgctgacaggccccgcccccgggccgcgcgccccgccccgccgctgctttgcatgagaaagcgcagcggcccggggcagcctcctccccgccgccccgccgcgggctcccgggccccgcgggggccgatcccccccggcctgcagcccagcctgcggggggcgcagcgcctagtcccgcccgcgtcgcccgccagccccgggacagcccgcctggcgcgcggggctctgcgcgctgcgaccctccccggcagtcccgcccgcctctcctcgccctctctctgcctggcctccaactttgcctctcgctatcctctccgccggcgccccctttcccggcggtccccgggatggtccccggcaccccgaggacgccgaggttacgggaagttcggggactggcgggagaaggggtttgggggtggtccgcggcgaggggcgcggggtgcatcttctcttccttttatggtgagtcccgggcggagggcgctttcaaagggaggtgggatttgcgttttatagcctgggccataaagtaggcccttgcttgtaaacctgcccgcatcttcctgaggctggggaggtgctaccagccccgggctccgggctccgaggagggattttctttgaaatttcaaagagacgagctaaggggagggggaggggctcgagaatccggattttagggccgctcatccgaggtctcctctaagaaggcgggaagggggaggggcgggaagcgtcccgggactttgaacaccgcctcccaccccgcgggaagtgcgggcttggtttgtaccgcggtgacccccgccccctccgaagccgcagagccggggcctcgcgccagcagggctggagatgccttcttggcggctgagtttatttattataggaagtcattcgctcgtggggtatttatgtgatttggcgagtgatgtgcccggccagcgccctccttggctgcagccccgcaggaggacccggagtagggtgggatggagtgggtcgtgggaggagcgcgtcagcgcctgcccggggacccccagctcccgcgaggacacggaggcgcgcacgccgctcggttttcctggaaagtggagaaggagcgtcctgggcaggtcctctgagctcatcccccctcggattggggcgggtctgtgacggggtcacttaggacacgacgtccccccgccattcccttcccccgcccagggcgttcgcggtgggcgcccaccgccaagccccactgttcccaaggatgcgccaggtgcttcccgtagcgtcctgggttgacccttaaaaaaacagcacccctaggaggtggccggccctctcctcccagggtctctccgggtcacgatcttccaaagttcggaaactcgcaggatcgcgtgtgcaatctcccgctacctcccggggggccggggagaggtcagaggagcgagtcccgcgtccaccggcctcgcttgccccctgcccgtttgaggatagttccagggagcagggtggagtgtgcggacatctttggaggcagtgctggggcttcccgcgttggcggcgctccacccggcgtggggggcggctgcacgggcccccgcggtggggacgctgcgcacggggcaaggtctccctaggaagcgcccgggaaggagatggggcccgccaggaacccccctcactgaccagctttctgcacgccgtgcaggagggggccacttcctcggagagtattggcttttaattaaaac

SEQ ID NO: 6230 - DNA, 6000 bp, Homo sapiens
tagatatttttgggggtcattatccagcctgccagaaggatcgagagagttggaggagtcgggttaagggttgggggcgggggaagatgctaggagaagagagagggagcagagagggagcagaatggtccctgtctgctgtccacaccataaagcacagacagcagactgacgggtagctcaaaatccaaagaaaatgaaaaactattgctccatgcgcttgtgtgaataaaacatttcagaaagtaacacctcattactctgcctcctcctctcaaaaaaaatcccaactaaatttattaaaatatatattaacaaaaagtttacagcagctttctctgtaagagtacatgacatattacactttaattttacttgtaggctccaaattttctgcaataagtattattagtttatagtcagaaaaaagatatttcttaaaaaaaaaaacaccagaatatatgtagaaatgaagtaatgttagtgttgacaacggagctctcttttcgcacacagaaccgcagactaaatattatctttgtgtagtatgtccctcccgtctttctttctttctttgatatttccatgaactacctttgccctctgttaaaatggaagtttagagtgaattttaaaaggggaaggagggatgtgttgtgatttttcatagtctcctccctctccttaaatagcaacatggtattattttaatggagaactaattattaaaatgtgcttttgagccagcgtttatcacatggcatgtacaagaaagtttgtcatggttttagtcacaatagccaaaaccagaaaacaacccaatgtggatcgataagaaatagatggaaaaatggcagcatatttgttgtggtctgaatgtttacccccaaaatttctatgttgaaacttaatccccagtgtagtagcattgagaaccggggtttggggaggtgattaggtcttgagagctctgccctcttgaataggatgagtgcccgtaggagcttgtttgctccttctgccagtaaggacacaggaagaaggtgccatctgtaaggaatgagccctcaccagacactgaatctgctggcaccataatcttgaacttcccagtctccagaactgtgagcagtaaatttctttggcttacaaatcacccagtctgatgtattttgttatagcagcctgaacgaactaacacaatagtcctacgatagaattccatacagcaatgaaaaagattaaactactgctccttgcaccaaatgaatatgtctcattaacataatgttgagtgaaagaagccagacatgaaagtgtacatactgtatgattccattcatatagagttcaaaaacagacaaacctaatctgttatattagaattcagaatagtggtttcttttcagaggataattattgggagtgggcaagaggaaggctttggggtactggtaatgttctatttctcaagatggatagtgggtacatagatatatctatctgatatatcttcatggtactgtatacttgtgaaatatgcacttgtctatatgtaggttatacagttataaaatttactgtcagatgaagagatcaataaaatcaaactttaatttgggattatagtgtattcttaggtgtgttatagacccttggctggacagactaaagcatggtcaatctatggttcagattactgcaccaattaatcagatctatggaaactgggtaataatcattaacataagcaagaaagaagctgactggtaaaatttcaatacagacaccatgtgctgtgcagtactggctcagtttatgacttgctccagccagtaatctgtgacagtctcatgatttacaaatacagttacaagaaggggctaataaatgtgccctcagggtttaagttggcaaagatgccatgtgtgattaagacaggcaccgagcctttctcacataaaacagtcatcgttactataggttgtgaaaatgccagatcatgcttgaaggtttacaacttcttgctgaagttattttaaaaagtgacaaaaaaggtaagtgatgaaaaggcaataaatgtcacacttctgagggcatctgcggcagtgtcctgtcatgggcggtgaatacatcgagaagacagctttgcagacagctactctatggccctcgttactgaggctgtgcaaaacgtccccattggctcacccagttccaagctgtggtgaatcccgacctccagacctggagttggtgtgcctggtgtcccaactcactgttcctctcagaaatgcccatttggtgaagttcagagggatgcccatcacaagacaccacatgagatccaggcctggccaactgatccactctttccctttagctgccattgttggttgtgagcagggggcgcagcccaggctggggcagagttctccatgggaattccactcacaagttaagaatacagtcttagaatgcaagcccagggctgcctgaggccactttccatgactgcctggaagaaacttgtctggggtagagaagtttgaggcacacagacacagagaagcaaagacaagcagaaataaatcagggcagggctgactgccagccacctgtttcctgtagcttctccttcttttatgtgaaccactccagatctttcctagtcatgccagacaacaaaacgcctttttttcttaaactagtttgaattggatttctgctccctggcaacaaaagtcctaacaaataaaccaatgaacatagaatccggagtacagggaagttacaagtaatcattccggggggagtggggacagaactgtgaacacagttgctgttaccaacaggggagctgagtgtccacatcagtgttagcagctaactcctgggctctccccagtgacggtatccaagccccaggtgtaacttgcctcagtttcctcctttgactcctcccaggttttacaaattttttttacaaaaatctgtatacctctgccattcacctcaatacttttttctctcctccaacactcagctcttttttaaaaaaaattctcaaacacattaacgactgaattaaaaagtcccacccctttaagctccgtgaagtcagggccataaaccatgtcagtgttattggctagaatagtgtctggctagccctatgcattcgctttccctaaactgcaatgccaatgtgaggtgcccaaaattttgccatgtaggttgagctatattatgccaaaactactacatgtttgttaagtgactgttcatttttcatcgcttcattctaaaattctttgatgcatcatgtagaattgagaagaagattacatcccttcatgacagcatttgctgcctggcattattgttgatttgtgtgtgtgtcactaccagactggagaccgtgtcttactgaatttctatgcccagcccttagcccggttcttgggacacacacgagtctgatgcctccccaccatgaacaagccactctgaaaactccatagaaccttgcttctcaaagtgtgatctgtcaaccagcagcagcagcagcatcactggggaagaggcttgcaaatgcagaaggtaggcccaccccaagaactactgagcagaatctgtcaaggtaaaaagttcagactattctggaggtagcaggaggtcttggacatcatggaatagatgtgccaaatcgaggaggttgggaaagggagaggcaggtgggtaccagaaatgcaggtgagaggggatgagggcctcaaccagggagctgaggatgatgagaagtggcatgcagggagagctggagtgaccttgcagagccagaaactgattgatggaagaagggaaggagaagcgggaagaaagtcaagggtgattgaggctccgaatctgttgggctggggtagagaagacgtgagcaccaggggaaggcaggctggtcagctgatgatgcccctgtagggtcccttgcctgcagaccatctccattcatacaagagcccctgggcaagtggaagaaaagcagtgggaaaaccttcacctctgacagggcaagacaagactatcacactttttccttatcccatctttaaactggaggatcatcttggaacttaagatctatgaggtgctctggtttttatatccagaggaggcatgggatcataaaagcagacagctatcaggttcttcatcttagaatccattgatgtggcaaaatgaaaaaataaattaatagtgccacttcagtatctaaatgaattggggtttggccaatgtctgcaggaagcttctacaagaactcagtaaatgatttccatttgaaaacacagctcaaagagcgcttaataagtgcaatttggtgatgataatgatgatccacagagcagcagcatctatccagtcaagcaaatgttcctggggaacagtgataatgaaccaggtccaggaccatgggcaattctaaaagagcgtgcggggcattttgttgttttaaagatctgcttccctaacctgtccaccccgcatccctgctgctgatcgtgaatatcatcctaagcaattcttttggccctgaatgtagtggtttaggtaaaggcgtggaaaagccaggactgtagagacttggagctccccagggaaaccacaggaacgaaataggtcacagggctccaggcagcgctcccctgccccgcccggtgcaagcccggggccgccggctggggtggggcgcgcagcgcggcaggcaggcagggctaccatgcagttctcagcctcctggctccttcgcccctcgccccgcgcccctgggccgccctcgcctgcccgcaccctagagcagccctgacccgtgggggcgcgcggcctcgcggggatcccgcgggcgggcgggcggccgggcgcgcgcggggcgggggcggcgcgcgcgcggggagcgtgtgggccgggcgggcgcggcggggaaagctgggcgcgcgagccgaggctgctgctcacctgcagccgcgccgctcacctgccgcggagtgcgcgccccgcgccctcccggcccgctccggagcccggccgccccccccttgccacagcgggcaactgcgccgacatgcgacacgagtagcccacgcgcttcggaagcaccggaggagccccctcggcctgggcgagccaaggtgaccccctcgatgacccccccgcccccgcgggccgcctgtccccgcaccctgtctgtccccctcgcgtccgactcccgtccccgccgccagggaatcggcagcagtgcatgggcatctgtctgtctgtctgtctcggtacttccattgcacacacctccctctcgtggccctcccgactgccccgtgcgcacggggggagtctggagcccctctttgttccggtcgggggtgcgtttgaggatgtgcacgcgcgcgggggatgcgtttggagggtgggagttcgatggaaataggcgatttaaatattccatcgaggatggcggcccctggctcgagacctgccgctgccgcgtggttttctcggcagcagcccagatgtcaaacagttgttcgttttcagcatgcaagatgtgattttccaatgtgcattcccagcgctgttgcaaacagaccgccgcgagtccgtgtgtgcctgcctcgctcacgctggtgttttgaagtcctaccctgtgttttccccaatgccaaacggcatttttgttgtggggtttaaaccacagagactttggcttttgtttcatttcccaacagttcctcattcccgaagcttgtggcatttggtactggtatctgagcaggggctggctttctgtttgtctgtgtgttttttgcatgatcttggattgtcaccctgctgtatttaaacattaaaaagcctgtcttttcgttgaagaggacaggggttaaaatgaatgaagacctgaaggtcaatttaagcgggctgcctcgggattatttagatgccgct

SEQ ID NO: 6231 - DNA, 6000 bp, Homo sapiens
gtttggggaggtgattaggtcttgagagctctgccctcttgaataggatgagtgcccgtaggagcttgtttgctccttctgccagtaaggacacaggaagaaggtgccatctgtaaggaatgagccctcaccagacactgaatctgctggcaccataatcttgaacttcccagtctccagaactgtgagcagtaaatttctttggcttacaaatcacccagtctgatgtattttgttatagcagcctgaacgaactaacacaatagtcctacgatagaattccatacagcaatgaaaaagattaaactactgctccttgcaccaaatgaatatgtctcattaacataatgttgagtgaaagaagccagacatgaaagtgtacatactgtatgattccattcatatagagttcaaaaacagacaaacctaatctgttatattagaattcagaatagtggtttcttttcagaggataattattgggagtgggcaagaggaaggctttggggtactggtaatgttctatttctcaagatggatagtgggtacatagatatatctatctgatatatcttcatggtactgtatacttgtgaaatatgcacttgtctatatgtaggttatacagttataaaatttactgtcagatgaagagatcaataaaatcaaactttaatttgggattatagtgtattcttaggtgtgttatagacccttggctggacagactaaagcatggtcaatctatggttcagattactgcaccaattaatcagatctatggaaactgggtaataatcattaacataagcaagaaagaagctgactggtaaaatttcaatacagacaccatgtgctgtgcagtactggctcagtttatgacttgctccagccagtaatctgtgacagtctcatgatttacaaatacagttacaagaaggggctaataaatgtgccctcagggtttaagttggcaaagatgccatgtgtgattaagacaggcaccgagcctttctcacataaaacagtcatcgttactataggttgtgaaaatgccagatcatgcttgaaggtttacaacttcttgctgaagttattttaaaaagtgacaaaaaaggtaagtgatgaaaaggcaataaatgtcacacttctgagggcatctgcggcagtgtcctgtcatgggcggtgaatacatcgagaagacagctttgcagacagctactctatggccctcgttactgaggctgtgcaaaacgtccccattggctcacccagttccaagctgtggtgaatcccgacctccagacctggagttggtgtgcctggtgtcccaactcactgttcctctcagaaatgcccatttggtgaagttcagagggatgcccatcacaagacaccacatgagatccaggcctggccaactgatccactctttccctttagctgccattgttggttgtgagcagggggcgcagcccaggctggggcagagttctccatgggaattccactcacaagttaagaatacagtcttagaatgcaagcccagggctgcctgaggccactttccatgactgcctggaagaaacttgtctggggtagagaagtttgaggcacacagacacagagaagcaaagacaagcagaaataaatcagggcagggctgactgccagccacctgtttcctgtagcttctccttcttttatgtgaaccactccagatctttcctagtcatgccagacaacaaaacgcctttttttcttaaactagtttgaattggatttctgctccctggcaacaaaagtcctaacaaataaaccaatgaacatagaatccggagtacagggaagttacaagtaatcattccggggggagtggggacagaactgtgaacacagttgctgttaccaacaggggagctgagtgtccacatcagtgttagcagctaactcctgggctctccccagtgacggtatccaagccccaggtgtaacttgcctcagtttcctcctttgactcctcccaggttttacaaattttttttacaaaaatctgtatacctctgccattcacctcaatacttttttctctcctccaacactcagctcttttttaaaaaaaattctcaaacacattaacgactgaattaaaaagtcccacccctttaagctccgtgaagtcagggccataaaccatgtcagtgttattggctagaatagtgtctggctagccctatgcattcgctttccctaaactgcaatgccaatgtgaggtgcccaaaattttgccatgtaggttgagctatattatgccaaaactactacatgtttgttaagtgactgttcatttttcatcgcttcattctaaaattctttgatgcatcatgtagaattgagaagaagattacatcccttcatgacagcatttgctgcctggcattattgttgatttgtgtgtgtgtcactaccagactggagaccgtgtcttactgaatttctatgcccagcccttagcccggttcttgggacacacacgagtctgatgcctccccaccatgaacaagccactctgaaaactccatagaaccttgcttctcaaagtgtgatctgtcaaccagcagcagcagcagcatcactggggaagaggcttgcaaatgcagaaggtaggcccaccccaagaactactgagcagaatctgtcaaggtaaaaagttcagactattctggaggtagcaggaggtcttggacatcatggaatagatgtgccaaatcgaggaggttgggaaagggagaggcaggtgggtaccagaaatgcaggtgagaggggatgagggcctcaaccagggagctgaggatgatgagaagtggcatgcagggagagctggagtgaccttgcagagccagaaactgattgatggaagaagggaaggagaagcgggaagaaagtcaagggtgattgaggctccgaatctgttgggctggggtagagaagacgtgagcaccaggggaaggcaggctggtcagctgatgatgcccctgtagggtcccttgcctgcagaccatctccattcatacaagagcccctgggcaagtggaagaaaagcagtgggaaaaccttcacctctgacagggcaagacaagactatcacactttttccttatcccatctttaaactggaggatcatcttggaacttaagatctatgaggtgctctggtttttatatccagaggaggcatgggatcataaaagcagacagctatcaggttcttcatcttagaatccattgatgtggcaaaatgaaaaaataaattaatagtgccacttcagtatctaaatgaattggggtttggccaatgtctgcaggaagcttctacaagaactcagtaaatgatttccatttgaaaacacagctcaaagagcgcttaataagtgcaatttggtgatgataatgatgatccacagagcagcagcatctatccagtcaagcaaatgttcctggggaacagtgataatgaaccaggtccaggaccatgggcaattctaaaagagcgtgcggggcattttgttgttttaaagatctgcttccctaacctgtccaccccgcatccctgctgctgatcgtgaatatcatcctaagcaattcttttggccctgaatgtagtggtttaggtaaaggcgtggaaaagccaggactgtagagacttggagctccccagggaaaccacaggaacgaaataggtcacagggctccaggcagcgctcccctgccccgcccggtgcaagcccggggccgccggctggggtggggcgcgcagcgcggcaggcaggcagggctaccatgcagttctcagcctcctggctccttcgcccctcgccccgcgcccctgggccgccctcgcctgcccgcaccctagagcagccctgacccgtgggggcgcgcggcctcgcggggatcccgcgggcgggcgggcggccgggcgcgcgcggggcgggggcggcgcgcgcgcggggagcgtgtgggccgggcgggcgcggcggggaaagctgggcgcgcgagccgaggctgctgctcacctgcagccgcgccgctcacctgccgcggagtgcgcgccccgcgccctcccggcccgctccggagcccggccgccccccccttgccacagcgggcaactgcgccgacatgcgacacgagtagcccacgcgcttcggaagcaccggaggagccccctcggcctgggcgagccaaggtgaccccctcgatgacccccccgcccccgcgggccgcctgtccccgcaccctgtctgtccccctcgcgtccgactcccgtccccgccgccagggaatcggcagcagtgcatgggcatctgtctgtctgtctgtctcggtacttccattgcacacacctccctctcgtggccctcccgactgccccgtgcgcacggggggagtctggagcccctctttgttccggtcgggggtgcgtttgaggatgtgcacgcgcgcgggggatgcgtttggagggtgggagttcgatggaaataggcgatttaaatattccatcgaggatggcggcccctggctcgagacctgccgctgccgcgtggttttctcggcagcagcccagatgtcaaacagttgttcgttttcagcatgcaagatgtgattttccaatgtgcattcccagcgctgttgcaaacagaccgccgcgagtccgtgtgtgcctgcctcgctcacgctggtgttttgaagtcctaccctgtgttttccccaatgccaaacggcatttttgttgtggggtttaaaccacagagactttggcttttgtttcatttcccaacagttcctcattcccgaagcttgtggcatttggtactggtatctgagcaggggctggctttctgtttgtctgtgtgttttttgcatgatcttggattgtcaccctgctgtatttaaacattaaaaagcctgtcttttcgttgaagaggacaggggttaaaatgaatgaagacctgaaggtcaatttaagcgggctgcctcgggattatttagatgccgctgctgcggagaacatctcggctgctgtctcctcccgggttcctgccgtagagccagagcctgagctcgtagtcaacccctgggacattgtcttgtgtacctcgggaaccctcatctcctgtgaaaatgccattgtggtccttatcatcttccacaaccccagcctgcgagcacccatgttcctgctaataggcagcctggctcttgcagacctgctggccggcattggactcatcaccaattttgtttttgcctacctgcttcagtcagaagccaccaagctggtcacgatcggcctcattgtcgcctctttctctgcctctgtctgcagcttgctggctatcactgttgaccgctacctctcactgtactacgctctgacgtaccattcggagaggacggtcacgtttacctatgtcatgctcgtcatgctctgggggacctccatctgcctggggctgctgcccgtcatgggctggaactgcctccgagacgagtccacctgcagcgtggtcagaccgctcaccaagaacaacgcggccatcctctcggtgtccttcctcttcatgtttgcgctcatgcttcagctctacatccagatctgtaagattgtgatgaggcacgcccatcagatagccctgcagcaccacttcctggccacgtcgcactatgtgaccacccggaaaggggtctccaccctggctatcatcctggggacgtttgctgcttgctggatgcctttcaccctctattccttgatagcggattacacctacccctccatctatacctacgccaccctcctgcccgccacctacaattccatcatcaaccctgtcatatatgctttcagaaaccaagagatccagaaagcgctctgtctcatttgctgcggctgcatcccgtccagtctcgcccagagagcgcgctcgcccagtgatg

SEQ ID NO: 6232 - DNA, 6000 bp, Homo sapiens
gagtgttttccaacttggttcaattctccctgtcactttcaggtacagggacaatcaaacataggtttggtcttttcacatagtcccctatttcttggaggctttgttcgtttcttttcattctttttcctctaatcttgtcttcacactttatttcataaaggtgatcttcaatctctgatatcctttcttctgctttggctgttgatacttgtgtatgcttcacgaagttcttgtgctgtgtttttcagctccatcaggtcatttatgttcttctctaaactgcttattttaggtagcaattcctctaaccttttttcaaggtttttagcttccttgcattgggttagaacatggtcctttggcttggaggagtttattattctctgtccagttttgttcccttgctggcgaggagttgtgattctttggaagagaaaaggcattctggtttttggaattgtcagcctttttgcgctggtttttcctcatcttcatggatttatctacctttggtcttcgatgttggtgaccttcaaatggggtttctgtgtggaagtcctttttgttgatattgatgctattcatttctgtttgttagttctccttctaacagtcaggcccctctgctgcaggtctgctggaatttgctggaggtccactccagaccctgtttgtctggatatcaccagcagaggttgcagaacaacaaagattgctgcctgttccttcctctggaagctttgtcccagaggggcacccaccagacggcagctggagctctcctgtgtgagttgtctgtcgattcctgctgggaggtgtttcccagtcaggagacatgggggtcagagacccacttgaggaggcagtctgtcccttagcagagctcgagcaatgtcctgggagatctgctgctctcttcagagccagcaggcaggaacgtttaagtctgctgaagctgcaccaatagccacccatagcacccttcccccaggtgctctgtcccagggagatggcagttttatctataagcccctgactggggctgctgcctttttttcagagatgccctgcccagagaggaggactctagagaagcagttgggctacagtgggctccacccagttcaaacttcccggtggctttgcttacactgtgaggtgaaaaccacctactcaagcctcagtaatggcagaagcccctcctcccaccaagctccagcatcccaggtcgacttcagactcctgtgctggcagtaagagtttcaagccagtggatcttagcttgctgggctctgtgggggtgggatccactgagctagaccacttggctccctggcttcagcccctgttccaggggagttaacagttctgtctcactggtgtttcaggtgccactggagtacgaaaaagaaaaaatcctgcagctagctcggtgtctgcccaaacggctgcccagttttgtgcttgaaacccagggcctgggtggtgtaggcacccgagggaattgcctggtctaagggttgtgaagatcacggaaaaggcatagagtctgggccggaatgcatcgttcctcgtggcacattccctcatggcttcccttagctaggggaggaagttccctggccccttgcacttcccgtgtaaggcgatgccccaccctgctttggctcgccttccatgggctgcaccccctgtctgaccagtctcaatgagatgagctgggtacctcagttggaaatagagaaatcacccaccttctgcgttgatttcgctgggagctgcagactccagctgttcctgtgttcaccattttaacatctatctggctctgtttaattttcgctccccccaaaaaatccatataagaaataagttgattctcagagttaagttccagaagtgtagagatctcacattaaaataacagtttgcctgagtttatcaaatacaaaagtatctattaaatataattgattatatggattcattacctccctttgcaagtagttactctgtatttttccaattctaacctaagaatttttcaaagtttctaaattcccctttggttccttaattagaggccaaatttaatatctggaaaaaatgcagtattcaattatcttcttcctgttcaaacagtccctctgctatggctcttcctcagtagaaacaactggcaacaaaattcaagtttatgattcattcatcagcaaacatgtgagaatcatctacaaagaaccaagaattgtggtaagaattatacaaacatttactatgatactgataataatgaaaagcctaattcaacaaatagtgatctatccatttttaagccccagtaactcaaacattaaaaaactataaatgaacaggccgggcacggtggctcacacatggaatcccagcacttggggaggctgaagtgggtggatgacttgaggtcaggagttcaagaccagcctggccacatggtaaaaccctatctctactaaaaatacaaaaattagctgggtgtggtggcgggtgcccataatcccagctactcgggaggctgaggtgggaaaattgctggaacctgggaggcagaggttgcagtaagacaagatcgcaccactgcactccagcctgggcggcagagtgagaaaaaaaaaagaaagaaagaaaaagaaaaagaaaagaaaagaaaaaactatagatgaatgacttaagtgaataacaagtcaagtgagtaatgacaatatgtagaaaaatattccaagtagaattaataaattttaattatttgaatgagaaaatgccgccatattcaaaatgaaagtaaaagtaggatgagatcagcatatacaactgcatatatttcattaattaaagatgactaaagaggagactatcaatttgaaagaagattactaagattttgtttttttaaaacatactgaaccaaataaaaaaaaaataacagtaagacataactactaacagaaaattttttccaatgagaatacaagcttattaaccactccttttttcattaatgctcactcagcttctaccagccttctaataagaacacacacatacatcttttctataccaaatgtgatataaaagatattcaacccttcaaaattttaagtattggttataagtaatactcatctttttttgtcatttgataatagatgaattttctagtccagacagtagaaatagattatagttcatcaacaaatgacaaaaattgctgagtgtgaaagaatggtgcaaaacaacacaaaacattttactgtaataagttatttttaagctagctaagtaatttatgagaaaaaaataaattgttcttaaattacttaatacccaagaggaagagtttcagcttaaactagaccaaattaaaaaaataataacagtaaggcataactagatctagccttttctgaagaaaatgatatttaaaacaagaaaaacatgtgccatagaggttgtgatatcctcaatctttgaggaaataacacctacatttaagtaccctcaccttacacacactttcttcttctgattttggagtctttaaaatataagtatactttttttttttttttttgagatagtctcgctgtcgcccaggctggagtgcagtggcttgatcttggttcactgcaacatctgcctcccaggttcaagcgattctcctgcctcagtctcctgggtagctgggactacaggcacgcactattgccctaggctagttttgtatttttggtagagatggggtttcgccattttggccaggctgctctcaaactcctgatctcaggtgatccacctgcctcggccttccaaagtgctgggattataggcgtgagccactgcacctggcccaaaatatgagtatactttaaatataaacatataaaccattcatagaaacttttagatggagacaaaatctgaaatatatttcaatatatagttaatgtcatattaaggggttaagggaagagctgggaggaagaaggaagataagactatgaacctaaaattttgccaagtagtaggatttttattctctaaaccttatttcaatcaatttaaggttaaaaaaattttgcttaaaaagatgcaatttcattttgtgcttagaaagtaaaattaacaccacaccaaagataaacattcttgagtttgttcttttggagaaatgagtaatttaaaaatttaaacagctctaaaatattaatacaactgcataggaaagaggaaagaatgttagaaaattgcttatcaaaaactaatgagacccaggataagagctactcataatgataacaattaaatattgagtatttttcagaaaccaagagtcaaatgcttgttataccttaaaggttaaaggcccctgtttcatagtcattaaacagttctttgaaatgctatgttaagatatcactaacaatttcaatttataaatacacacccatacacattttcttttctaaattgtcatatcccaaacacgaaaacaatcgaataagagaacaggctgaatagtgatttttttctttcaattattactactgaaacaaatcaaaacaactctgagaggttgccagcaccgcagaaggcatttccacataaaaagagttaatgagcagaccacgcagttcaacagccagtgaccatttgcaagcctcctaggtatattcccagcagacacattatcagattaaaggaagtgcaaacaaactgggctgaaagtttctttgtccaaacccagcctcttcttcctgtgatgtcatattacaaatctaggaagcctttctttttcacttcagagaaagcgacctcaagatacaactggcaactgaggaaaaggcctcaattcaacaagagctaacaagcttgggagtttatttcggaatctttaaaagactcttctgcttacccacaatctgggatccactgcaggaaaacaaaaaaggaaaacttcatttaaaagaagcaagaagtaaaatgggacaaattgggaatgtttaagtctctgaaactctgcactgaaaagaaaataagattgataacttaagcttaacattctgaggcataaagaaacattaactttggagtattcatcttgactactgaaatacaagtttagaagacaagtggtttcattctggtcacagatcacagcttttctttaaatttataatcctatgggttggactcgttgactgtattttttaaaggttgctcgtcagttaactgagccttggaattcatggattttctaaagactaacaaatgaaaatattttcctgttgaagaacccagcggaaattttacagcaacaaatttcatgtttcttttgggtatttctgagaaaaaggaaatatttataaaaccatccaaagatccagataatttgcaaataaattggaggttatagaggttataatctgaatcccaaaggagactgcagctgatgaaagtgcttccaaactgaaaattggacgtgcctttacgatggtaagcgttaacagctcccactgcttctataatgactcctttaagtacactttgtatgggtgcatgttcagcatggtgtttgtgcttgggttaatatccaattgtgttgccatatacattttcatctgcgtcctcaaagtccgaaatgaaactacaacttacatgattaacttggcaatgtcagacttgctttttgtttttactttacccttcaggattttttacttcacaacacggaattggccatttggagatttactttgtaagatttctgtgatgctgttttataccaacatgtacggaagcattctgttcttaacctgtattagtgtagatcgatttctggcaattgtctacccatttaagtcaaagactctaagaaccaaaagaaatgcaaagattgtttgcactggcgtgtggttaactgtgatcggaggaagtgcacccgccgtttttgttcagtct

SEQ ID NO: 6233 - DNA, 6000 bp, Homo sapiens
atttgtaacttcctattttactgttcaacccattgcacaaacaagctttggcccctaccaccactgaaatggtttttatgtcaccagtgatttcctaactgcctgattcaatcttttcagcttagttttcttttttttttttttctaagacagggtctcactctgtcatccaggctggagtgcagtgcataatcaggctcactgtagcctccatactcctgggcggaagcaaccctctcgcctcagcctcccaagtagctaggactactacagatgcgtgccatcatgcccagctaggttgtttttttttttaatttgtatcttttgtagagacagggcctcattatgttgcccaggctggtcttgaactcctggccttaagcgatcctcccgtcttagcctcagaaagcactgtgattacaggtgtgagccacctgcaccctgccccattctgtttaattcttgaccactctttccccatattcttttcagatgctcaattgattggacagtggccagtgggagacagcttagtctcaactagcaacaaaaatctgaaaaccttaatattaattaaggtcaaatgaggaatcagctttatagttctagtaataattacctagtaactataggcaattgttattgcttattttgtacctatttaacgtgctgcgtagtatccaaagaggtgactaaaaactgctctctcttgagatgcagacaatcttgttgaatggacaagactcaagtttataaaactattgtcatttttaaagttattaagcagtttaaaaatgaataaatgttatattgtatggtacaaactacaagtacagcaagtattcaagttagaaaaaatgtatttcttggaaaatatactcatagagtactttattaaacctgaagtaaattataagattcaaatcagagaggtggggcaagaaggatagttcacgcaggggcacttgcaccagcagaagcaaagagctccatttctcaatgatggctttctctattctttggcttttttatactcctcttctaacacttcctttagtctccaatttccacctcgccctgcttccatgggtcaacacacttcacactataactcttcctgagcagactggcaaccccatctcttagctgtgcctcctgtttagatctattagctgcctgactcttcaaccacctctagaaggtcctaacagcatctcccaaattatactgggattgaatctaaggaagaacaaactaaccaatctctttctcaacagttttccatctgccccagaagagtccttttttcaaagaaatgtccacaaggacagttctattttaagaacatttaaagatcatgaagtaatgttcacatggaagcatagcaggtggcttacattggcacaacaatatcatacttattttttcgaagaaacaaagctttgcccttctaaattttcataattaagatccctttcatctagatttggccttatgaagtgatctgtctgactctgctttttctagacagactaaaaaatgcctggaaatgaaagtacttttccagctaagtgagttgctttcagaactaaaatccagggctcaaacttctagtactctctcgccccactataccataatgtcatccttctcaccaaataaatattataggaatctggaaggcatcacaatatttgaattcattgccaacagagtatagatcacacagattgctttatttaatcagtacatcttaactgagcaattcattttgaaggcagtagaaaataagttaacaatttttcaaaaatcaagacaattcatctcatgagaatactgctattataccaaacatatcatattgtggccaaagttataaaaaagtcagacaagaccatacatggttaggaatgataaggtcagtcatggttggaatactatctggagcatgatcatctgaagttgaatatgacgatgttcaactgattggacagaggctccaatcaggaaatagagtggtccacgttgtcatcaactatgtgttcctttctaaataaaactctgaataagaaccaagataatttctaatattttaccccggctaacccccaactgaacaattaatggctctttggagaatgctgtaatactaactctgctttctatgcagagttccacggggctttttggcgcaggaggctttaagatgtcagtgcttcctagttagagaagttttgagtttcttgattgtcatgacgataaaccccatttcctgctttaaaggaacaattgcagcacatcacacaggtgacacctgtgccgctcaagtagctataaatttaaatgctagaatcttgttctatttgcttctcattttaaggaagagagtgcatttctgaatctgggcaagagaacaattttaaatagaagttgaattttaccctcatataagtctttgatttagggttgttaaaagacaacctcaaggtcctaaatttgaagtttaatatacaatctaaaatagtgacatcactttctaatgcaagttgctttaaagatatatattattctctttacatagggactaggatctttattggttagtattttttttcctgcaaattactattatgtagagaaagaatttgagttgtggtaagacgtaatgtttaaaggtaaacattaaaagatataagacacaattcattcataataatcatcttgttgatgaagccaatttagagtattggattacagtatactgttgtctgagacagcaatagtttcaatcaaatgacctagccacccacagaatgtggtagtaagaacagagggcttggcacataggttttacacagacctctatggctctgacctcgggcttgtcatttggaccactctaattctgtgtcctcctttgaaaagtgaatacataggactgaattttttaaaacgtcagtttaaaaaattatagtaaaatacacgtaaaaataaatgtactatcttaaccatactgaagtgtggttcagtggcattattattgtgcaacaatattgttatgcaaccaccccaccacccatccacagaactcttttcatctaccaaaattgaatttcatactcattaaacaatagctcctcattccctctccccacaattcctggcaaccattattctaatttctgtctccataactttgacaactcaggcacctcatataagcagaatcgtacagtatttgtgcttttgtggctggcttcttttgtttagcataatgtcctcagggttcctccatgttgcagtatgtgtcagaatttccttcatttttaaaactgaataatgttccatggaatgtatacatcacattttcttcatccattgataggcacttgggctgcatccacattttggctattgtgaataatgctgctatgaacatgggtgtgcaagtatccgtttgagtctcagctttcaattctttggggtatattcccagaagcagaattgctggcttgtgtcataattctatttttaatttttagaggaaccattatacttttttttttccatagcacctgcacaattttaactttacaggactggatatttttaaatgtcctttccatgtctagagttctaggacccagtacttgtttttcaaataacctctttaagtcatttcctcgttagctggaaatcctgctcaccatggaaaaacactgggatgtcttttacttcagaaagccttcatttgggtttagtcccctcccagccccttatttacaagtggcaagccctaatcatgtttttaatttatttcttgttttcctataagacatcagctcctggaagcaaagattatgtattattcttcaatatctccacggtgcttgacacagaataatcaaacagcaaatgtctgatcaatgcataggtgggaacaaaacagggtcaactatttccagatgaagaattgaaaaaatgattaaacatagtaaaattagagaacattttttctcctaatgcaaaatattttcctggagaggctggaattcaaataatcaaaatgataagcatgataataaaaatgcctaactagggctatcccaaccatcagccagggcggaatctttccacctgggccctggtgggacacctaacctaacattcttgctcctgctggctggcattcccagaggatgggctatacatggtgtttgatgcccatcaacatggaagtgcagaagagacattcaatgcccgtccatggaagagcgaagaggggcattctccaagcacccccattcgctaatacagtgaactctttgatgctggaagagatcttgaagttcaacggttcgggaggcgctagtatactggacgatgtggctgaggttcagagaagagaaaaggcgaatcctaagttatgtagcaagaaggcaacctactccctagatctggagatacagacaaacgctctttgcagggatagaaactatttttaagccaccttgctaagcgctggagggcagggttgtaattggatacagggaaatgacaacgcttcagtaagtcgcctccatcccacgctaaataagaggcactggacgcctgggcgacagagcgagactccttctcaaaagaaaaaaaaaaaaaagaggcactgggctgtaggagagtggtgaaatttctggaccaagacaaggcggccacaaccctcctggggcaacaaccctcccgccgggctggttttttggaacctctgcaaacactttctcctgggtcagtttcccgccaaaccgggatggaggatgtccagaggtcccgggagtggaagccgctgtccctgtgtctactgggaagtgggcgaggcgggatgctgctggccaggctgctcggggcgaggacccgagaacacgcacttgctcgctgggcctcggaggggtgggaggggcggggcggtgcgcagcctccccgggacaggtctgcggtccgggaccaactaggctgcacaggcacgctgggcgcatgtccgcctcgccggggctgccaggtgagccgcgcgtgatcggggagcggggcccaccggccggagggagcgggtataggggaccctgccctgacccggagggagacgggaggtgcccgaggagcaggggaaagagcacccccgcacgtccctgcagcaggcagggtcggacggagcagcgcccccttcttctctggaggcagcaggagcaccccagatcctgtggcgggaggcgaagtttcattttagggaacaaaaagcccagggcgagaagacatttgacttggagagaactgggggagttagggatctctgatttcatctcacactttttttcacacccaagtgaggggtctgggaggtgggcagggagagtgcttaggagacaaacagagttaatccctcaccccattgatcaccgccctgctgaatgttctcaaagctcaccctgcatcgtggtggactgtgtggtgttggaaacgaccaaagactctgccccacccccacccccaacaagcgaggaaaatgtttcccctgaaatgtctttcttctctgtcttgttttttgtttcgttgctatggattcgtgaactagcttgtaatggtctctaaacctctaacttgtatgtataatatttgcgtgtccatgcatgcatttttctgaagcgagctctcagaagttgtatttgtttctcccgaagaataaataggcaaaaccatatctttgggctgcatcaacatgacctcttaatagtcttcagggaaactgagttgcagattcttatttaacgaattggggattggccgggtgtgtggctcacgtctgtaatcccagcactttgggaggctgaggcaggtggatcacctgaggtcagtagttcgagaccagcctggccaacaggctggtgaaaccctgtctctatacaaatacaaaaaattagccagacgtggtggaacgggcctgtaatccca

SEQ ID NO: 6234 - DNA, 6000 bp, Homo sapiens
ggaatggcagagatcccagacaccacaattacatgtacgagctgccaggatccagctataaaacctttccttgagaatatcaactcattagcaagaaacagggagataaaaagatggtctattccctcaggagattgtttgctataagtcaaattaccatttatgatgattctctattaagtagggccaacttcaacaaaaattactaaaacgaagtataatattataatgcaaaatacagaaagaacatacaatctgagagtcatgagtaaatatttctgggtcacaccatgtaaactacatactttgcagtcagcatgaaggttaagttagctcaagcatgtgaggctctcagaatcatgcctgacagtcacctctgattacctttcataatttagttaagaataatggcagatataataaaaaatcctaagtaacttgtcttaaaccaacaaccctcaaccttatagatacatgtttacttttactatacaaatggctgtgtactaaaatcctcaaccacacacactattatataggtttatgtttaaataacctgataacacatctcttgttcctttaccttccacaagtccttttttttttttttttttttttttttttttgagagggagttctgctctgttgcccaggctggagttcagcctcagctcactgcattcttggctcactgcaacctccatctcccgggttcaagcgattctcctgcctcagcctcctgagtagctgggattataggcacgcaccaccatgcccagctaatttttgtatttttagtagagacagggttttgccatgttggccaggctagtctcgaactcctgacctcaggtgatccacccgcctcagcctcccaaagtgctgggattacaggcatgagccaccgtgcccagccctcctctttcttctgaaatgcacttcctcatattactaggtgttaactatacagtggttcccccttattctcagaggatacattccaagacccccagtggatgcctgaaactgcagatagtaccaaaccctatacttactatttttttcctgtacatacatacctatgataaagtttaacttatacattaggctcagtacctttgtgttttgggaccattattaattaaataagggttactggaacacaagcactgtgacactgtgacagtaaacctgatcaccaaggtggctatgaaagtgactaatgagtgggaatgtctacagtgtggagacactgggcaaagggaggactcatgtcctggggaggaaggagcgggacagtgagagatttcatcctgctgctcagaatggcatgcaacagaaaacttatgaattgtttatttctggaatttttccatttaatattttcagaccatatttgactgaaggtaactgaaggtaactgaagcctcagacagcaaaattgcggataaggggactactgtatacccatctccatttgcacctctggtaactgtgagatcagaatgtgcagcagaaggctgtgtgcctcacaataaccatggagttctgctcaatctgctgccttggcgactctggatctctcttccaatagtaaaatgtcacactgcaaactctgggcctggggtcccatgggacttcagtggttccaggactgatttcactgccatcacttatatatggttagatatggattcaacttgtttgctgtgaggttaagtgtctgaatgtctacatgtctatacatctttaaaactacacacaaaaattgctaaagacaagaaatttgggaatattaaatttacaatacaatttaggaaaccaaacagaaaggaggtatactaactgggttagaagattatagctgtaaattgttgggacttaagaaaaaccacacatttagacaaatagtttctcaatcttctttatgcagaaactcttactattcaacatatctcccctacacccacacccaaagagcagtcagtttagatacaagtttgagaaacagaaaggaggggacaaaggttggaggatgtcaaggccaaaggataggcctctcctctagttcagaggactctttgtctgcctcacaccctcttctccctggggactggctgtgtgctgactgtccccctgctgggatacatgaacagtaacaacagtggacccctggtccccgcactgatgggaggcaacaaggataagctgccctcacacttgctatgctaacagaacaggaaatattattttacctgtggcatagacaaatgtctaacatagaagcatattttatagtgggaatttgctatacagatctattaactacattctttctcattaaaaactggcttaactgaattatattcactcaaaaactggtttatagggctaaaatcaaaattcacttatggcttttaatatcaaaaccaaaacccaaaactgcagctaaaacacactatttgataaagcaaagggaatcttgcagtctctgggaataagtaaaatccctcttttgcaagtgaaacatttctccttcactcatattccaaagtaagtgaagaaattaaagctgcatgaatggtccctgaataagttcctctgtttggggaaaaaaaaaaattcattaggttcaagtattaaagaaacttgtgtctacattatacaagttgaatccttgacccattgtttacttgctgtcaaatgactgggcagtttcttttcactataattccctgccaacacaaaaccatcgcgaagatccaggagcacagcgaacgggggtcaatgctatagggctcatgggttgcaggggaggacgacagacctcaggcccttgcctaagtctccccatctcataagctggtcaaagtgtccctgcctgctgactcaaggcccagacatttatccattcctcccccaacctctccatttcttcacctacttgttcagtcagaaattcaaccaatattaaatgcctcttctctacacacatatgcaacacatgccaactctcaaggaatgcaatttagtggaggagaaaaagcaagtaaatatgcagtaacaatgcaaacatgtgccactacagggataggtaccaagtgctaaggaaacctgcagggatgaacaaccagcccagcttcggagggcagagaaaccagcccagcttcggatggcagagaaagcttcctgaaaaaggtagctacaagaacaaagagcagcaggccatgccatcaggtgggagacagtggtgaggaatgccacagtgggtggaacagcatgtgagaggcaggaagagcaaatgtagccagtccagagggctggaatggagagcaagatgaggaaaaagtgagagctcaccccaacctgaagccaggcctatggagagccctcaggtgctcctggatgcctcctctaagagtctggcaattcagaaacaagaatgcccctgtgcaccgtgaagaattcaagtcttgatgaaaggactcttctagacacatgccatcaatgtatctgttgattttagcagcaatggggaagctaatcaatacttaattttagaaaagtcctaagctatgtgaataaggcaaaggacagattaggtctgcatgcaggcagatttctgtccagctgaaacatcaaactcctgtgtgatgaatgaaatataacatcacatataaaaaactgatgaatgtgattcagccataagaagtcctatctagtggacagatcaatataattacctcataagaagttattacagcgggagaaactggacctggctttaccttgagttcttaagcaagtaactggccttcaatttcttcatccacacaagaaatagttgctatggttgtctccaacacttctaaaacccatcattctggcaggttgtaacaatcaaaagtattttatcaccaaaggcaaggatttaagtaacttttctaagccacagatttactatggttttgtctgagaaaaaaaaaaaaaaggatggaccccaaactgtctaaaattcaaaaaaacaaatacatttaagttcatgaaccctttaaaaagttgacaaaccatgcataaccaaacataaagataattaaaattttaggataagcaaatgagagataattttttttaagaaatgagaaagtaaaacaaaattaacctaacaaggcaggcagcgattcgttgctcacttccctttctgctggtttcatttcccttcttaggtgaaaacactcttaatatgtaaatcagtccactaaagacttcagagtcctttctgctaagatttgcagaaatttttatgcaaaagaaattatttctagacttccacgcactagaaaagcagacttacaaaatacagcaaactaaagtggataaatgtatgtggcaaagcagaagcaattaatcaaggatcctacttttaagcatttagaaatgtttaaatagtaaaaagtggaaatgtggatattctatgatttttaataacttggtagtaaaaagtgagactccatttaggagtacctactaagtgccaggtactattaagcacttgggatctttctggtttagggcccctacaatcctactggatatagtattatctctatttcaactgtacagaaatgaagtaggaacaaagggttagtcagagtgggtaggtaactagacaaagtcacatagcttataaagcaaagaagctagactttaaacccccttttactcaatatcaaatcttctctttccatagatgatgcagacttcaagcatcaaagtacacaaactgaagaaactttatcctttgtatataattatcttaaatatatgccatcatttcaaggggagcttatgctaagtgtgacttcataaacaaatcatttgtgaaagagaaaaaccacatccagggtaaagtcataaggtgaaaaagcctatttcagagagcacttcctgaaagagacaaagcagcaattaaagtcagcccagcaccaactccgacgccaagcgttacactggaaactactttttaaagcaacaaaagagtctaaaacaaaatacaacatttcttaaatacactgtttccagaaagagctattttaacagaagcaactcaaagatatcccttcgacagaagtggaagtgctgaaaaatgctcatctctcacacagacttttgatggacaggaggtaagcagcatttaattaacttcatgattattgtcaaaagtaatgctttatgtactgcatttcaaaaatcatttcattttaataatacaggctgggcgcaatggcccacgcctgtaactccaacactttgggaggccaaggcaggaggatcagttgtgcccaggagcaccatagtgagaccccgtctctattaaaaaaatatatttaattaaaaaaataaacataacaaactatgttggtgaaagaccttgaaataggctatataatcatctttccacattaatatgattttacatttattttcaatattgctttacattaatactaaatgtaatttttttcaacttaaggaaagaaaatgtttatggtaaatcatatgtatatttaggaatgttcatcacatgttttcaattacattgtttcatgaaataacttaatggtttttaagaaaagaaaagctacagataatcatggtatctatagcttttaaaaagctgactttaaagtcaatcacttttcaatatttatccaaaaatttctgtgtttgcagagcacaatcaatactataatgcctttaaaacacatgcatcactcattttttttcaaacgtcagcaaatgaatataagtattggtgacaagctacataaaaacagcttgagcataacgtgggaaaaaagactcaagatggtttgtaagtacaggacttatgtcacaaaattgaaggatgaggataggtgaagggagtcctgatgcaatactaaaaaaagaaaaacaaatacaaaatttcatttatattataattgctactatttaata

SEQ ID NO: 6235 - DNA, 6000 bp, Homo sapiens
attactcagtctgtgttttattttcccacttttgggaaaatggcaccagaaaaaaaagaattatttcattatcacgagaaaaatgcaaaacatatgtttcacttctacaaagaactgtccttggtgccatttttgtggaaacacaggaccctcctggcctcttgcgcaatttctcatccttgatagagactacgttattttaaaaaatgcactgtcctctcaattctactgttaaaaacaaaaccaaaccaaaatacaacacacacaaaacaaatgtgataaatggcagccgcatcaactgctatcaacacaaacgcagcaaatgctagaacagggaaaactccagccagtaaggcctaagtgcaggcactgtgtcaggactggggacacagagatgtgagatacacctggctagccatccagtgagaaggatggcagggactgggtggcagacggaggtgcacggcacagcgggttcctacccccacttgcccagtctagaattcctcacgtatcagtccttcttcccaggctgagcaccccaggacagggaagaagaggcagtcctggttctcctagcacctggcacaatgcttggcacagtttaggagctcactacatttagggccacaaaataatccttattctagaacaactgtatgactcacatttgaattgactatacagagttctcaaaaacctcccattagattattaattctgagagaaagcatcatattttatctaggtttgccaaatgcagattcttatacatgatccatattcaatattggttggattttttaaaattaacaaagcagtttttaaatactacacagaagaactgcttttgtccaattataaacccaagcacaactgattaaaacagctgggccttcttttcatggaaaagtatgagttagtcactcctgggcataaatcttccaatgcctccccacctacagtcatgacaaagacgtcccaggccctgaatctccatccccattctgatcctgtgctccgcaggacagcaccttctcagagaggtcctccctgactgccccatttcaaaccgcacctcccgccctcacagccttccccctctgcattctctactctcttcctgactgtcctcccccacagcacttacagccttctcatcactgcctatctatcttaaaagtagaatggaagcttcacatagatggggattttggtctgttttgttttattcccactgtctagaattgtgcctggcatagagtaaggtttcaataaatatttgcagaagaaatgaattttcctttaaaacagtaaaaccatacagcagaacttgccttttgttttaaaaagcccccttcctttttatcatttttaatgggattaaaacacatggtttcatatgtagctcaaaatatggcctgctctcttggtgattatagaaccctatttggggagccaatcgcaccagaggtctcttaccacagaacatgcccttggaggcgcttaattcatagaagttcttctgtttacatttagtaataaagtacaaatagtgatgttataactaaataacctaaagcagagttcttttttgaggttacatttcaacgtaaactaaaaaaaatactggtagaaattttaatgaccacagtttacatttcacataccaatagaagtttaaaaactcctttaaaaatattaatcactgtataattttaaatgatgactaaatactaggccacacatacacatttcagaccaaaattatatgggctgttctgcagaaattttccgttgctatttctacacacacagacttcacaaaataccataatgttattagtcactgaccagtctttttcttttccttattttatgacaacatctgttctctatactgtcaacagtaattcagtttgacctttttcatactgtgaagaactaccttctggaagccctttctggcttaagcagatgaggctggtagcacagaaaagagaaagcaggttataaacatttcatccatcctttctttttttcttgagacaccggtatctgtcagtcacccaggctggagtagagtgcagtggcataatcacggctcactgtagcctctaattcctaggctcaagcaatcttctcgcctcagcctccagagtaacagggactactggtgtgtgccaccacacctggctaatttttaaactttttttagaaacagggtctcgctgtgttccccacagtgatctcagactcctggcatcaggcaatcctcctgcctcagccttctgaattgctgagattacaggcgtgagccattgctaattcatcctttaaaatcactaatatttactgagcatctactgctatatattcatgatcgcactcgatagaaaacataaaataacagagacaccttgttaaggttgcaaatgtccatttcacttcttctatagaaaaggtcactggatgtggtggctcatacctgtaatcccagcactttgggaagccaaggtgggcagatggcttgaggtcaggagtttgagaccagcctgggcaacataatgagaccttgtctccacacacacacacaaaaaaatacaaaaattagctgggcgtggtggcatgtgcctgtagccccagctacttaggaagctgaggtgggaggatcacttgagcccaggaggcagaggttgcagtgagccaagatcgtgccactgcactccagcctgggcaacagagtgagaccctgtctccaaacaaacaaacaaaaaaactgtaaaggccaactctacttttacagtacaatcacaactcaagaaaccctggtaactttcaacagcaataaaaacaaggtttgtgagctcatgaaatgatctaatatacagcttcagcggcctcttacaggataatgaccccatcacctcttcttcatctgcctgactactctgatatcaaaaaaaaggggctgggcacggtggctcacacctgtaatcccagcactttgggaggccaatgcaggcagatcatgaggtcaagagattgagaccatcctggccaacatggtgaaaccttgtctctactaaaaatacaaaaattagctgggcatggtggcatatgcctgtagtcccagctactcgggaggctgaggcaggagaattgcttgaagccgggaggtggaggttgcagtgagccgacagcacacccctgcactccagcctggtgagagcgagactctgtctcaaaaaaaaaaaagaaggttgggaggacagatccagtttgtcagaggaattacttgaactagctgagtccttcactatataaaaatgttttacttaatataactatttcaaaattaacaggcaaaaccccaccagaatggtctttcaacaaactgaaaaatttatcaacagtgtcttcttcaagtactctgcagcctaagttttaaatgaactagttctagaatatgatgtcatgtttatccaccaagtcataaaatctctgtattaccccctcatagaatttttgtactaggaattaccttggagatcatttagttcaatacctttattttatacacagtgaggtggcggcccaaagaattcagctgacttgcttgatgctctttcttgtgtctgacaatgttcctccatactcacagcactttagacgttagaagaacctaatgacatctgtgggaggcaaaagctactcgactatttttacagaatcctggagcagaaaggcttctgagatcacagagttacaaattcctaccaaatgattcaattctgtttacatcatccctcaaaatcatcaagtttactcaagcatctaaataagaaacagcatattccatttttcaaaataatcacaacttttgggaatgactctcatcttttgatccaaaagctatgtccagtaacttcttactgaccctcccgctagtctctggagttaggaagactgacacaagcaatgtaaacacttttctatgagagtttccacaagcataaggataatgaccctatgcctacaaagcatacacatccccagcttatttaatcagttctcctaagacctgctatccaggcccctcactgccacaggtgttatctatgtcttcgtaaaaagcagcacccagaagtggctgggaatggccagatcagtcctgactaagtgtaaacatcacctctcctgatctgagtgctacatatctggtaatttagcctacaaataaactgcattctgacagacacgttagttggtttaaactgagtcaactacaactatgaggtgaatggcatgagtctctttcaccctgtgctgaagaggctggattttatctataatgggcctcccttcaactgtttccctgttattcaagtactcacacagcctctgactcaggcagcctctcgactgaaaacggcgactaatccagtccactccacatcctggactgtcactcacccccacgccacagaaacctgtttctttctcataagctgtggataaggtggaatgtgtaaactactccctgataccaagtttccaggtaaaaagcactgtcaaagttgacactattttccttaaaacatttaaaaacccatacttttacatgcaaaatcaatataaaatcatcagtaacttggtcttttttttggttaaggtttattgcttcagtctctttcaaagaattttttgatacttaaacctttacagaaaaatttataaagttccacagatatcaacaattcataaattccaaggggcttttggatagttttttttaatcactataaaaaatttcacttcccatttaaaacaaaaaaaaacacaaagtgcacacacgtacacgaggctaactgctcattacatgctcagtcacagggtgacagagaaaaaaaaagtcaccaccataaaaggaggtctgcacagcctctcttaaaacaacatgccacagttaaaacttacttcagtttggacaactactcacagctactacacagagacccgaacgagtcactgatatgtaagtacaagatcttttgctttttcaacaaactttttaaagaaaaactttaaaagcctaagttttaaggtaaaaggtaaaaaggaaaacaatctatttaagaacaagctaccatcacttctaacaaaaattatattaataatgtaagtttactctctctgctgactggtaggtctagttagttcttataaagttgactgaaagcgatgggtccaccagaaatatctttgtcaaaaaatagggctcacttcatgtactactgtataaactcacaatgacaaaagacagtatcaagcaaaactatgcaaataatgccaatatttcaggataacttagtatgaaggaaaaggaacaaagttattttaatatagaatattcctatgctataggaattattagaaatataagattatttctcaggatagaatctcaggggtagaattcctagggcaaagggtatattttctaaagctttagatataaaacggtactttttggtctacaaaaacattttaccaatttaccctcccgccagcaaagagtaccaatctttgctttttaaatgctaaatactactaattagataagtgaaaaaaaagtctgttgtgtggtttatacttgtgtttacttagactaaacgtatcttttctatgtgcctgaggggaaaaaatcacaatgaattctatgcagtgctttggcaacatttatgtccaggttgggaatggtggtaacagaaacttggcaaaatagaagctgtgaagagacttcctttaaagggcagtgagggttttatatatgtgtgtttgtgtgtgtgttgggggaggggggcgtggtattttgtttttttggtgtcactctgagtacaatatagtgtaataagagcaagggctctgaaatcaggatcaaatgaaatttacaagctgtgtggcccccccacacacaagttacctaatatctggctt

SEQ ID NO: 6236 - DNA, 6000 bp, Homo sapiens
gcaaaatgtgggggcacatactcttattacggggagtggaataattgggaacaataatctaatataccataatatctctaatatgctttttgagtatccacccagtttttggtctggcccgcaatcttgggtcactgcaacctccgcctcctgagttcaagtgagtctcctgcctcagcctcccgagtagctgggattacagatacccgaggatgctctcagtttcacacagaagcaagaatctgttttacttccttctaccctttagacttactttggcgtgtgtgccttgataccaccgggagaatagctgacactatttcctaatctctcaatccatcaatcaagatggacagagctgaggtttcacctaatgaccttcacaactcagattgttcccttccctgaaatgctatcaaacttttggtctgcatttttcattttggttcttacctaacttcttagtattcatatatcttgtgcatgactttattttacactcctgttaaaagatcgttttgttgggtgcacaatctttagttgtcagtaattttttctcagaactgtgagcattactacacttcttctggcttccattgctgttgttggcaagtctactaacattctaattttccctttgtaggtggtctgtcttttccctctggtttcttttatattatacaatttcaaaactgaatgtctaaatatggattcattttatttgccctgcctagtagatgttgtccttgctatatctataaattcttgtattttatcagttctagaaaattctcaataattatctcctgagatattatctcctcttctttctcactagtttctcctatggggactataattagctgtatgttgaaatttttcctgctttcctcctagtctcttctttcattttttttttcattccctgtttatctatgctgccttctgggaagtttcttcactcccttacttccatttacaacttattttctcaactatgttttgacagctctttaccctatccactgagttttaaaattttaggaacatatttttcatttctgaaaattctctttgttgctttttgatagtttcttattccttaattattcttgtgattgcagtctttaaatattttacattccataactgatcatttcgatatttgaagtacatggggttctaaatttattgctttgtttctgtcaacttttacccatatgtcctcggttgatctttgataatgagctaatatttagttgattttaacctggataaaatctaggggtttcaattaagaatatttttcttatacagtgtgcatttcttttgcaatggtgctacaggacaccgcctttcatgtctttagcctgatccttcgtggaagctttggcttagctctcagatttggacactgactcaaggcctaaaagttgtagtgctgatatctgcattttttgcaaacgaatcttgccttttacatttgttcactctgctccattgccatttcagcatttggttcttatttttgtcatgtattttccctttagactcgattcccctcattttgaagactgcagaaatgcaacaaaatttttttatgcaggagctgttacagtattttcaagtaagaagtcttttcagtgtatctaatctaccatactgccagtagtggatgtctcagggttattttttactctgggttcgtggctatgctcctaataattgagcttgccaagagttgaaattcccagacaaatggagcatgacttaaattatttaaaatttagaacatcaaagttagaacacttaagcccaggcatggcggcttatgtttataatcccaacactttgggaggctgaggtgggaggactgcttgagcccaggagttcaagaccagactgggcaacatagggagaccccacgtctacaaaaaatgaaaataaaaaattagtggatgtggtcacatacacctgtgatctcagctactcaggaggctgaggtagaaggattgtttgggcctgggaggttgaggctgcagtgagcaacgatagcaccactgcacaagaccctgtctaaaaaaagaaaaaaaaagaaaccttcatttagactttcttgatcaaaatggaccctgtgccagaactagtttgctcaactgatggacacactgtgttgactatgctgatgagatcatgtgattgttaggtttgctgtgcccacagggtgcaaataaatcttactgaataatgacaatgctataaactcacacataaaggctaatatatagctataatcacaaatacttagctagtatggctgaattcctcagattttactataacttgatttatgataaggaggctattcaagtgagcattgacattattggcctgctatcatgagcttgggattctgatgtttattattctataatttatctttttgaggacagatattatctattcatataatttgttctttgaatatcactatgtcttgttttccccaaaacagaaagtgatactaactgctaatggatcaggttttgtgaataagaggctatataaagtgaaaaggctatagaagtgagaaatgtttacaaggctatactctcattaagtagagtaagtgtttagtaaatatcttaattgaaaacattaatttggcaaggtaatgaattatagcctatataaaaaacaatcacacagttatgaaaatgtgttaaaattagggtttctgaccatttttaagtaaattatgttcttgatttaagaattttatatttaacaatggtttccaagatgtacacaaaaattacagtagaagctaagaaaatgtctgtgccctccccccatcacatagaactaggtaattagtactttcagtaaataaattcccttcaattagccagaattatattgaattgtgctatatagtaaataatatattcacatgaggttttatagtattactgctaaaagtatgggtcctaccaacaggtgactggaatgaagggatgagctgattcaggcaaggatcaataaaaaacacttgcgcagattcgaagttactatcgagtgagaatcagtttgcacaagtctttcatctcagctctgcatgaagcactccttggaacctccttaccaactgtggctttaagaatagactacattcattcactcttatttaaacacatacattatatccctgtgtacatgtcaatcatttcagtttcggtgcaaaaggctggatattcacaccagataagtcaaagttaaaacatattaaatgaaatggtatttcaaagcttgcatgctctacctttaaaaaccagtgagccaaagatgttcctattatttataattattgatttctgaaagtttgtgttaatacatttcaaagattaacattgaaaagcctaacagaaaggaataacgattcaactttttggcaatgtaaatctattgctagggctcgatatcatgaataaatcttaactaatttctttgacatcttgacatttcttatttctccaaaaattacattttcatagaaaatatatttatacttcaaatagacttatgatggtatttaattgcacttaaaaactcatgctcaaaatttcagtaccagaaactagcatccatcatctcgacagcaaaacacaaaacgtaagaaaaactaatcattcctttaagtgaaataaggcaatttttacctaaaaagaccttgaggttagtgagggaaaaaaagatgcttgaaatgtaagaaaagatcctgaagtatttcttttcatctttattctctctgttgctttttcttttgatttgaaagatcagatgagaccacatataaatatgtctgggaggtgtcttagagaacttaactcacttcttaaaaagagaaaagaactaaatacattatgtgataaataaagtattttttattgtacattctgtttgaatccttgttctctcaaaggctagaatgaaagaaagaacaaggaaaaccccgtgttttatgatttgtgacgataatagtcaccacaaggtagtttttttcagtgttgttaggacacagttaacgacaacatataagagaatctgcatcgttcagtcacaaaatcttctcttcaaatcagaactacaaactgtattctagatagatatttccctgttagtaaaatataaactcagacatggaaattctacatctttttggagaagtcttaatgattacactaggatcaacagaatcctacaaccaaaagtcaatttttatacttttaacttgtactaactatgctgttgagaaagctgctttcaggatgtaagaactaaattataattagtgttttctaataggtgtgcaatacagagctggaagcaagaataaaattattcacttcaagaaaaaggaatatgattatgcgggaagtatgtgaagtgaaaatattgtatgaatgttttacagtaattatttaacacaatgccatatatttaaattatcttttcatatgtcatttgaaaacatttaggtacatttgaatagaagtgggtgttctttgtgtatctgtcaataagtagttttttacatttgtttattgcatgaaaatataattgtaaagggtttcatagcctattcagtgtaagcctatatccttcatatttgagaacttcgatgtttggatttaaacagagcaaattgtacatgctttggaggaaaaaaatttttaagtgattaaaaaatatttcttatcagataataccaaagtcctattataccttcttttacacaccataatgaattagtgatcaagaacacaactgtagatttaaactaaaagaaacaaaaaagaaagaacaaaaaagacaggctgcatagtgacaagaatccatctcccttcatgccagtgaggttctagctgtgagcatgctcagaacatgggaggcactgaacttactacatcagaactcctgctgaggtataagaggatacgtctaataactcaattgctgtaaacctatgattgtttttctggtttttaaacatctcttcagcctcagattgattacaatgttctttctacttcatttcatcgttctgatcaatgtcaaaggtaaggttgctactttctcgttttaaatgagtgcaattcccaaaaaatacatttctatgtagttctatggcagttgtaataaatatattggggtgtttaaaaaaaaaacagacatcaaatttgcctggtatttgtcattatctttcattgcttgtagtcccacacagcctagtaatttttagatgcaacaaatttttcatggaaacaagcctttgtatgttattaaagctgtagataaaatatgtcaaaaaacaatgttgactatatcaattaaaacatagaaaacatttttggcatttgttctgaaaagtgtgacaaattaataaactaaaattgtgttttgtggaatttcaacctgttgaaatatgcccataaaattcaagtaattattagtaactatcttgcgtgaacataattaaactgggaactccaaagccacaggcagatctaaaaaacagtatctgtctctaagagtaaacctctctaaaataaagttattaaaagtctatacaagtgcatttacttagataattttcttttgtttttaatttgtggaaatttttatttcagtcaaactcttaagtttcaagtcagtaccattttcattgtaaagctcaccaaaaaataaaacctaaatcttcacttgtttttaaataaaaagatacgttgtcagcctatacattcataaacaacctattaaccacacccaagatttgctggggtttattattattcaaaaatgtttctattttaatttgtattttttcttaaagaattttgataaacctctgagaataaaggttaaaatttgaaattatttttattttctgagaaattcgttttaggttttttaaatattcagttttattaggtgaattcc

SEQ ID NO: 6237 - DNA, 6000 bp, Homo sapiens
actgtaaactagttcaaccattgtggaagagagtgtgccaattcctcaaggatctagaactagaaataccatttgacccagccatcccattactgggcatatacccaaaggattataaatcatgctactatagagacacatgcacacgtatgtttattgtggcactattcacaatagcaaagacttggaaccaacccaaatgtccatcaatgatagactggattaagaaaatgtgacacatatacaccatggaatactatgcagccataaaaaaggatgagttcatgtcctttgtagggacatgaatgacctggaaaccatcattctgagcaaactatcgcaaggacagaaaaccaaacactgcatgttctcactcataggtgggaattgaacaatgagaacacttggacacagggtggggaacatcacacaccggcgtctgtcatggggtggggggagggggagggatagcattaggagatatacctaatgtaaatgagtagttaatgggtgcagcacaccaacatggcacatgtatacatatgtaacaaaactgcacgttgtgcacacgtaccctagaacttaaagtaaaataataataataataaaaactttacattctacatgaagtccatgctgcattttagttaatttttgtataaggtgtgagatttagttcaaggtttgtttttttgcctatggctatccaattgctccagtgcctctgaaaagcctatctttcctccactgtattgtttttgcacttctgtaaacaattaagttgggcatagttatgtgggtctgtttctgggtttctattcttttctgttgatctatctgtttgtccttcagccaataccatacattcttaattactttaactataaaataagtcttgaaattagatggactgattcttcccacttcaatcttctttttcaaagtgtttttgctgttctagttcctctgccttgtcatttaagatttagaataatcctatctatatctacaaaaaaacttacaaggattttactgggaatttcataattttgtatataaatctggggagaattgacatctttattccattgtcttctaatctatgacatggcatgtttctccatttctttaaaactttgatttctttcaccaataatttgtagttttcagcatgcaagtcctgtacatgtcttgtgagatttacacctgtctttcattttaatttttattgaatataaatagtattgcattttaactccagtgtgctcatatgtgtattactagtttataaaatataatatattttctgtttattttgtattctgccactttgttaaattcacttattagctctatgagatttttgttttctttgtgtgtgtgcacgtatgtgtatgtttgtaggtctcttggggttttctatgtaactatgtcatctacagataggaagcattttatctcttcctttctaatctatatgatatttatttcctttttgtgtttttgcctcatttcactggttagaacttatagcactatgttgaataagacagtgagaatgggcatccttgcattgctcctgatcttatgggggagacactcagtcttttactatgaagtataatgttatctgtaggttttttgtatatgctctttatcaagttgaggaagttcctctttactgctatatttctgagagttttgattgtgaatggatattgaattttgtcatgcacttttaaaaatattaattgatatgattacttggtcatggtataattcttttcatatattgctaaattttatttgatggtattttgctaagagtattttgcacctacattcacaggggatattcatccatagtcttttgttttgttctgtattaactttgcctcgttttggtatcagggtaatacttagcttcaataaaataaattgggaaatacctttctcttctattttctggaagacactgtatggaattggtgttaattcttatttaaatagttggcagaattctccagtgaagccatctggatctggaggtttcttttttgagagtttttcaattgagaatttaatttccttaatagttatggggatattcaaattatctatttaatgttcggtgagttatttttcattttatgaggaattagtctagttcctctaagttgtgaaacttatgtttgtagggttattcaaagcattttctcattatccttttgatgcctcaggtatctatcgatagtgttatctcctgttttattcctgacaatggaaatttatgtctgttctacttttttttcgtacctcttgctagagatttgtcaattgtatcaggagatgtaacattttatttaatatatgcaaattttaattcattattgactttgtctattctgctactataagaaagttacctggccaggcatggtggcccacgcctataatctcacggtttgaaggccaaggtgggaggatcacttgagctcagaagttcaagaccagcctgtgcaacatggagatacagcatctctacaaaaaagaaaaaatagctgggcatggtggcatgcacctgcaatcgattgtattgacttttttcaaataaccagtttttcatttcatttttttctctatttttttctgttttcaatttcttgatttctgctctttactatctccttccttttgcttgctttttttttttcttgaggatggagcttatattcttatttcgtgacttttcctttttgtaatgtatgaatttagtgttatacagttttgtcctaatactgcatttgctacatctcacaaatttatattttcacttttattcagtttaatatattttttgtttcccttgagatttcctttttgacccatggattattcagaagtgtgttgtttagttttcaagtgttttgagggtttcctgttatcttgctgctgttgatttctagtttgattcccttgtagttagagaacacattctatattatttcaattatttgaaatctatcgaggtttgttttatgtcccaggatgtggtttatcttggtataagttttgtgaacacataaaagcataagtattctgcttttgttgggtgaagtgttttatacatgtcaatttgatcctgttggttgatggtgtttttagtttttctatacctttgctgagtttttgtctatttgcttcatcaattgctgagagaggtccttgaagtcactaaatatctctcctttcagttttatcagttttgcttcagttttgcaactctgttgtttggcgcatacccatttagaattggtacgtcttcttagtggttaaaccctgttatttttatatagtgtccctcactgtctctggcaatgtcatttgctttgaagtccattttagttaatactgaaagagccattccttatttcctttgatttgaataacatgcatttttccatccttttactttcaaccagccaatactgctatttgaagtgtttgttataggcggtacataattcggtcatttaaaaaatatattccattcctctatcttttaattggtatatttagactacttatatttaatgtaattattgatgaatgagggatgtctgccattttattttttttctgtttttattatctgttttctttttcctgccttgttgttggttatctgaacactttttagaattccatttttatttatctgtaatgtttttgagtgtatccctttgtatatcattttagtggaagctctaggtatttctctctatatatataatatatatgtatataaagatatacatatatatatatcttatgatagtctattagcatcatcattctaccagttcaagtgaagtatagaaaacttcttatttcctcttatgtctctttgccttccctcatttataatataactatctcaataattcctctacatccatttaaaaccacatcaggcagcattaatgtttttgtttcaaaacattaaatgtaacttagactctaaaagggaaggacagcctattgtatttacacatattttggcttaccatgttctttcttattttctaatattctaagtttccttcttttataaattcctttctgtttagagaacttcctttagtcattctttgtttgtttgttttttgttttgttttgttgttgttttttttttttttgagatggagtttcgctcttgttgccccagctggagtgcaatggcatgatctcggctcattgcaacttctgcctcccaggttcaggcaattctcctgcctcagcctcccgggtagcagaggtgacaggtgcctgccactgggcccgctaatttttgtatttttagtagagacggagtttcaccatgttggccagactggtcttgaactcctgacctcaggtgatctgccagcctcagcttcccaaactgctgggattacgggcgtgagccaccaaacccagcctagtcattcttttaagataggtctgctggcagcaaagtcttagttttccgtctgaaaaagtcttgatttttctctttgtacttgaaggatatttttgctggacatagaatactagtttggcaggtcttttctttcagcatttgagaaatgtgccatttctttctgtcctccatagtttctgatgagaaatctgctattcagtagttttaggctgcaatatcatagtaaggtattcatgtcaacagggtcagtaggtcacaagttctctaagtttgaagcgtcagcttcaaccaaacaaattaatggctattctacattcaaaaatcaggaaatttaaatttattatgaaatgtaatgcagcatgtagtaaagacttaaccagtgttttaaaactcaactttcaaagaaaagatagtattgctccctgtttcattaaaacctagagagatgtaatcagtaagcaagaaggaaaaagggaaattcacaaagtaactttttgtgtctgtttctttttaacccagcatggagagaaaatttatgtccttgcaaccatccatctccgtatcagaaatggaaccaaatggcaccttcagcaataacaacagcaggaactgcacaattgaaaacttcaagagagaatttttcccaattgtatatctgataatatttttctggggagtcttgggaaatgggttgtccatatatgttttcctgcagccttataagaagtccacatctgtgaacgttttcatgctaaatctggccatttcagatctcctgttcataagcacgcttcccttcagggctgactattatcttagaggctccaattggatatttggagacctggcctgcaggattatgtcttattccttgtatgtcaacatgtacagcagtatttatttcctgaccgtgctgagtgttgtgcgtttcctggcaatggttcacccctttcggcttctgcatgtcaccagcatcaggagtgcctggatcctctgtgggatcatatggatccttatcatggcttcctcaataatgctcctggacagtggctctgagcagaacggcagtgtcacatcatgcttagagctgaatctctataaaattgctaagctgcagaccatgaactatattgccttggtggtgggctgcctgctgccatttttcacactcagcatctgttatctgctgatcattcgggttctgttaaaagtggaggtcccagaatcggggctgcgggtttctcacaggaaggcactgaccaccatcatcatcaccttgatcatcttcttcttgtgtttcctgccctatcacacactgaggaccgtccacttgacgacatggaaagtgggtttatgcaaagacagactgcataaagctttggttatcacactggccttggcagcagccaatgcctgcttcaatcctctgctctattactttgctggggagaattttaaggacagactaaagtctgcactcagaaaaggccatccacagaaggcaaagacaaagtgtg

SEQ ID NO: 6238 - DNA, 6000 bp, Homo sapiens
atgtccttgggagctattaaagaatttggtctgcctaggcccaagatatcatgctgacaatctggaactttacctgaaatttcccaattgtaaaaggttggttcaaaacattatgaaatggccaggctccgtggctcacatctgtattcccagcactttgggaggcagaggagggtggatcacttgagcccaggagttcaagagcagcctgggcaatctagggagacccccatctctacaaacttcatgccttgctcttatgtggggaaaagagtgtaaagcctgtggagtgtttacaagtttacataagtaaactattgtacaagttacggatgtatttttttttttttttttttttgagacggagtctcgctctgtcgcccaggctggagtgcagtggcgggatctcggctcactgcaagctccgcctcccgggttcacgccattctcctgcctcagcctcccaagtagctgggactacaggcgcccgccactacgcctggctaattttttgtatttttagtagagacggggtttcaccgttttagccgggatggtctcgatctcctgacctcgtgatccgcccgcctcggcctcccaaagtgctgggattacaggcgtgagccaccgcgcccggccgttacggaggtattttaatgctcctcacaactttccagattcttcaatttgcccataaaatctggtttctgagaaagacactggaagacactttcctagcagaatccagatcataacctagcattctctgcagctggtggtgctatggtctgtatagcaagaggccacccagcacagtagttatgcccatggactctggaagtggacagcaccacccttactggctgtcccagtgacctggggtcacttctctgtgctttgctcttctcatctctaacatagagatactaaaagaacctgctgccttggactgctgtggaggattaaatgcattcagatatgaaagtacttggaacagtgccttgcacacagcaagcattagctttatattcatccagaccatccctttatattcatcaaaagccaacaagtgaggcctccagcccggggccaagagcctattgatgacaccaacctcttgcctctggggacgcaggccgtagctgggccaaacctagacccacccttgccccacatgagttacaggtggagaggtactcaaagagtaaagaagagagacgcccatgctcccggtctactgagaacttcctcttcctctcgctagattaactatgaagtcaggaagctggtgaatgtctacagaaacacaaagtagaaaacagatctggtcccattccttcctaaaacattgaatgccaacccatcataagagctcagatatgtcctaagggccaagttatgtttgaacctcagcatagcaatgttatcaaaaaagcccgctgggtctccacctctccatatcagtattctgtcttaagctgaagtatcagtgactacttactgagcacccactacaatcagagcactgttttaacggctaggaattgtaaagaaaacaatggtacctggttctacagaagctcattcattctccaagttaacaaatatttattaaattctcactttgtgccaggcactaaggaaacagcagtgaacacagcagattaaagccctgccttctggtgcacataatgttgggagatagagatagataataaacaaatagctaggtaaattaaatagtatgtcagttgataataagcaatatggagaaaataccatagagagggagtgcctgaatggaggtgagtaattcacaacagccaggatgctgactgcagactcagtgagcctgcctcagcgccaccatggtgggtggggaagggaataagggaggcttcagcagaggctggggtagtccatcaggccaaggagcaaatgggaaaaaccaaagagactcagggattcgcagcccatgagagccatggggaagatgtcaagtgctcctgatagcatcacctgagtccaagaaagaagctacctcttcactagccacaggcccatgcgcccaaggctagcagagccactggtgaccaggcaggaagggaacatggaactggagtctagcaaatgccagcccctgacaccccaggagccggcgtgaagcttcataaggacctctccctctagctttaagccactgacccctctccccgtacacctgggccaccttgaggaaaggcatgatgtctgagagaagggaacactgcccagaggggctgcttaactgatccgcctggatcatgccttacctaggctagagcattcatttctcttgttgagagcacaggggaaaatcaaatcaactataaatgaagaaattacattttctctgcctagggggaggagacagggaggaagaaaaagtggaaactgtgagtacagaaactattttgaggagttttgcatgaaaatgatccaggagagaaaaactgatgacaagagagagagaaagagaattgacgcagtgatgtctggaggaggagaaaggagcacttaaggggcagagctgacttcagctgcaagtaccaccaactgtcccaggggagcacgagcagaggtgggggtgtggtagttatcttcagagaaacagggtgcaaggaaacctcccaaaggaaggggtggtgggtgttgggtctaaggagagaggagggggtataaaccagcagcctggtggtgggagagtgaatgaggtcaggtgagagttgggaaggccgggggaacgaagcaccccgctagaggttgtgctttcaagtgaaacaacgccatgtgagagcaggcaaggagtaggcagggaattcggcttcaccagggttgtggtgctcttggtggatggacgaggctgacaatggagaaaagagcaagggagtcgagggcgtctgtgtgggagtgatggcgactgcccgtggaatttacgttgggtaaaggaagaaagtgaagacctggggcaggcaagggaccgggaaaaggaaggaggagccagcgatggaggtcgcagtgggttgaaggattaccggaactgaggtgctaggggaagagagctaaaaagagagcgggcggaggtcagaaagagggctgactgaagtggaggtggaggaaggctggcaggcaaccgtgaggtgtaagttccgtcgacaggcgcggctgagatcgggtggagagcaaggtcataggtggaaaggaggtcaacaaactagaggccaaggcattccaagactcggcatgggtgtgaacggccgcagatgcagtgcttcaaagagagcgcaggcacctgtccctcagggactacgggtgaccacggaggaaagcgctagggagggcggttttaggaccgctggaaacagcagcgatgagggaggcgacaggtgtccctcctccaagctcacagtctgcatgtgagagagaactgcaggagaagcttgccctaggcaaagccaggtgtcaggtccagaatcgagactccagagaagaggttgaggatttaagccactgagggggtggagctgggcagtgagtaggacgtcaggcttgcaagctctgggattaggccgaccagagcccatatcccagtcccgcctcttactgcctgcttgatctcaagcaagaccgctttgttcatgggcgaaaggagcgccccgggccatgaggattaaatggagagcacagggccagatccatctaaattctcagtaagtgttagctattgttattaagaccacaccgaacagactgaacatccgttttagcccctttccccaattttcgttctttccggtgttgacaaatcctctagttttttaagtttataaaacatgttgtacataagaatgacatatcacatgtgaaagtactctagtgtccacgtaaatatttgtcttgttctttataataagtaaacatgctcacggatccttgaaattatctggtcactgccgggcgcggtggctcacgcctgtaatcccagcactttgggaggtcgaggcgggtggaccacctggggtcaggagttcgagaccaggctggccaacatggcgaaaccctgactacacaaaaaacacaaaatttagccggggcttgggcgctcctgtgctcccagctactcaggaggctgaggtgggaggactgcttgagcctgggaggtcgaggctgcagtgagctgtgatcgcgccacttaaactccagcctggacgacagtgagaccctgtctcaagaagaaaaaaagaaagaaagaaagaaaaaaagaaaaaaaagaaattatttggtcaattatatggtcagctccctccaccactcgcgaatttacagaagaggagaactgggctgggcgagaccaggactagcccaagattacacaagttactcggttgtagagccaggattagacaggagaggctctagattctggtctagactcccctcctattatttagcattatggcttcctgaggattaccatgagccctcctccaccgtcaagcggcagctaccagccaccagaccagatcccttcgaaggtgcccggagtaccagactgacaaaagcgcccgtacagtgctcagtcctgtaaccaaagctgtctagggtgcagacatcgctcaccggaccgggtagggctcgtgcgctaagggcgccgggtattccagttagtggagagggaagcgccctggaactgcatgggcccgggagagggcgcgggagcggagcagggccgggccggggcgggccgcggccgtgggcggagactgcgcgcagctagctcgggagcgcctcggagcccaccccgcagagccgcttctcgcgccccgcagcgcagcgcagcgctccgccgtctgacctgccgcgcccgcagcgtgcgggctgggaaaggaggcgctcaccgagagggaccacgcgccaggctcccagcccgacccgggacgcggcggccgcgcggagcacccatgggcagcccctggaacggcagcgacggccccgagggggcgcgggagccgccgtggcccgcgctgccgccttgcgacgagcgccgctgctcgccctttcccctgggggcgctggtgccggtgaccgctgtgtgcctgtgcctgttcgtcgtcggggtgagcggcaacgtggtgaccgtgatgctgatcgggcgctaccgggacatgcggaccaccaccaacttgtacctgggcagcatggccgtgtccgacctactcatcctgctcgggctgccgttcgacctgtaccgcctctggcgctcgcggccctgggtgttcgggccgctgctctgccgcctgtccctctacgtgggcgagggctgcacctacgccacgctgctgcacatgaccgcgctcagcgtcgagcgctacctggccatctgccgcccgctccgcgcccgcgtcttggtcacccggcgccgcgtccgcgcgctcatcgctgtgctctgggccgtggcgctgctctctgccggtcccttcttgttcctggtgggcgtcgagcaggaccccggcatctccgtagtcccgggcctcaatggcaccgcgcggatcgcctcctcgcctctcgcctcgtcgccgcctctctggctctcgcgggcgccaccgccgtccccgccgtcggggcccgagaccgcggaggccgcggcgctgttcagccgcgaatgccggccgagccccgcgcagctgggcgcgctgcgtgtcatgctgtgggtcaccaccgcctacttcttcctgccctttctgtgcctcagcatcctctacgggctcatcgggcgggagctgtggagcagccggcggccgctgcgaggcccggccgcctcggggcgggagagaggccaccggcagaccgtccgcgtcctgcgtaagtggagccgccgtggttccaaagacgcctgcctgcagtccgccccgccggggaccgcgcaaacgctgggtccccttcccctgctcgcccagctct

SEQ ID NO: 6239 - DNA, 6000 bp, Homo sapiens
aggattcgagaccagcttggccaacatggtgaaaccctgtctctactaaaaatacaaaaattagccgggcgtggtggcgggcgcctgtaatcccagctacttgggaggccgaggcaggagaattgcttgaacccggaaggcagaggttgcagtgagccgagaccgcaccatcgcactccagcctgggcaacaacagcaaaactccgtctcaaaaaataataatattattattacagacagcgcagaaggcttgcaatcatgataaagatattccctaggtcctacgctgatgtcttattctattctctcctttgctcactccgccccagcctccccaccctccttgctcttcattcaatgtgccaggcatgctacttccccgggaccttgattgtctttccccagatgtctgcctagtttttacccttacttccgttttcagcttgaatggcatcctattgaccaccacaattaaaatagcgagctctgcccaaccctgccgaatcatcttatccttctttatttttcttcctagcactcaacatttacattgatgtcactgccctctgtttagtgttccatgaggtcaggggctttgttttgttttctgctgtaatcgcatgtccttagagacttggcacagaataaatgaccattaaatattgtcgaatagataaatatctttttttccccaccataatgtttggcaaagctgaaaacgaatggaaacatccagtacaggtgtatatgtggaagaatcataccacaacctttttacaaggcaaagtggtaaaacatatgaaaatttcaaatgttcatattctatgaccccctcaaattccatgatgtataatatagataattgttcattgctgtattgcttgcaataatgaaacactggaaataatctaaatgtgtataatgtcttctaacttttaaaatgcagtaaactgctatatagcctttaaaaagaatataccaacatggaatgaagaccaaaatatattgcagtcgatacgtacagtttttttctgaccagactcctccccccactgtcctttatgatctccccaagttgacccaggcaggccacagaatgaaatctggctgactctaggccaactgaagcctcttcttgggatttagaattcgactaaggtgctagtatagtctggttactctacttgaactctgaggtcctacaaagctggaactttttggtggccatgttctttcaaagtgaggagccagaaagcctgtcttcacagtgagaaaaacaaagttgattgagaagaaagaaaagataggaaaggcctaacattcaaggcctgtgttatgatttctcttcaggaccagttttattcctgtccttggtttacaaataccacatatatttgtggtatttgtaataccacatatatttgtggtatttgtggcttacttgaaaggattgaccctaaactcttaaaataagttacctttagggatgagatatgggcagggaaaggaggaaatggggagtttaatttttactttatatacttttgtttttttgagacagtctcgctctgttgcccagcctggagtgcagtgccacaatcttgactcactgcaacctctgcttcccaggttcaagcgattctcccatctcagcctccaagtagctgggattacaggcgcatgctaccacacctggctagtttttgtatttttagtagagatgagttttcaccatgttggccaggctggtcttgaactcctgacctcaggtgatccacccacctcacttcccaaagtgctgggattacagacgtgagccactgcgcccagcccactttatatacttttgactgtgaatttttttctgagacacatggattacttgcataataaagaatccttgcagtttttttttttttttttttttttttttttgagacggagtctcgctctgtcgcccaggccggactgcggactgcagtggcgcaatctcggctcactgcaagctccgcttcccgggttcacgccattctcctgcctcagcctccccagtagctgggactacaggcgcccgccaccgcgcccggctaattttttgtatttttagtagagacggggtttcaccttgttagccaggatggtctcgatctcctgacctcatgatccacccgccttggcctcccaaagtgctgggattacaggcgtgagccaccgcgcccggccgcagtttttttttaaaaaatccgaaaatattaatacttccagcatattcctggtcagccagaaatactgaaaatgctgtgtatatggtaggaggtggttcctcaatattttttttttctaaatgatgaggtctgttatgagaacttccttatatgttatagaagcttgttgttaaatgaaaataatttatatacatttattcatgaaataattttgagctcctacttttgttaccagtggagggtcttgactgcaagttgtccagtttcttggcattttgaacaaagaattggacaaaatgcacagcaaagcaaggcaagaatgaagcaacaaaagaatgaagcaacgaaagaacgaaagcagggatttattgaaaatgaaagtacatggccgggcgtgatggctcacacctgtaatcccagcactttgggaggccaaggtgggtggatctcttgaggtcaggagttcgagaccagcctggtcgacatagtgaaaccccgtctctgctaaaaatccaaaattagccaggtgtggtggtgtgcacctgtaattccagctggaagctgaggcaggagaatcacttgaacctgggaggcggaggttgcagtgagccgagattgtgccactgcactccagcctgagtgacagagtgatactctgtctcaaaaaaagaaaatgcaactacacagcgcagaagggcctggacacataatcatcttgggtccaaatactccctagaagtttcccattggccacttggagctcacctcatataaatgaagtggtggcccccaataggtctgattcttggggaaagcaatgaatcagaggctgaagtggagttacaaaggtcacactcctgtgcaaacatctgattggttgcaaaaagcaatgttacagagttacaaagttgcacttctatgcaaacgaagactcagctggcaatcagtctgactgggtagggacagccaatttcttatctgcctcacagaaaaggtggggatttgcaaagggcatagcctctggtccttttgttacttagggtggaaagttagggttttcctttaatagttctagaaagtcggtgtaaaaacgccttaggttccctcaccccaggccctattctcctgcctcactttcattaagacaggtatagccagcaaggtggcttacgcctgtaatcccagcactttgggaggccaaggcgggcagatcacctgaggtcgggagtttgggaccagtctgatcaacatggagaaatcccatctctactaaaaataaaaaattagtcgggcatggtggcgcatgcctgcagtcccagcttctcgggaggctgaggtgggataatcgcttgaatccgggaggcagaggttgaggtgagccgagatcgcgccattgcactccagtctgagcaacaagagtgaaactccgtctcaaaaaaaaaaaaagtgtagtcactgaccagctggagctgacaatagaggcggagatttcagacacatgaatggatacttacagtacagtgcgtgagtgctctggtagggaagtaagggattctggttccaggggcatctactacagacttaggggtttgagaaaggcttcttaaagtgccttgggaaggaggagtaaaggaggaaaaggaaggtgaggaggtccagtgttggaataagcagaagtattctagccagagggatcagggagtgatataggcctagaagggagaacttgggagtgttcaggaaaccaacggcggtaaggatggagatgagaaaaaacagacatttgagagttgaagagccatattctagagtttgggttgtgtgctaaaggcaattgagaacctttcaaggcaagtgcagcaaattgtttcctacagctttctgtggctgtagggtagagatggattgtagccaattagaatgaagactgtagagacggtctttgccataggccaacaaagtgatgaactgagtaggactgtggccgctgcttcccaccctcaccagaagaagggctaatccacacttgttattgaattgattgaattgcgggggggggggggcctacaattcccagcggtctggtctgcgggcgggggtgggggtgggggtaatgtaattcgagaagccagagaacctaggagggaaaaatcggctggagatgccaagagaaggcatgcgttaaattgtggtcatgcggagctaagtgtctttgagacattaaatcggacacgtcctgtaggttatacaggcgccaaggaagaaaatctgcataagaacacagttttttctttgcgggagtttaactctctcggccagaaacagtcctgtcctgcatttcttaagttttttccgaatcccacaagcccttcgaaggccccgcggactcgtgccagcgcgcccgcgcatgctcagtagcaagacgtgctaggcaatgaggagggagatgagttttccgtaacctgaagcaacatcctcctgattcctcattaaagaaaaaggcgggaactagtcaaaagccggggactgatgggacgctaggatctgcgcgtcccgcccatttcggcctctgactggtgaatgtcttcggcttatggcagaggagcccgcctcattggctctcaggctccagagcagcaggtctccggcgcccaccccgcctcccccagctgccgacgtggggcgggcagccgccggcggctgggagccgaggcgtcggtgcagacctggagacgggcatgggggggctgcggctgctggctgtggccctcacgtgctgctggtggccgcagggcagccagggtaagaccctgcggggcagcttcagcagcaccgcggcccaggacgcccagggccagcgcatcggccacttcgagttccatggtaggtctgggggcggggagggggatgaaggcgcgctggcccatcccgccggctgagtccgccggccgctcctcccggcccctccctgccacgttgggcgaggccggcgacttccccagcctcacctggacctccagcgttgcagcagctgccgcgaatggtgggatgcgttccttgccaaccccgctggtgcggctttccagccccaggcagcggcctctcgccactagtgatcgtgttccgcacctgaaagctggtttccatttccccaaccctccccttggaagccaatgtgcaaaagactggtcggccgcatctttccagatccttcccgcaaagaagcatatttgctccttcctgtctcggccacactgtgacgggagaatttaaccctagaaacttaaatttccttttttttttttttttttttaaagaccaatttcctgagacctacttgcaacagagtggttttggaaaccaagtaaaacacttgataatgtagttgttatattgagcagtttggttacttggctactagggcagtagatttactatgggcagtaaggcctagaattaagctgatgaaaatgcatttaagtagcatcttggaagctccctaatttgtgttctgtgtggctcttctgaaatcagagttgcgtttgatttcagaccttttggtcttcctcaaaaatcagtaattattccttcaataaatgcatttgcaattcattctaattttggtctcatttgcactctcacaatttaagtgtttttcttggtactcttaatttgactagtgctgtatttcaaataattatttgccttgatgacattaggaactttgatttgtacagtctttagcattaaaagatgcaacgatgaacatcagaat

SEQ ID NO: 6240 - DNA, 6000 bp, Homo sapiens
actgcagcctcctgagtagctgggactataggaatgcgccatggtgcccagctaattttctgaaattttttttgtagagacagggtctccctatgttgtccaggctggagatacaaaattttgaaagcttggaaggcagatacacaaatggtaacctactcagtaggtgagaaaaaactgaattggaactcagcattaaggaaagccaacaggcaaaccagataaacttttaacccaccaaaaggatgtggcagtggcgataccaggtactttgggcagtgaggtactgagtaacaggataaaaaacctaaagatacgcaatgggggtttcttaagaaattgctctaccaaataactatacaatgaagttcccaaacctcatccaggtgctcagagtttctaactaatttttagtgatttactcttttatatgagtggcaatcaaatatttccagaaagtccctaatataaatatgccaaaacaaaataacaaaaaggcgatctgggagatgcagaaactatgcagggagaagaaatttaaaaagaaagaaaaaaaaacggcgattacgcaacagttctttcaaataggaagttactcatgcctaagcaatacattactaaatactatttttcttatttatcctgctcttaattcactcaataaaaaaaagcatgaagaacaagttttaaaaaagccattagcaataaaagcacaggtcctggaattagagatatataagctcaaattcttgtttactagtttgaagtttactagcaatgaaacgttttgctctctgaacctcagtttcattacttgaaaaacaggaatacagcactcattttgcaggattacatgatacatcacatgaagtgacttcaagtagccacttgaacattcaactcttttctcagctttcagtgatttggcttgattattttatttgaatttcttggatgtatgtatgaatgtgttaaagatgcgctttcaactctaaactttcaggagaaacaaactgtcttttcttaactttactcttttcctttctacatgtcaagtaggtacttgataagctgtgaataaaaagaggcatgataatcatatagtcattacacatatcactgcaaaagtttaacaattttcagccctttttcagtttcagcagaccaacaggagatgggttattatctgtaatagtgactcactacagaaataattcttaaaggtggagatggtgagcatgagttgtctcctatggaggcatcagaagaaaaggtgtcctacaggagctggattttatggcggggagaaaaaagagaaggtggcatgtatgctttggaaaaagaagcagactctacaactccaatcatataatttttgttgacaagtcatcttttcctatattcattaggggcactgcagtgtaaataatggctttcatctgagcaaagtaatgctaacaattaacacttaggaaattcattccagctaatacacatactgttatactaaatattttatacttcctagccatggatgaattgaaaatctttaactaaaatggtatgagtataaacccacatatattcaagagtggcctactaccaatttttctttcaaacaatgaaattttaggagactcttgagaccttgcaaagatgtgtgattaataggacttaagtacactaattagatattttagatacctttcagatatgagataaaatctagttgtgcttcagattcacccaataggattatactaaaagtaaatttctcttccaaggattaaggtggcatttttcaccaatagtcttcatatttcattcaaatatcacttttatcactccatcaccccaaaccaaatggtcacacagatatatagatattggtttatgatgatgagtatgtcatgatcacgggaaaactatagtgcagtaggtaggagcacaaactctggagccacagtacatgggttcaaatcctggccacctgtagctacatgaccctcaataagcttctcaactgtagagcagagatactaatgataatagtagtaacttaaatcatagtatatgagaagtgaattaataatgttaagaattgggaacagtgcttgacacagagtaatatataatatttgatattattatggttgtgattatttacatctatgagtgccattatacaaagaacactctatttcctcaaacgtatgactgtatgcctagttatccatccatccacccagtatatgttgtatgtctatgctaggaagtagagccataaatgtaacaatgctccatttgtcagatactaaatagccttgaaggagtatttcagaagcatctgccctatttgaccttactcaacatcttcacttgatgtctatgtataaaataaactttaatcatcctctaccaccccccaaaaacgactgcttctccctagtctttaccatatcattaaatcactccttgtatccagttgcccaaagcaaaaaagacaaggagtcatcattattattctttctctcatacttatccaagacaccaggcaagtcatattggctctaaattcaaaatatattccaagtttgacttcttttcattacctgtaccattgctagagtcaaagcaattcttatctcttttctgtcccactgcaaaagcatcctacaaactggtttccatacttctactcttgctgcctcctagatgtcctcatagagctaatatgttactccctaacccacctccacactcaaaaccctgcaagagcttcctgtcacacgtagaataaattcaaatgccttatcttggtttacaaaacactacatgagttctggccccttgatacctctcagacctcatgctctaacactcttcttactccagccatcctggtcatctttctattccatgactgtggcataattcttcctttctctgggtttttgtacttgctgtttcctctgcccaaaatactctttgaccatgcttcctatgactcaccccactccattattcacatatctcctcaaatagcacctcctaagcaaagccttgtctaaacatcttgcctaagacagccataattcccatttatttgctactcctacctctgctctatttccttcatagtattgatcaccacttgaggttatgttataaattcatttattttcttatttattatctcgctactagcaagcaagatgcaggaaggcttgggctttgtctatcttattcaatagtatccccaatgtttaaaactacctggcacacagtaagggctcaataaacatttgttgaataaatgaataaagtgagaaggttgatattaagataacttaatctcaaagttttctgagattaactccacctcaaagtgagaataagatttaaaatggggccaggcatggtggctcaggcctgtaatcccagcaccttggaaggctgaggcaggtggatcacctgagatcaggagttcaagaccagcctggccaacatggtgaaaccccatctccactaaaaatataaaaattagccgggcatggtggcacgcacctataatcccagctactcaggaggctgaggcaggagaatcgcttgaacccagagggcagaggttgcagtgagctgagatcgtgccactgtactctagtctgggtgacagagcaggattccctcccaaaaaataacaaataaagggaaccttcttagttatatatactctaaatcctctaaaaatatgtgttatctgctcctttcccccatgttttttacctcaaatgttagtcaaatagaatacgtgtacatgtataccttagccattaagtataaacagataaaccgtttcagacttgggtctttgaaataatactttgttcctacttacacggtgctcagggtctggtgagaagaggcacacaaacaaggaaataagtatgtgatgacaaattcagaaaaatcctatgaaagaacagggttctctcatgaagaataaacagggagatccaggtggatggggtgggttcaaggaaggctgatctgggaaggtaacatggacgctgagtcttgaaatgtgagaaggaggctgtgctttgaaaggagaaggggcagagatcttccaaaagatgaaagatcatatgctaagaaactgatgttctttcagaaaatgaaagaggccaccagaactaaagtacccgggtgggatagtggagaggttgctaaagaagaggttgctgtatgatcacgcagaatctgaaagaccatggtaaaacgtttaaatattctaagagaaacagtaaaccaattacaacagaaactctgttttaggataagtcactaatatagagatagctagttcaattgtgtctggcttcctatcacatcactagcacttagtacagaattggggtcctaaaaatatttggcaatgatgacctgtgttgctttcaggaaagtattccaagtgatagggtccaccataatccatattgctttagctctgttacaagtgacaaaattttctatcaatttccaacttcctagctccaatgtctcaagaatatgccaggcgggtgtaggcacagctccagacagcaaacaactttggggttgtatgcatataactcaggagttaactctattgatctgtgaaattaaaaaaaaaaaaactactatttactcaatttacttaagtctttaacttcatattatgcaaaactgaaaatatataaaaactgttgtgttgttataacgtttggtgtggtaggcctcaggggcaggcctcggaccttctcttgccctcctttaacctgttccaaggcaggactctaatttttcccccatcattgtaaattgtgtgtctttaagaccctccccagagatggtttttgccctatagtgtaggggaggaatgctgacatcataaaaatcccaatgctgacatcataaaaactggattaggagagcttctggatagctgaacacatggaggtttctggagggtgtggcccccagagggcatggaagctctgcacccctgctcccatacctcaccctacgcatctcctcatctgtatcctttgcaatatcctttgtaataaaccggtaagtgtgtttcctttgattttttctttttgttttttcagacagtcttgctctgcggcccaggcaggagtgcagtggcacaatctcagttcactgcaacctctgcctcctgggtttaggtgattctcgtgcctcagcctctggagtagctgggactacaggggcatgccaccacacccagataatttttgtatttttagtagagacggggttttgccatgttggccaggctgttcttgaactcctggcctcaagtgatctgcccacctcgacctcccaaagtgctgggattacaggcttgagccaccgtgcccagtatccttgagttttgtgagcagctccagcaaattaattgaacctgaagagtgtggtgtgagaaccccaatttgaagccagtaggtcagaagttctggaggcctaggatggtgtctgggggtatgaggtatgggcactgagaccccaaccagtgggatctgacactatctccaagtagacagtatcagaactgagttggaggatgcccagctggtatctgctgcttagtgtgtggggaaaaaaacccacacattttgtcacagaagtcttttgtgttgacaactgttgtggtggtatgagagcagaagaaaaacatggtttgagagagttttttcctacacatcactatgttctgggtttttatttcagcaatagcatgtcatcaacaaaaatgtttttcagcttatcttttttccaaaagaaaaaaaaatgtatataagcaatataaaacatagccaggtctaaaagcaacggaggtgcctaagatggaaaatttaaggaggcatttactctcacttgcacaatcttagtatgaaatgtacccttggtgccctgaacactaaactgaca

SEQ ID NO: 6241 - DNA, 6000 bp, Homo sapiens
aggtacaggcattgttggataatgagcttaacttatccaacaaagctgatctgcaaaaccaacaggcaccttaggaaaatcacatttcatcattaatcccactttctttgttcccaaataggcaagagtactctgtggaggtgaagtagtatctgctgccacttaactggatagcatttctgatcctgccttctttacccacagaatcttggaatcccaatccgtgaggttcctgggtgtgctggcatcaggacagcggtccacgaacggtgtgttacccaaatattgacatcctgcagctagcctcaaacaatcacagctactttccaatttcagagaaaaaaaggctaaaattgtaagctttttcttaacaatttttttatttcttaatttttgtggatacatagcaggtatatataattatggggtacatgagatattttgatacaggcatgcaatgtgaaataagcacatcatagagaatggggtatccatccactcgagcatgcatcctttgtgttattaatacaaacaatccacttaccttctttatttaaaaatgtgcaattaagttattatgactatggtcaccccattgtgccatcaaatagtaggtcttattcattctttctacctttctttttttttttgtacacattagccatcccctccaccagtcccccactactcttcccagcttctggtaaccatccttctactctctatgcccatgagttcagttgttttgatttttagatcccatgaatgagtgagaacatgcaatgtttgtctttccatgcctggcttttttcacttcccataatgacctccagttctacccatgaggttgcaaatgacaggatctcattcttttttatggctgaatagtactccaccatgtataagtaccacattttctttatccattcatctgtggatggacacttaggttgcttccaaatcttggctactgtgaacagggctgcaacaaacatgggaatgcggatagctctttgatatactgatttcctttcttttgggtatatactcagcagtggaaatgctggatcatatggtagctcagtttttagtttgctgaggaacctccaaactgttctccatagtgattgtactaaaattataagctttttcttcacaagtttattccaacctttgatgctggcttttattcatgctgaacctagcttagttcacacttatatttttggttatgttaaagctgaatacatcattatttcttgcttgcaaagaacccattggtttcaagtgatttgtaacctcctcacgtttgagaactactgttgtagaaagagaagggaatatacccagggttgtgccacatttgtctttaatgtcctttgagttgaaatgatttgtttgtggaccatctggtgttctgagttgtggcagtgaattgcactgggccctgaagctagggaggaaagaaacagcttcatcctacctgctcacagcccagaccggttttttgtgtgctgttgttaacatcacacgtattttgtaaactcatacttttatgaggttttatggaacacagattaagcttcctagtcaacccctccacccttacaattggctagtcagtcttcattcaatctgaattgaactattgtttttcagaacaataaggcagttgtttctacctataacccatcttttcttcatagaattattgtttaaaatggtctccataacatggctaagggtttatttggcaatgacaggaattgtaattttgcttcctactttaaaagtcatgaaagatctaagcttgcttttttttttttttttgaaagagtcttgctgtgtcactcaggctgtagtacagtggctcaatctcggcttactgcagcctacacctcccaggttcaagcgattctcgtgcctcagcctcccaagtagctgggactataggcatgggccaccacacccagctacgtttttttttgtatttttaatagagacggagttttgcaatgctggccaggcaggtctcgaactcctgaccttgggcgatccgcctgcctcagcctcccaaagtgctgaggttacaggcttgagccactgtgcctggcctaagaaccaagcttttttttagaatgatagttgccccttcagtagcccttcagtaccatataagttttgctgatgttactggttgttctttaatgcattcagcaaatattaatatttactgcacaccttccatgtgccagcccctggggtatgaggtgacttgtgtttttctttcaaggagctgacaaataagcagcttggacttgaattccctccccttctcttcctctcacgtctctgttgaggcaaatcccaattggaatgaaataactctggagaattattttgggcgttactaaaactatctttacttctttgctccagaagcaacattagctacttagtggcctcttgacataatctaagaactgtctttgggacgtgctgcttctgggactccttggctgtgaccattttctttcaagtttaagtgacttcctgctccttatgcatgagtccatttaagacattctgccaagggagaagccatccactgtggttgcctggcttcagagcactctcactggtcagcagtccctgactcctatgacctccagtgctgtgtagatgatagtttcatgaatagcacttttaacatctatgttgcattaggtattataagtaatctagagatgatttacaggaggatgggcataggttaagtgtaaataccataccattttatttttatatcagtgacgtgagcatctgcagattttggtatccttgggggtctgggaaccaatgcactgcagatactaagggacaactctacagtgtttgatttattgagctttctgagatattcagccttttcctgtcttcacacttgtttttccctctattatttagggtaatcctgatgaaaatcaacaaaatacacatgaagagacagcactgagaggtaatgtgctaactggtctttgtgattacaggcacttcagatttccctcttgcctactcattgtgagatgcagcccagccctgcaacaagactgccacagtcgtatcctggctcacccctaactagcggtttgactttgagcacatcactgcctcctccgtgcctcagtttcctcttctgttgaatggggatgatcacagcactacctcaccatttgttgtgaggattaaatagattcaaatatgtaagacacttacagtaatgctttgtacacagaaggcactattattttttattaatccctatttttccttcccaacttcatctcccaatatcccataaccatgctgatttccttacaactcccccagacctcctggactaagtgagatttggaagagtatactcagggcagtcaagaaggactgattctgctaatttaggatttgtcaagttgggttagtttgaaatatacctctgtactcctctcaggaaatgctggatagtgtagatttagtatcagataatagtaataatggtggcagactctgatgtttcctccttcccttgtgatctcagtagtcttgtaccattcatacatcaaatgacttagcaactaacaatcacgtaatattttttaagcttttcttatgtgcccagtagtgagccaagagttttttttcctatttttaacatactattgacagctccatgaggtgggtttatattttgttaaaataatttgccatgtccacttccccagtagactgtgacagtggcatatacatctgtgtgtgttattcagtttgtatctctaggacttgacagaggacccaatacagagtgggtgctccagaaatgtggacttggatgcatttcaccaacagctatttacatccaaataataagctaattataactcttcttctagatgtacttttctcattgcaaaaattcaccgtcaaaatttttaaaaacactaataagcaagaagaaggaagttaaaattgcactccttccagccctagagagcttaatcaacttgcttaggaacacgctactaaatggctaatctgagcaccaaaatctggccatctggcttcagggctcagcctcctaatggccgcattataccattgatcccgccccatccaccccaacacacacactcccctgcacaaacaaattatgttagctattaaaaggaattggaagagtggaaatgtgcaattaaatctaccacaaatacaatgttgcaatacgtgcaatctatatttttaaaatttacagtattcagcattttcctgtcttcacacttgttccctccgttatttacggcaatcatgacgaaaatcaacaaaatacagattgagaggcagcactgagaggtaatgtagaaagggaatggcttttgagtcagaaaaatgcgagtgtggatcccagctaagcccctagatgtgttaccagagacgagccgcaaaacatttctcagtcttagtctcttgtaaaatagaggtaataagaaacacttttcagtattttgtgacatgtagaagtaagtgatggtggcatgcatcacacttggttaatagtaggtcctgttgttaagtctctaatggcgataccctatggcttctccaaatggtgaccttgccaaattgttttccaaagcgacatgtggcttttttctcccaatccctcattttaactctcatggtaatttaacttttatatttttattagatgcatttagtaacttgcctcatagtcattttcttggaaattcaatttcttctccacagggtctcttttgagattaaagagagagaagtggcaaatttaggatgttagaataattttcatttaaaagtagatccttgtttttattaccctatcattaatgttttctgttttcctttatcagcgagttactgctcatttgattcatattgccaaactgaactctcttgttttcttgcaagatgaaaggagacaaccatgaatgagccactagactatttagcaaatgcttctgatttccccgattatgcagctgcttttggaaattgcactgatgaaaacatcccactcaagatgcactacctccctgttatttatggcattatcttcctcgtgggatttccaggcaatgcagtagtgatatccacttacattttcaaaatgagaccttggaagagcagcaccatcattatgctgaacctggcctgcacagatctgctgtatctgaccagcctccccttcctgattcactactatgccagtggcgaaaactggatctttggagatttcatgtgtaagtttatccgcttcagcttccatttcaacctgtatagcagcatcctcttcctcacctgtttcagcatcttccgctactgtgtgatcattcacccaatgagctgcttttccattcacaaaactcgatgtgcagttgtagcctgtgctgtggtgtggatcatttcactggtagctgtcattccgatgaccttcttgatcacatcaaccaacaggaccaacagatcagcctgtctcgacctcaccagttcggatgaactcaatactattaagtggtacaacctgattttgactgcaactactttctgcctccccttggtgatagtgacactttgctataccacgattatccacactctgacccatggactgcaaactgacagctgccttaagcagaaagcacgaaggctaaccattctgctactccttgcattttacgtatgttttttacccttccatatcttgagggtcattcggatcgaatctcgcctgctttcaatcagttgttccattgagaatcagatccatgaagcttacatcgtttctagaccattagctgctctgaacacctttggtaacctgttactatatgtggtggtcagcgacaactttcagcaggctgtctgctcaacagtgagatgcaaagtaagcgggaaccttgagcaagc

SEQ ID NO: 6242 - DNA, 6000 bp, Homo sapiens
tgaactgcacatttaaacatggttaagacgataaattgtctaatacatatatatatatatttaacatgtcaaatttgttctaaggccacatttatgtttaatatcttagtataatatcagatacaaataagagttaaaatggaatcttctcaaggccctagcccaggaatacacatagtcctacagagaaaaactgtttcctaaaaaagaggatgcttccaaagagggcagaaatggtctacaagccaaaatgttttagagtaagcttgtccaacctgcagcccatgggccacatgggcccaggacagctttgaatgcagtccaacacaaattagtacactttcttaaaatattatgagttttttccatgattttttttttgatcatcagctatcattagtgttagtgtattttatgtgtggcccaagacagttctcccaatgtggccaagggaagccagaagattggccaccttgttttagaggaatacattcatatctattatataaagctacatattatatagtattatgtaatataatatagaaatattcataaagtaacattaaaatattttataatattctaccaattaatagcttttaaaaaaaattatttcaatttcaaagagactttagaaggggtaaaggtgaagagctccaagacccactaatcatctgtaggtggcagtagaagcacagtatttatgtcaaagcagccctgaactatcaatcggtatggaaaaccggagaccatacataagaaatctggatctatttcatattcaaataaactgtgtgagtactcctacattcaataaattgcaactaacttctctgatacgaaacctttttaacttgcccacttttaccttaaaacctctacacagccaatcccaatctacctatttctttttgtctcattattttatttggtacgtctttgtaattgtatctacctagaaacattagccattcattttttgagacatggcataacctttcttacagaaaaacacaaacaccagtcgaatccatatgcctgttaactgagggcctgctgggtgaagcactactctagatgcgctgaaacgtttgaagacgcacgtgccaggtccttgttcacaaggcacacacaaaacgagaacaagaagaagaaaaggggtgaaagtgcaatcagggatcagtacccacatgactgtcaaagagagatgtgtcacagatacttcaaactccagttctaaaacctgtaattactgatcctaaatcaaatgttccattcatgttagaagagcaaatcctacaccagaggcagaaagatgtaagccaacacagtctgagaaccttttttccaaagaagcacagcggcagctggcctgtgggtctcagggtggtcctgcctgcctccttccttcccttctcagttaagactctctttagactgtggcttgctgagcgcaagaagctgtatgagctgaaagtcataaacttctcataaagtctacccatacaaatggtattagcaataagaagataacattgctgcaaatattcaactgaatggagtactagttttattttataagcatacaagggagagttctggtaaataccttgtctgagtaaccaaaatcaatgcagttttattaccaagaaaaaaacaacacgtcttcctctaaaggttgattataatgtctccaagaggtcgacttaaaaataaatttaaaatatggtaaaaaacatacacactgaagaacaattaaaaaaaaaaaaaaaaacagcgatggcaaagatcaggaactaatgtgaccccatcaggggactgagtgctttgcatttagagtaggcccaaacttcagcagacacattcttggttttcctccctgggatgaggacttaggaaatgcatcctggacgcattcaggcttccatgcagcctccaagctcctatcctgccggctcctatccacagtcctacagaaattcagaggaagaccaaaggtaaaatactctctgcaatgcaaagagttggggagaggaatgccttcaaatcacacaaggccggaagtggatgacccctcacagaaggcctcacccaactgcccctggggagagtgaccatcagagaaatgagctaacatggttaagacaacctggtcagttagtggcacatgctgggctcctgcacagctatccagtcccagtctaaagacaggaaaaatttaaataagctacaaagaaaaaaaggggacaaacgaagccaagagaactagtgcttagtgtctacagcatgcactttacacaagctataaggcagtttttaaataggaaaggtaacacatatacagaaaagtacagcatgccagaaaatccatttgcttcttttcccttccctagcctgttctctgtcccagaggctggtgggtccaaactctatgcaaaggctcatgggcccctggcttcctgctaacaggagcctcaggggagatttaggccaagaggaacctgaggtcacagtgtacatttccctggttccttcctgtaagggaacctcaagcttaccgtctctcaaaagaaaagcactgctccaagacagctgacttgactggggtctctccttccaagttctagtaacctctcccttccttgatctctttgggcctaagtgtggtgagggtaagaaaagcaacagctccaggatcctgccatacagatgatgggggacccttccttattattacacatgcccacaccccacccaaaaggtttaccacctaagcatgaaatcctaagcactgtattttcatttcatctgctttttgaaatttatacaaatggaatcatatgatatgaattccttcatgtctggctttttcaacttaacactagattcatgagattcatccatgttgttctatctgccctgtgtatcatcaattgtgattgtgacttgcactccactctatgcctacaccacaagtgacttattcatgctatagttgaacattcaggttgttcctaatttggagttgttgtaaataatgttaccgtgaacattcttgtccatgtctcctggtacgcagcatgtgtttttactggttatagacctaggagtggactctgagtcatggagtgttggtatcttcattttaatacttaaactgttttccatatttaaactcccaccagcaatgttccttgttactcgataccctcatcactcaacatccttgccagcactttgcactgtccgtctttttcatcgtaggcattctggcgaatggataataccctgctgtggttttaattttcattttcccaattattaataaaaagttgagcagatttacatgttgctgaccatttggatctactcattcttaagtgcttgttcaagtcttttggccatggaatggcagagatcccagacaccacaattacatgtacgagctgccaggatccagctataaaacctttccttgagaatatcaactcattagcaagaaacagggagataaaaagatggtctattccctcaggagattgtttgctataagtcaaattaccatttatgatgattctctattaagtagggccaacttcaacaaaaattactaaaacgaagtataatattataatgcaaaatacagaaagaacatacaatctgagagtcatgagtaaatatttctgggtcacaccatgtaaactacatactttgcagtcagcatgaaggttaagttagctcaagcatgtgaggctctcagaatcatgcctgacagtcacctctgattacctttcataatttagttaagaataatggcagatataataaaaaatcctaagtaacttgtcttaaaccaacaaccctcaaccttatagatacatgtttacttttactatacaaatggctgtgtactaaaatcctcaaccacacacactattatataggtttatgtttaaataacctgataacacatctcttgttcctttaccttccacaagtccttttttttttttttttttttttttttttttgagagggagttctgctctgttgcccaggctggagttcagcctcagctcactgcattcttggctcactgcaacctccatctcccgggttcaagcgattctcctgcctcagcctcctgagtagctgggattataggcacgcaccaccatgcccagctaatttttgtatttttagtagagacagggttttgccatgttggccaggctagtctcgaactcctgacctcaggtgatccacccgcctcagcctcccaaagtgctgggattacaggcatgagccaccgtgcccagccctcctctttcttctgaaatgcacttcctcatattactaggtgttaactatacagtggttcccccttattctcagaggatacattccaagacccccagtggatgcctgaaactgcagatagtaccaaaccctatacttactatttttttcctgtacatacatacctatgataaagtttaacttatacattaggctcagtacctttgtgttttgggaccattattaattaaataagggttactggaacacaagcactgtgacactgtgacagtaaacctgatcaccaaggtggctatgaaagtgactaatgagtgggaatgtctacagtgtggagacactgggcaaagggaggactcatgtcctggggaggaaggagcgggacagtgagagatttcatcctgctgctcagaatggcatgcaacagaaaacttatgaattgtttatttctggaatttttccatttaatattttcagaccatatttgactgaaggtaactgaaggtaactgaagcctcagacagcaaaattgcggataaggggactactgtatacccatctccatttgcacctctggtaactgtgagatcagaatgtgcagcagaaggctgtgtgcctcacaataaccatggagttctgctcaatctgctgccttggcgactctggatctctcttccaatagtaaaatgtcacactgcaaactctgggcctggggtcccatgggacttcagtggttccaggactgatttcactgccatcacttatatatggttagatatggattcaacttgtttgctgtgaggttaagtgtctgaatgtctacatgtctatacatctttaaaactacacacaaaaattgctaaagacaagaaatttgggaatattaaatttacaatacaatttaggaaaccaaacagaaaggaggtatactaactgggttagaagattatagctgtaaattgttgggacttaagaaaaaccacacatttagacaaatagtttctcaatcttctttatgcagaaactcttactattcaacatatctcccctacacccacacccaaagagcagtcagtttagatacaagtttgagaaacagaaaggaggggacaaaggttggaggatgtcaaggccaaaggataggcctctcctctagttcagaggactctttgtctgcctcacaccctcttctccctggggactggctgtgtgctgactgtccccctgctgggatacatgaacagtaacaacagtggacccctggtccccgcactgatgggaggcaacaaggataagctgccctcacacttgctatgctaacagaacaggaaatattattttacctgtggcatagacaaatgtctaacatagaagcatattttatagtgggaatttgctatacagatctattaactacattctttctcattaaaaactggcttaactgaattatattcactcaaaaactggtttatagggctaaaatcaaaattcacttatggcttttaatatcaaaaccaaaacccaaaactgcagctaaaacacactatttgataaagcaaagggaatcttgcagtctctgggaataagtaaaatccctcttttgcaagtgaaacatttctccttcactcatattccaaagtaagtgaagaaattaaagctgcatgaatggtccctgaa

SEQ ID NO: 6243 - DNA, 6000 bp, Homo sapiens
aaaacccccttctggaatccttaatttggcaatcttccaatttgctcaacatactaaaaaaaaattaaagaggtaagtgtgtatgtatgtgtatgtggggggacgccagggatgagtggggagagggtgtcatgtggcccacgcactgcacagttctccggctactttctctcccaactctgattggactggagcggacattaatgctcactccagcctcatcacctctccagagagctgacactgcttgggaagctaaattgttctttttgaagggagaattacatatgagagactgaaaatcgaaacaaactaaaaaggatgcaagctcactatgaattagttaagtctattgcgttatcttatggcaagtttataactttctccctgaattttgggttcccttggttggagaagggaaatgtagatgtgttccctaggactaccataacaaagtactgcaaacttgatggcttaaattaaagcaacagaaattcattctctcacagttctggagggcagaagtcagaaatcaagatgccagcagggctgcactccctcttctgaaggctctagggggagtctttcattgatttaccagttctagtggctccaggtgttccttggcttatagctgcatcactttaatcattttacatggccttctcccctgtgtgagcttgttgacactcctttgtcgtctctcttacaaggatacatgtaattgtattttgggctcacctggataatgaaaaataaactcgttgcctcaagatccttaattaaccaccatttgtgccacataaggtcacatttacagaatccaggatttgaatatgggcatgtctttggtgccaatgtgtagcccactacactacgtaattcttttctctgtcttatcacagaacaggctctcttacacataaagttggttgctttctaaattccatgaggtttcaagtttgtttccattgttcccctttctttcttttttttttttttgagatggagtttcgctcttgttgcccaggctgaggagctcaacggtataatctcagctcgccgcaactttcacctcccaggttcaaacgattctcctgcctcagcatcccaagtagctgggattacaggcacctgccaccatgcccagctaatttttgtatttttagtagagatagggtttcaccatgttggccaggctggtcttgaactcctgacctcgtcatctgcccacttcggcctcccaaagtgctgggattacaggcgtgagccactgcgcccagcctgttcttccactttcttaatgacctaaatagaaacatgattcacgctgacttcttcctttgtatttaaccttgcactatgaaaacaaactactgtctctgatgccttagtaacttaatagtgcttctgatcttttgaaaatcacaggtttgtgcttataggaatatatcctctagactcaagcttatgtctctaaaagtctaactaaaggccttgtggctggtacattactgtaatcagcaagaaactggccctgattctcttaaactcactttgttcaactgagaacaaacttggaagtctcctacaaaactggagttgattctcatctcttgattacttctgcaggcctttgaaagttccggagaagttctctgtgtgccatatacattaaacacgcttccatgttttcctttaaatcatcaagagcagcacataggataatgtgtttattcctttctctgctccctaggattatcttctttttaaagtcatcgaccctttccctatctactctaaatgaatgatttcttgctccatcctgacaaatccggttaaaatgacattgcatctctttatatcatctgtccaaattgtacaaagaaagagtgtctaatgggcactctccagcaaatttactgcctatggagtgcttagagatcccaggctgtcctaaaaataaaagaaagtcttgaataggtttctcctttctctgaggtttacagattcagaagcagggagtagggagaaagcatttccctcattatctttctaatactcttgaaacatattctgctccttgaaaacctaatattcaaaagttagctctcggagtgtaggatcgattttttttcactgtttattttattttaaagtttttaattttttttatttttatttttattttttattttttggagacagagtctcactctgtcacccaggctggagtgcagtggcacgatctcagttcactgcaacctgcgcctcccgggttcaagcaattccctgccttagcctcccaagtagctgggattacaggtgcctgtcaccacgccaggctaatttttgtgtttttagtagagacggggtttcaccatcttggccaggctggtctcgaactcctgacctcgtgatccacccgcctcagcccaccaaagtgctgggattaggcatgagccttttttttttttttctgaggcagtcttgctctgtcacccaggctggagtgcagtggtgtgatcccagctcactgcagccacaacatccccagctcaagcaatccttccactttagcttcctgagtagctgagactataggcacatgccaccatgtccagctaatttttgtatttttttttttagagatggggtctccctgtgtcactcagactgctttcagtctgttctggactcgagatcttcctgcctcagcctcccaaagtgctagggttataggggtgagccactccatccagcccactttattcattttaatgagatgaacattagtcaattaattgggctttttggctcactgcaacctccaccttccgggttcaaatgattttcctgcctcagcctcccaagtagctgggactactggcgcgtgccaccatgcctggctaatttttgtatttttagtagagacagggtttcaccatattggctaggctggtctccaactcccgacctcgtgatctgcccactttggcctcccaaagtgctgggattacaggcgtgaggtcactgcgcctggccaattgggcttttattggagaagaatgaatatctatagtgactgcttgtagaatgaaatgttgtttcaagctttttgccccctaaagatgagaatggtaatataacatttgtgtactgtgagttctaattgggataaataaaatactagaaatagaatcccagacccaggaagaaccttgtcttcagaggagcaaccttggtcccagccccttctccacagctgcatgaagaagctgcacagaaaaccactcaccctcacccctagaaagtactcttcccagcccctagtaaccactattctactctccacttctataggatcaaattttttagcttccacatgtgagtgagaacatgcagtatttatctttctatgcctggcttagttcacttaacataatgtctcccaagctcatccatgttgccacaaatgacaaattttgttctttttaaatcagtaaatagtattcaattgtgaatatataccacatttttcatccatctttctgttgatgaacatttcgggtgatccatattttggctattgtgaatagtgctacagtaaacatgagagtgcagagatctcaacaagattcagtaaccttactactgagtatatatccaaagtattttattcattttgatgctattataaatggaatagtttccttagtttccatttttggattgtttattgttagtgtatataaatgcaactgatttttgtgtattgatttcctgtcctgcaactttgctcaatttgcttgcttattagttctattggggttttgtgtgtgtgtgtgtgcatggtatcttcaggtttttctacatataagattttatcatttgcaaacagacaaaattttacttatttatttccaatttggatcccttttacttatttttcttgcttaatgttactgcagctttctatgcaggaaacgaggatttgaacagtgatggagagatgagtaatggttcgatttggaacatattttatgggcagaacaaatggaacttgttggctcagaagtgggtggtggaagaaagagggaagttaaaagtgacttctaggtttatggatggatgaactggctaaattattgtggtgccatttgcttagacagggtagatggggggatgcaggactaagagaggaagagaaaagctccacctgggccacattaaatttggccatgattgtggatcagataggtaaaagcaagagaaggagggaagaagtcagaacacagacctctggggaaagctcacacgtagaaaaggggtggaagaagaggcatcagaaagagaggcaaagaagagcaatctgaggggtagaaaaagaaccaggaaagtcagagaaaaaagggaaaagtttcaggaaagtggcaatggtcaactatgcaaacaagaggggaaggaaggtgaggactgagaaaggattttttatgtaagcaacaaggaggtttttggtgacctctgacagaacattttcagcagactggataaggtctctgcctgagtgcaagtgagctgaaaatgcaagtgagtgagggaagtgctttaaaaaagtctaaagtgctatgtgtgtaaggcaatgttgctatttctgttgccatggaaacagaaaccatttaggagaactaaaagccacttaaaattcctgactctaacccatcatatccgcttgatctcttgagaaagataatgacaaaaaaccagtcattagaggggcagggcaattttaggtttcttctttttagacatagcccctaactggaaattttcacccttcttgagaagggagcttgcactaacatctacaatggcttctaaaaagcacagatgacctgctacacttcctgacttgcttgctattggttggcactgttcataaatataatttgctctttcacttttctttgaaatgagcaacctgaattactcggaggagaaaggcaggagagatagaggcagcagaagccagggcagctgaaagacagagaccttcaggtgggcattttaatctttgttttgttaattcagtgttgagcatcatgacttgatgatcacataatagtcagaggagtaattttttaaaagtaaatttgttttgttctactataaatgttattttcctatcatgtacatggtagtttaaaaaatactgtggaagtataaaaatgttgaaagaagccaaattctccaccaaaatagcctctattgatattttggggatcgtccctttgtgtgtgtgtgtgtgtgtgtgtgtgtgtgtgtgtgtgtgtgtgtgtgtgtgtgagtgtgtgtgtgtgtgtgtgtatgcacatataactttagttttcatagttgcgtccctacactatggacaagtttgtattcatttcctccatatcagtctatggtttttccatgttgctgtgaattctttgtaatcataaattaaagctgctgcatattattgcattgaggaactttactatacttcctccatttttggctgttatcctctttttcatagtttgggtccttctattatataagatatattttttccattcagtgtcttgttttaggggtagaagaagttaaatctgagcacatatatttcaatggttttgctcagaggcacaatgagaatgaaagagtatgtgagatcatgagcatataatctgttccttaccccactgggaccctaatcagtgtttctcaaccctggctgcacatctggccagaatcacccgactctgaggagattagaaaattacccctagaataactgaagcttaacttttggagatcagtgagtcatctgcagtattttatcttgttttccagaaacttctcaggtggttctaatgggtggtcagcataaaaacagatgacctaggtcattcaaaatatttttctgtctctgaaatatacctgagagtaatatgtattaggagaaaggga

SEQ ID NO: 6244 - DNA, 6000 bp, Homo sapiens
gtattttattctctttgtagcatttgtgaatgggagttcactcatgatttggctctctgtttgtctattattgttgtataggaatacttgtgatttctgcacattaattttgtatcctgagactttgctgaagttgcttatcagcttaaggagattttgggctgagataatggggttttctaaatagacaatcattgtctctgcaaacagagacaatttaatttcctctcttcctacttgaatacgctttatttcttcctcttttctaactgccctgaacagaacttccaatactatgttgaataggagtggtgagagagggcatccttgtcttgtgccagttttcaaagggaatgcttccagcttttgctgattcagtatgatattggctgtgggtctgccataaatagctcttattattttgagatacattccatcaatatgaagtttattgagagtttttagcatgaagcagtgttgaatttcatcaatggccttttctgcatctattgacataatcatgtggtttttatctttggttctgtttatgtgatggattacgtttattgatttgcatatgttgaaccagccttgcatcccagggatgaagccgacttgtttgtggtggataagctttttgatgtgctatggattcagtttgccagtattttattgagggttttcacgtcgatattcatcaaggatattggccgaaattttctttttttgttgtgtctctggcaggttatggtatcaggatgattcttggcttataaaatgagttaaggaggactctcttttcttctattgcttggaatagtttcagaaggaatagtaccagctcctccttgtacctctggcagaattcagctgtgaatccatctgctcctgggatttttttggttggtacgctattaattactgcctcaatttcagaacttgttattggtctattcagggattcgacttcttcctggtttactcttgggagggtgtatgtgtccaggaatttatccatttcttctagattttctagattatttgcatagagatgtttacagtattctctgatggtagtttgtatttctgtgggatcagtggtgatatcccctttagcatttttttattgtgtctatttgattcttctctcttttcttctttattagcctggctagtggtctatctattttgttaatcttttcaaaaaaccagctcctggattcattgattttttgaagggtttttcgtgtttctctctccttcagttcttctctgaccttggttatttcttatcttctgctagcttttgaattagtttgctcttgcttctctagttcttttaattgtgatgttagggtgtcaattttacatcttttctgctttctcctgtgggcatttagtgctataaacttccctctaaacattgctttagctgtgtcccagagatttgggtatgttgtgtcttggttctcattggtttcaaagaacttctttgtttctgccttaatttcattattttcccagtattcattcaggaacaggttgttcagtttccatgcagttgtgcaggtttgagtgagtttcttaatcctgagttctaatttgattgcactgaggtctcagagactgtgttatgatttccattgttttgcatttgttgaggagtgttttactcccaatcatgtggttagttttagaataagtgtgatgtggtgctaagaagaatgtctattctgttgatttggggtggagagttctgtagatgtctattaggtctgcttggtgcagagctgagttcaagtcctgaatatccttgttaattttctgtctcattgatctgtcaaatattgacagtggggtgttaaagtctcccactattattgtgtgggagtctaagtctctttgtaggtctccaaggacttgctttatgaatctgggtgctcctgtattgggtgcatacatacttaggatagttagctcttcttgttgcattgatccctttaccattatgtaatgcccttcttgtcttttttgatcttcgttggtttaaagtctgttttatcagagactaggattgcaacccctgcttttttttttttttgctttccatttgcttggtaaatcttcctccattcccttatttagagcacgtgtctttgcatgtgagatgagtctcctgaatacagcacactgatgggtcttgactctttatccaacttgccagtctgtgtcttttaattgtggcacttagcccgtttacttttaaggttaatattgttatatgtgaatctgatcctgtcattatgatgctagccagttagtttgcccattagttgatgcccattagtttcttcatagtgtcaatggtctttacaatttggtatgtttttgcagtggctgggaccaatttttcctttccatatttagtgcttccttcaggagctcttgtaatgcaggcctggtggtgacaaaatctctcaacatttgcttatctgtgaaggattttatttctcattcacttatgaagcttagtttggctggatacaaaattctgggttgaaaattcctttctttaagaatgttgaatattggcccccactcttttctggcctgtagggtttctgcagagagatccactattagtctgatgggcttccctttgtaggtaacccgacctttctctctggctgcttttaacattttttccttcatttcaaccttggtgaatctgacgattatgtgtcttggggttgctcttcttgaggagtatctttgtggtgttctctgtatttcctgaattggaatgttggcctgtcgtgctaggttggggaaattctcctggataatatcctgaagagtgttttccaacttggttcaattctccctgtcactttcaggtacagggacaatcaaacataggtttggtcttttcacatagtcccctatttcttggaggctttgttcgtttcttttcattctttttcctctaatcttgtcttcacactttatttcataaaggtgatcttcaatctctgatatcctttcttctgctttggctgttgatacttgtgtatgcttcacgaagttcttgtgctgtgtttttcagctccatcaggtcatttatgttcttctctaaactgcttattttaggtagcaattcctctaaccttttttcaaggtttttagcttccttgcattgggttagaacatggtcctttggcttggaggagtttattattctctgtccagttttgttcccttgctggcgaggagttgtgattctttggaagagaaaaggcattctggtttttggaattgtcagcctttttgcgctggtttttcctcatcttcatggatttatctacctttggtcttcgatgttggtgaccttcaaatggggtttctgtgtggaagtcctttttgttgatattgatgctattcatttctgtttgttagttctccttctaacagtcaggcccctctgctgcaggtctgctggaatttgctggaggtccactccagaccctgtttgtctggatatcaccagcagaggttgcagaacaacaaagattgctgcctgttccttcctctggaagctttgtcccagaggggcacccaccagacggcagctggagctctcctgtgtgagttgtctgtcgattcctgctgggaggtgtttcccagtcaggagacatgggggtcagagacccacttgaggaggcagtctgtcccttagcagagctcgagcaatgtcctgggagatctgctgctctcttcagagccagcaggcaggaacgtttaagtctgctgaagctgcaccaatagccacccatagcacccttcccccaggtgctctgtcccagggagatggcagttttatctataagcccctgactggggctgctgcctttttttcagagatgccctgcccagagaggaggactctagagaagcagttgggctacagtgggctccacccagttcaaacttcccggtggctttgcttacactgtgaggtgaaaaccacctactcaagcctcagtaatggcagaagcccctcctcccaccaagctccagcatcccaggtcgacttcagactcctgtgctggcagtaagagtttcaagccagtggatcttagcttgctgggctctgtgggggtgggatccactgagctagaccacttggctccctggcttcagcccctgttccaggggagttaacagttctgtctcactggtgtttcaggtgccactggagtacgaaaaagaaaaaatcctgcagctagctcggtgtctgcccaaacggctgcccagttttgtgcttgaaacccagggcctgggtggtgtaggcacccgagggaattgcctggtctaagggttgtgaagatcacggaaaaggcatagagtctgggccggaatgcatcgttcctcgtggcacattccctcatggcttcccttagctaggggaggaagttccctggccccttgcacttcccgtgtaaggcgatgccccaccctgctttggctcgccttccatgggctgcaccccctgtctgaccagtctcaatgagatgagctgggtacctcagttggaaatagagaaatcacccaccttctgcgttgatttcgctgggagctgcagactccagctgttcctgtgttcaccattttaacatctatctggctctgtttaattttcgctccccccaaaaaatccatataagaaataagttgattctcagagttaagttccagaagtgtagagatctcacattaaaataacagtttgcctgagtttatcaaatacaaaagtatctattaaatataattgattatatggattcattacctccctttgcaagtagttactctgtatttttccaattctaacctaagaatttttcaaagtttctaaattcccctttggttccttaattagaggccaaatttaatatctggaaaaaatgcagtattcaattatcttcttcctgttcaaacagtccctctgctatggctcttcctcagtagaaacaactggcaacaaaattcaagtttatgattcattcatcagcaaacatgtgagaatcatctacaaagaaccaagaattgtggtaagaattatacaaacatttactatgatactgataataatgaaaagcctaattcaacaaatagtgatctatccatttttaagccccagtaactcaaacattaaaaaactataaatgaacaggccgggcacggtggctcacacatggaatcccagcacttggggaggctgaagtgggtggatgacttgaggtcaggagttcaagaccagcctggccacatggtaaaaccctatctctactaaaaatacaaaaattagctgggtgtggtggcgggtgcccataatcccagctactcgggaggctgaggtgggaaaattgctggaacctgggaggcagaggttgcagtaagacaagatcgcaccactgcactccagcctgggcggcagagtgagaaaaaaaaaagaaagaaagaaaaagaaaaagaaaagaaaagaaaaaactatagatgaatgacttaagtgaataacaagtcaagtgagtaatgacaatatgtagaaaaatattccaagtagaattaataaattttaattatttgaatgagaaaatgccgccatattcaaaatgaaagtaaaagtaggatgagatcagcatatacaactgcatatatttcattaattaaagatgactaaagaggagactatcaatttgaaagaagattactaagattttgtttttttaaaacatactgaaccaaataaaaaaaaaataacagtaagacataactactaacagaaaattttttccaatgagaatacaagcttattaaccactccttttttcattaatgctcactcagcttctaccagccttctaataagaacacacacatacatcttttctataccaaatgtgatataaaagatattcaacccttcaaaattttaagtat

SEQ ID NO: 6245 - DNA, 6000 bp, Homo sapiens
ctactggaaaaaaaaataagtatcagttgacccagagatgaagacaacataagcaggaaaaaattttaatatgcctgtcttaatttcctatttatatggccagggcaaaaatccagcaatctttttcggttaggttgaaatagtccacttctgtttaactaaaacaacaacaaacggctgggctttaacagggggccttttgtagaagccgtcctttggtcttttgtttctaacctttctggagtagtgctcgtatcttctagtatagacaggaaaccctcaaattttccaaacatgtgaaaacagttgattaaagcaagcacactagaaaaccaataaaaaaaagtaaccacagaaattttgctctgggaatagatgactagtggcttagaatcataccaataattcttccttacctttgagtatcagtatctgttaaagagctagtctctttgaattccaagtgggttaagagcgaaacatttatctgcataaatgcctaaagtcaaaatatgtttttggttttaagcatacttgctttaatgttcatagcactagtccttaaaaatcaatcatctataataaaaagaaaagaaagaagtctaatcaaatgtatagtcatttttattttgaaggccaaaacttaaaaaaaatacaaatattaaatttgggtacctaaaactgagaaccacttttaagttaaggacaaaatgatatgcttgtttagatgcatctcccacctttttgaatgggttgttattttttgttagtttgttctaacagacttgtttccataatttgtcatttaactattctgtaaatgttataactcatatgattcatatgatggactgatgttttcattccactttatgttgttcttgcaacaaaattatttagtcaaacctatctttttttaaacactagattttatataatacttagaaagcctctactgctatttttaaatatattattttattttaattgttagagttgggctgtcacccaggctgaagtacagtggcatggcctactgcagccccaaactcctgggctccagaaatcaatccttctgcttcagcctctttgctgggattacaggtgtgagccacagcaggcctctactgttttttttttttgtttgtttgtttgtttttttgtttttgagatggagactcactctgtcacccaggctagagtgcagtggcacaatctcggctcactgcaacctccgccccctgggttcaagccattctcctgcctcagccttccgagtatctgggactacaggcacgtgccaccatgcccagctaatttttgtatttttagtagagacggggtttcaccacgttagctaggctggtgtcaaactcctgacctcagatgacccacctgtctcgcctcccaaagtgctgggattataggcatgagccacagtgcctggcctctactgttatttttctaacgtgctcatttttttccagaacttatatggagtcattttttaaatggagtcattttttattgagattattgatctagctagaatttattttggtataaagaataaatcaaagtctacctctttttttcaaattgctatcctgataactcatgagcatttactgaattatcctgaattttctccactgatttgaagtggataaattatcatacattaaattcccctgggtatgggattatttctggactccttataactaaagaaatgcaaactaaacaagatactactttgacctgttaaaagtctaataataatctggtttgggtgaaggtgtggagaatgcaaattaggaggggatttttttcttagaaatgaaactgctaggtgatataacccacagtatctacaggtgaacaaacttgtaaaaacatgcactgaaaacatactgagatttttactggattggcattaaatgtatagatttgtcccagaaaaactgcctggcacatgttcaagtattctcttatggcctttattaaagttttgtagtcttttgctttgttttcatctacatcctgcactttgcctattaagcttattcctaaggtattttgtactatttgttattgctgtaaattgaatatttttcattacattttccagttgattactgctggtacataaattgtcttatttgagagattggcaccagttaatttaaaaagctaagcaggaaatcattttaaaataatatatataattccatataacattttaattttaaaaacacaaaaagtgtattcatttgaaaatctctttacgtaaggtcaaggttttttgttttttttttagttctaagttgtttttcttctataaaccacaccaataatgtgggtttatgattttcactatgtgcagggtgaggacagaaaaatgcaaaggagtctgaggcctagagacacaatccttctactttccgacctgggtgggttcgcccctccttgggcaacctggtagtcccctgctcccaggaggtcaccatattgatgcagaacttagtgtggacacctaatcagcatagcgcacagcccagaactcctgggctccagtgatcttcccacctcagcctacagagtagctgggactacaggcatgtgtcactgcacctagcaatcctttctagtttcttacgttgccccctcatatcttttctacatctaagtctacaatattttctgcaacttgcctctgagtcatttcaaagcaccgaacttggtttgactaaaacaacccttttttgcacttccattttataacattacaataatatgaaaaatcagcaaatataaatcagggagtaaacaatgcttaaacttttaatacacacacaatttcactactgggagcaaaagaattcaggtatatcagagaatagctttatagccacaagcatgcagcttccaggagcatcctgagagaccaatcctttttaacttctacccctcagtaataggtaaaagatacaagtcaataagtgtttactttaactgaagagtacttggatttctgataataatctatgctggaaggtgttaaatttactattcacagaaaacccttgttctaattatttgaaagcagcagagatatttcctgcttttgtataaaacttggcacattactatgtacaaatgcaaactttttaaataaataaagatgaagctaaaaatgaaggatggtcatcatacgattttaatctacagaaggatgaaaatgtctaaaatctcttaatcttaaatttctatcataatgttagaatttagtgttttaaaaagtctgcagagcttactcatttaaagacaaagttctttgcttaatatttacctaagctatggaccaagtttcctattttatgtctgatatggtttcaatgtttgtcccttccaaatctcgtgttgaaatgtgatccccaatgctggaggtgaggtttggtagaagatgactcgtgttgaaatgtgctccccaatgctggaggtgaggtttggtagaagatgactcgtgttgaaatgtgctccccaatgctggaggtgaggtttggtagaagatgactcgtgttgaaatgtgctccccaatgctggaggtgaggtttggtagaagatgactcgtgttgaaatgtgctccccaatgctggaggtgaggtttggtagaagatgactcgtgttgaaatgtgctccccaatgctggaggtgaggtttggtagaagatgactcgtgttgaaatgtgctccccaatgctggaggtgaggtttggtagaagatgactcgtgttgaaatgtgctccccaatgctggaggtgaggtttggtagaagatgactcgtgttgaaatgtgctccccaatgctggaggtgaggtttggtagaagatgactcgtgttgaaatgtgctccccagtgctggaggtgaggtttggtagaagatgactcgtgttgaagtgtgctccccagtgctggaggtgaggtttggtagaagatgactcgtgttgaagtgtgctccccagtgctggaggtgaggtttggtagaagatgactcgtgttgaagtgtgctccccagtgctggaggtgaggtttggtagaagatgactcgtgttgaagtgtgctccccagtgctggaggtgaggtttggtagaagatgactcgtgttgaagtgtgctccccaatgctggaggtgaggtttggtagaagatgactcgtgttgaagtgtgctccccaatgctggaggtgaggtttggtagaagatgactcgtgttgaagtgtgctccccagtgctggaggagaggtttggtagaagatgactcgtgttgaagtgtgctccccaatgctggaggtgaggtttggtagaagatgactcgtgttgaagtgtgctccccaatgctggaggtgaggtttggtagaagatgactcgtgttgaagtgtgctccccaatgctggaggtgaggtttggtagaagatgactcgtgttgaagtgtgctccccaatgctggaggtgaggtttggtagaagatgactcgtgttgaagtgtgctccccaatgctggaggtgaggtttggtagaagatgactcgtgttgaagtgtgctccccaatgctggaggtgaggtttggtagaagatgactcgtgttgaagtgtgctccccaatgctggaggtgaggtttggtagaagatgactcgtgttgaagtgtgctccccaatgctggaggtgaggtttggtagatgactcgtgttgaagtgtgctccccaatgctggaggtgaggtttggtagaagatgactacatcaggggggtggatccctcatgaatggtttagcaccacccccttggtgataaccgagctctcgctcagttagttcacaagagatctgcttgtttaaaaagggcatgggacctcctccttcctcttgctcctattgtcaccacgtgacatgcctgtttcccctccgacttctgccattaatataaacttcctcaggactcaccagaagctgaggagaagctgatgccatgcttcctgtacagcctgaagaaccgtgagccaactaaaccctactcttttctttacaaattacccagtctcaggtatttctttacagcaatgcaagaacgaactagcacaacatcagtaagaaaaaaagggtgaaagctacctgttactacgagaacatttgactagaagtcaagaaactaggattcgagttcctgctccagcaataatcagctatggttttagtttcctaagttgtacttgagtgactggaaggagagctaaactatataccaaagaagatgaatggctagttgtaacaggggtaaggtggacttttattctgaatttctaggatccagtgctagctccaacattagaggatattaagactaatgcaatatgcaatgtgttaaccaccaagcaaactaacttagaaatatatgtggtttttataagcaaagcctatgtctatttgatttaaattggctgtacattagcagtgctaaaaaaggcataccaaatgcatcacatgatcacttctttatctgacagagcacaggcatcctatctggtcaagaaaacaaaacaaatcttattgttccatgatttcccacaacataacctttatttctataaagttaagatattataggtgatgtcatctataatagtatctttttagaggtttacattcagaatatgttttcatttcattttattctgaaaactcttcataaggtcaaaagggcatgtcatatccatcttaaagttcagggcagagtttgcccaaggtaaggtcaaaatttagaaatcaaggattctggatctctaggtcacagtgctttctattatcctttatgcatgcactcactaagttgtattctttcattatacaaacatgtataaggaactgggttgggtacttcttgtgaggacccagtttttagttttgacttcgtcattctccaccaataatcactttgtaatcctaagc

SEQ ID NO: 6246 - DNA, 6000 bp, Homo sapiens
tgtgagaaccaaggaccaatgggtcccaagagacaaatcatacactaatagagagttacatagaaaagctaatctgattacattgtgaaactgcttcatttccagtggaatgtgtgcatttcaatgctagtataagccagatggcagtagcctttgttctaacagggtctgacgatagtttgtatatttaaaatgtcacaactacacactcacttttcttcagtaaacagtaaagaacagctgctgacaacttcaagtgcaattacttatcttctctacagagccattttgatcttcctcttcactcaccagagtatcaaataaaactgatgttcccagtacacagcatggttctgaatagtgtgaagataacaaagctagcttctattaattaccattctattagctgatactggtagctagaattgaatgtcatatatgagtaatgctgagaaattattgtaactaattaattgacactcatagttagaaatgtattcagtgtctccagtgataataatgtgccatgaaaaataaaaccatttgagaactatgggatagagattaatttaaggaaatcatcttgaactcttcctaagctcttaaatcacccctccaaatattcttatttttcaagtgcacatttttataaatttttattggggatgtgtatgcaaaattgaacaaactgtagtagaaactaaaacagtaagaaacaaaaatagtaaaaaaaaaaaaaaaaaaaagagcatacgatgaaaaataaattcccattctatttaagacgccagtcttcttccaaaaggtaaccactattattagatttgtgtgtattaatttctttccagaaaaaaagtctgcctctcacaaattataggtaatgctatatatactcctaataatggcaaaacagtattcctatacaaactgttgtttaaagtagaagagtattctaaggtatagaaggatgtgtatgacttttcagtgagtcagacatttaacttgttcttactcattttcaaatgcaagcatctgttacatatcttctgacatagtgttttatatatcttactttggcacacctgaaggctactttctgaaaaagtagtgttccaaagatatatttttgtagatatttccaattggttatccaaaaaggatattttcatatgtaattatatcaaaaaatatccgagtgtatgtgcaaggaactgcatgaggcaaggaagaaaattggctattttttgtatattcttttgtaatgcctctgagagtctatttctaaggctgtgaataattaagtctgtaagtgaataaataatttcagcaaaattagatttgctggccatttttaatttgataaatataactgcatgatgtttgtttttaattttaaatgtattagacaaaatgtcaaagacaaatgctgtacagttatttaatttagcaatttcatagagacacaatcataaatggtgactcattattttcctccaggagaaactttcattttctccttttagatatgtgatatacatataacatatattatatataattatatatatgaatgtgatatatatataatttcaatttcaaaaactttaaagacatatgccctttaacttagacttgaaaaatgtgtcatttattaaattgagttgaacagacttcttagccattactatggaggaatagaaacttagcattagaattccataatcttaactcaccagttaggctaacaacaacaacaacaacaacaaattgcaagctctactggctttagatgttgatcaatacttatgaagtcatgaaatgattaataaagaatttccttgtttataatcctcattaggttgtttcttaaagcaccataattcttgactaagcattttaaaattctaatgataacacacagtgatacgcaaatgtgataagaattatcttaaaaaatgtacttaatataagaatccctcctgtgttcataaagcactaaaataataattctagaaactaataaatataaatttacaaaaatatatggtcaattttaagtggcaagtatgctacttatgttttcaatttaaatttaaatttgcaggtatcaaattatggccataattgataatgacaattatatttacaatataaatgtcaaatatatttccctacatgatatacacttatgatgataccctctcaatagataattctaatatgaaaaaaaaatatttgcaaacatttggacaaatgtgactttcacatccaactccatcaaataatgtttaatattaatagacttaattctggggagatatatttgatcaatcatttaattttacaatggccaaatgtatctatgtaattaagtgcatgcatctgagtgctgtctgaaagcatgtatacacatatgaccatgtgttgcttagtatagactaaaacatagatacatttgttcatgtgggtaaaagttttggctcatatttgatcactcttatgtaattcacttatatattttctaagcaatagtcaacattcaatgcaaataaagaaacagattaataactgaggcttttccttatatctatgatgttttccctcttgtgtttttctgttctgaactgttcaagtcacagtattttctaaaatttcattctcttgcagagcatcttatagagacacctagtggcaaaaggtaatggtggcttccgggaccatccttaatgttgagttaatggcagaaagttttcatcatttacttatttgaaccacaagaggtaaactagattattagcataagtgtttctaacaaaactgtaacctaaactaattccaaacatatttaatacttcttagttgaataatatttcctttaattagaacaataaatatttaaaataaaaataatacaaaaccatgaattaaactttgctattgaatgaaattataaagatttagaacagtgataaaatataacagctttatttcagctattttgaaaaaatcaataatcgattaagacaatttaggacctttaagaacttctacaaagttaatcgatattgaaaattatgtttctgataggactcaatatttatattccaaaggcttctggctgtaattcctatataattttaaatttaaatatttcatttcattttgaaaatataaaagtaattttaaacttaaaataaattttctgaaatgtttatataatgttaaaagttaatgactgaataaaaaatacagaaataagccttttgtggatgacgtgtaagttatatttgttgatgcaatgtatctacagctagtggctatcattcctaggtcaaatgcttctaaatttaatgaaacgttcattacaagattttgtttttattgtctgaaattacatattacttctttccttcctctcccttgaatataacccatacttaaacaaaattgcttccaaataaagtttttatggtataaagtaaaaatatatatattcacacaacatacgcaggggaaagttcaaaaaagattgcagtacctcaggagactgcaatgttcatcacctgagatatatatacatctcagaacatagacatattatcagactctatatcaatattaaacatatgattaaccagattataacacagtattatcccaaatattactaagaataaaacaatatcaataataattaagacgtaattaattgcaaaataaagtgggtaaaatatatttacatggagaaactaactacatagttatcaaaggaacaggcacatgtgcactcagcctgcactgggtcacttactattatcaacttttctcttatacccgggatgaacggcaggtctaatattacaaatattgaaaacatgtcttatgaaagtaaagacccctttttggggatggaagtgtctggtttcatggaaagacccaagaatacttactgtagagatgactctagtggagtttagcagatgactcttcaagaaactcgctttctatcgatattgcatttacttaggggttttccagctttttagtacacaccagatgtattcacaaacattccctctgaaagtctttcacattcccttgtgttgcctagacacacctataaaacgtaattctattaaagagaaaagaaaagtagcgcccttgtttgcagctaggaggaaccactcccttttccaggatccttaacagtaagtacacgagacagcagcattctgaatggcaggaggaaggcaggcgatcagcacagggctggaatcatctgttcctgaccaccagcaagcctggcactgccggggttatttccactcctccctttcccaatccgagaattgcacagtcccacgctcgaattacacacatggtccaagacttctctctcttcctacgaatgtgacatccaagggggccccggttgcgccgccctagcccagggacgccttcgccctcggctgccatctatcggccaccgagcgcccgcttcgccccgggcccatcatgtctgctgcagcttggctcgcaccagaggcgcgacaataaacaagtgcactggactgggccctgcacccgctccggagcagctgtctcagagacccggtgttgcttaccgcgttgccacctcctcggcgcccgggaggaagacgcaactttctcggagttttttttagagccaccgggctgccaggacaagccacaggcatagaacgacgcggttgctgcccgccccccccttcccccagaaaccccaaaggatgtcggtgatagagagttccaactaatgacgattgtgcgccgcatctggggaagggatacagaaaaaaaccctgcaaacaccgtgaggatgaaactgccaaagggatgcaagagcctctcaaatactaattaggggccgcggcggcggcgggctcggcgcggagacagcgtcggcgggatcccagcgcggtggtcgccgctgcgctggggggcggaggacagcgcaggagctgcagccgccgccttcgctggagcagccgaggggccggtgccacctttgctcgccccctcactaccatgtacagtgtgcgctgcaagaagaaggcgggagatgcatgcacacccccgcgacccgctccctctggctcgtcccccggcgtgcgccactgaccaggggggaatgtggtgaagacggcgaggaggagagccgaggggggaggggagggccggccggcgcgaacccaggccggagggtgcgaggagccagaggaggctggagggggcggcggccacagctgggtcggagaaagttgccccctatgcagatggcaactgtgagtacccctgtgggggggagggtgcagcgaaggctgccagggaccccgcgatcgcgccttaacacgtattggagcgagtgtgcgagtgatcatgagtgtgagcgggtgcgagcgctcggcggggctgaccgtcacgttggcggggccggcggggccaggcagtcttctccgcgtccccctcctcccgctccgtgcctcccctcccagcagctccccctccccgccccgcccggctccggctcccggcccctaccgcgaggcgcctctccagccggacctccgccgccccctcccgccgcctccctatcccgccgctgcagaacgccccccgctctccaccccccaaccctgctgcccgctccgactaccgcggagagcaccggggagagccttttggggagccccggaacccgcggtcgccaccgcggcggcggccccaggctggaggcgtccgggcgcctctttcctccagcctctgggactgcgctgctcgcagtctcctcgccctgcctgggcttgagaaacctagtgcataccccaaagagggtttttgtgtatgtgtgtgtttttaaagggtggctatgatgactgggccttggagatgtgagactgggtaagtctatcgtttactttgcaaaagaggtgtgtgtgtgtgtgtgtgtgtgtgtgtgtg

SEQ ID NO: 6247 - DNA, 6000 bp, Homo sapiens
ctctggaggctgaggcgggaggattgctcctctaggctgcagtgagctatgatcgtcccactgtcctcctgcctgggtgacagagcaagaccctgtctcgataataacaataatatcaaggttgtatttaagagaaaggtcgaaatggctaaatgcaccagctctggagtcagacactctgctccgctatgacttgcaggctccagaccctgagcgtgccttggtttcctcatcgtaaagtgaacagaaggcaccgagcctgcacccaaggcccccgagcagctctggcagttggagcaacacccggaagcttcacggaacaaagaattctgcgactttttgataagtttgttatctggatttacactgtttctttatagaagaaagaaaattgtttacttgtcctcacagactgacactttcccaagggcagggctaacgcacagagcatcactaatgtttggagaagtataaaatatcaagtcaaaacagttgggaaatttttaaaaagaagctacatccagagaactgacgtccatctgtctaccctgacaaagttaggcaaatccccagtttttcggtgtatctttgaaaatatgttttctcgatttaacttaggtggtgttaatattctaagccaccaggaaggaggtctcaaagaagccaacggccctgaagctgcttccctgcagacgtctattctcgagatggagaatgaaataggaatccaacaggactaagtttgttgaatttagtctttccagggaggaagaggaagctgtcttcctaagggctcctggtggatatttgctatggaaaaaggaaaatacaatatttattgtacccaccaagagtgtgatcaggcagaatacataataactgtcccttaagacatgtggaatgctgagattggtagatgattgtgttcctggagactttaacatggggagtgcagatgaaaaccctccaaaaggagaggaaagaactctatcactgtcagcctggaatacctggcaggaagaagtggtattcccatttttggaataactcgtccactccagttttatacccgaccctctgctcttggggctttgccagtgctcatgggcaccctgacggtcacactgggacccaggccccaggccagtagagacacgcgatcactgactccatgtgcctcccaccggagtcaccagcatccctactccctgcagaacaggcccacagccctgtggctcccacccctcaggctgaggctcatataggatcaaagagatatatttgctcacagacccatttatgccagtgatgcttgctaccataattacatggtccacttaacattacataaattagcccagcatggtggctcacgcctgtcatcccagcattttgggaggctgaggtgggcggatcactggagctcaggagttcgagaccagcctggccaacaaggcaaaacccatctctcctaaaaacacaaaaattagccgggcatggtggcgagtgcctgtaatcccagttactcaggaggctgaggcaggagaattgcttgaacctgggaggcagaggttgcagtgagccgagattgcgccactaccctccagccaggctgacagagctagactttgactcaaaaaaaaaaaaaaaaaaaaaattaaagcaaaaagaagaaagttgttacttcaataaaaacaaaatgaaatttttagaaagagttgatagagaccaatgctaaaaaaaaaaaaaaaaaaaagcaaaaacaaaactgttgacttaggtgtaaaataattgcaaaggagtggggaaaagaataaaaatctggaggattttgcatccggattgctcttttccttttccctgctcttcccagaaccccctcccaagtccatattggaaagtgggggcaatgtgctgagtggttccctaaaaaggaaaatatggaacccaagttagcagctcctggtcgaagaaaaggacagcaataggacagacccaaatggcaaaggcaaagacgggagaatgactgtgcagttgtgttttctgtaaaaacaaaaatttatgcacaaccatacatctttcagattctccgctgtaaccaacctccaggtcacagccacaggacttcccacggacttcccctgctcttaaagcaaactgcagaaccaagcgtggacttctgctcctgagggggacggaaggacagtcccctgcggtcatctctataggagatgggggccatgggtgggagagaaactccctgttgcactttgtagccctcagtatgattaaagtgtttaccatgtacataaattatgctttttaagttcacatgtcttatatacttttacgttactttttaaaattaaaagacagttaacttttaagaataaatcaggcgcagtggctcatgcctgtaatcccagcattttgggaggccaacgtgggcagatcccttgaggtcaggagtttgagaccagcctggccaatatggtaaaacccatctctactaaaaaatagaaaaattagcctggcgtggtggtaggtgcctgtaatcccagctacttgggaggctgaggcaggaaaatcgcttgaacccaggaggcagaggttgcaatgagctgaaatcatgccactgcactctagcctgggcgacagagtgagactccgtctcaaaataaaaaaaataagaaaataaaaaataaattagccaggtgtagtggtgtgcacctgtaatcccagctactcaggaggctgaggcaggagaatcacttgaacccaggaggtggaggttgcagtcagctgagatcgcaccactgcactccagcctgggcgacagagtgagactctgtctcaaaaataaataaatcaaaaagaataaatgaaaaggaaaaataaagacacacgttccactggaaacatgtgaacatgcagaggccacagggatgggacatgatgcattcgtgggaagcatataggatattaacttccatctctataaaaaatttaaaaattagccaggagtggtggccacaccagtggtcccagctatgcgggaggctgagaggggaggatggctggagcccaggaggtcaaggctacagtgagtggtgattgtgccactgcactcagagggataccctgtctcaaataaataaataaaagcaaaagttgatcttgtcaccccctgcctggaaaacctttaacagttggcttctctgtgcctggccgtggtcaccacacacctccgaccctccgcccaggtgcagggcccctggtttcatctctgtccttccccaccaggtccctactgctcggtccctggaagcccagctgccattcacatcccccttctcaggaagcccccaggactcccctttgaccccacttctctgagttcctagctccagggcacactcccaccaagccctcaccccaggcagacacttcattcattcactgaacacacagggaagtcgcctggcactgccccaggttctgaggactgagcagtgaatgaaaaatccgttgcagggaggaagggtttttgactccagcaggggctgtgctgggaaaggcagaaatgaggaggtgccctccgcacagggaagcctggggcgccccggaggagggggccctgcagctaaccccgaggcgggcgggcggtcaggccggtgctcaccgcagcagtaggaggcctggggtcgcggaggagcggcaggtcgagcagggccctgtgggtcccgtcacaaggacggagtctcgctctgtcgcccaggctggagtgcaatggcgcaatctcggctcactgcaacctccgcctactgggttcaagcgattctcctgcctcagcctccagagtagctgggactacaggcaggagccaccacgcccggctaattttgtatttttagtagagacggggtttcaccatgttggtcaggctggtctcaaactcctgacctcgtgatccgcccgcctcggcctcccaaagcgctgggattacaggcgtgagccaccgcgcccggcatggatcgagttttgatccatcccgatatggctccctgctgggagggacgggtctccttcgcgtccgacccgccggcccatctcaaagcgggaaaaccggtccctgcggctgccctagctcggagcccgcagcttcgtcccgacctgcccggaaaggttcctccccctccctccgctccgggagcccggactttgcccggcccgtcccagcccaacccacctgcgccctcgggacccacctgcgcccccgggacccacctgtccggctcctggggacgcccccgccctgcagcagccgggaccatttgatcgccctgcgggtgagcgtgaccaggtagctggagaaaaacttctcgtaggcggcgtcgtcgaagtcctcaggccgctcgaatccgtacgggtcgatcctgcaaaaccgagagaaggaggccggcgtccccgaagtttcctctggggggtcgcgggcccgcgcggggaccgcagccgccggggacgcccgcaccccgcgccacacacctggggacccgcgagcgctcggcgggctgcatgcggggagggaggcgcgcaccgagcgaggccagcgggtcccaagttcgcctcccggctccggggcgcttaagtccttccggcgggaccgcgggcgcgtgggggcggggcggggagcggagaggggcggggctggaggcgggggcgggggggggcagggcggggggaggggcggctgggggcggggaggacttggggagagaggaggggcaggagcgggggaggggcaggggagcacccagggcgggggaggggcggggctgggggcgggaggacctggggagagaggaggggcaggagcgggtgaggggcgggggagggccgggggaggggcaggggagcacccagggcgggggaggggcggggctgggggggcgggaggacttggggagagaggagggtgggggcggggcggggcctgctcccggggcttccgaggccgcggcgtcccgcgggcagaatcgggggcgcctcccgcagaacccccgcggcctggacccgggtgagaggagcttcttctgcgattccttcaaacctcagtgcctggccgacccgactctgacacctgactcctatttttattttattttttattttctccgctgcatttcaaggccgagaccaacacacaaatgagaagcccccaggggcgcccgcccgttcctgcccccccaaaccagggaccggggtccccccaccggcgagccaggcctgggagaatccggggcagctctggttccgaacggcttcttctcggtccgcatccaatgacattgtcctgagatttcagctgcttttcgtgtccgggaggccccggaaatttgccagaactgcagattttgaattttgctctggcgacgtggcaaaggggagcccccagacgtgaggcgctggggcgacctcgccctgggtcccccaggggtctggagcgggggctcctccgacaggcctctccccgcctgtaatttaggcccagggcgacctggacaggccccaggaggaggccgtccccggactccagacgcactttcctgtgagaagcagcccggcctcgtctgggtgaggcgaggatcacaggctcagcgtcccctgcgcgtccgtcagggcctttcggaaccaacttgggaccttcccatgggtgtttccggaatgttccatgcgagcgccacccaggagcctggtcagcagcgtgtggaacggaccggtccctaagtgcggactcccgcctctgcctttcacccttctccagcccttgcaagaccggggggcggggtgggggtcagtgcccagcggagcagagcccccgacacggttcctcccgttcctagtctgctggttctgggaactccccaagctttcagcccagctcctcagcactggcctttggtaacacgcggcgtccctcatttgaaagatcacacagcc

SEQ ID NO: 6248 - DNA, 6000 bp, Homo sapiens
ggccttagaagtaaggtcttcctgacctcctcccatcctcctgtctcacacctctctttctcacactaaagagaatcctagaagccagaattcttataccccaaggccggtcatagaaactagaactcctctcccagaaagcaagccataaaatgtaaagagatcaccctcttccttctccctttaagagtctaattccagagaggtactgcccatttctggggagtggaagtggagaagaggtaatgctacacaggcagaccaacaagaatctttgtacaaaggacttgctggatttctcacctcagtgtattatcattacattataccctttggtgcaaccccatttttacatggctgacccttttttatatcccacgtataaagttttccctggagtctttgagtcttcatttctgatctttcatgtcacatacaattttgattaaatatatttgatatgcttttcttttgttaatacgtcttttgttataagagtgctggctttgaaccttaatggtggtgagaaaaggctttgcacctttctgccctatgctgcctacctgtatacctgacattggtgattatttttgtggaaaacaacttggaatgtctgatttagattcttgttttcttgccattgttttatcgatgtatataaggattaaatcatttgtgaggtactcattcaaaaattttgtttttctattattcttaataaaatttgtgaaatgtttgaacaattagacattaaaatgatttttttattgggaacatggagatagtttatcatcaaatacagttttatactttggctttttaccaattagatatattcttttccaaaaacagttttcatgtaactcttttattgatttctttgttaatatattggaattattttacacataatcatgggaaaatcttataaaataactgccaaatgtaaaactaaataccttagctgaattttttgacctttgtttgtgggtttcaattatgatacttttctttaaatatgatactttctgttgatagatgatacatatcctacctatttgaaaagatatttccttgctaaaaattattgacatttaacagtcttccattgtctccctgcttatcacaatagtgacagaaattagcatgtagtaacatgtttaggaattaaaactaggattctaatgtatggagaaaactgtgcaaatatagatatattacaaagaataccctaaatccctattatatgccaaagatctagaaatagtaatgatatcttaaggatctatcaaggctttgttgtataaagaatgaagtaaaaataacttaagaaaattattatttaagctattggaaaattactgaatctaaaacagatttaaaattgattatgttggctgtctacattagcttgattaattcaatatgatatattactctctttactagtcatgtaaatatgtcagcaatgtttacatgaaatctgaaaagtgttttatgagacatgttaaaaccattaaaactgcaacttatatgccttcttttagatactcaatcatttataacctctaattttcagatgaagttgagtcataagcaaagaacaaatctgtcttaacagtgcttattttagtaattagctattataagtgacttcttacctaatcagtacacaattgtttaaaaaatgaattttctatcatgtgctaaaatagaaaacacccattttactatcatgctaccaaacatatgttaaataaaattaaaattattttgtaaaatgtagtttatgttttcagttaaagaaattttggtaaattgctttttgcgcgaataaatttaaaatataatcttgattaacacagacaaggacttacacttaataatttatccaggtcaatcatatgaaataatcgtttcacatatatgaggacatgaatacattttaattttcatatgaaataagatgcaatatatatgaggataattttaggtgagaagttggtatcacctatgactgtctattgacatattggatattcatatattggatattgccaattgacaattgtctattgagacattggatgttatctattgtctattgtcctctgttggtttaaattatatgatacttttctttgaaaatgctattagacaatatccagtatattgatagacaattgtccaacagacaatatccaatatatccaatatagtctattgtctattggacaattgtctacactggataactgtctattgacatattggacattgatatattggatattgtctattgacaattgtctattgatatattggatttgtacaaatgtatgtcagtgaggccagcagaataaaagcatcatttttctcagagagaaacactgtgattctgggttgcatataatacccaacatcctagaaaattaaatgttagatgttttccaaatcatccttgtaaaagtaacatccttcaatagttatgttctagatgcttgggtgaaatatatatgcatatatcatgcacacacatgtaaatacatatatatatatgcatacacttatatccaaacacacacctacacttttatttgtaacaactaccaccctgtaaagctgccatagctaacaattttttccattacatattatatttatctttaaacctaaggaagcaatgaaaggaaatttaaaattgactcattttcatatatatgaaacgattaaatttctatttctcagcatattaaaattatctccttcggcctccatgaccaaaaccatgtgtttacttgtgccttcataaggacttctcagctctttgagcttccttaccttactcccttccctaaccaaagtcagtgcccctaaggacatctctttagactgattctctactgactgcaccctaccttggcaaatgtgtccacacttatcatttcaaatactatttctggtattttttccagcttttgctttactcacatcaatcttttcttctcactatcaccatcatctttcaggtttatctctgtttacaaccagaatatgtcaatatctgaatattgacaaaaacacaaaatgagataaacttgttaagattgacacaatacatattcccatatcagttttatatgaatgacaattaaatttttttgtttcagtctctatatcatttagctgatggcttgagcttttactttaaaattttctccaaatatactattttgggtgttcttttgtttcaacaaaatgatttatgtactttcaatatatcttcagtaactcctagattaaataatcttggcatgcaaattttattttttaaattcttacaaattcaatttgtcttataaaatcaccaatgcagaatatgaaattaattccaaggtagaaatttattattggagaatccaaagcttcagcttcatatgtgatagcaggaatgactaaacctctgcatataattttgcatacagaattttttaataatctacgttgtactgaaagacataatccatgtttcctgatacagaatgttcttttttttctcaaattatatgtacttttttaaatctaaaatgtctaagtttacttagacctagttgtgtgctaaaatccaaacaaaaagaaaggattcactgctctgtcactaaaattattattgctaccattgattcaaaagttggagacattatcatgaatagtaattttcaatttaaaaaactttcaagttaggtgttattcaatattggggtatggccaaaaaaaattcaaagtcttctgtaaatgtgtgccttttaaaaaagtcactattagtaagatacataaacaaggcaaagagcgataaaaatggaagtaaattattattttctagcataaaatgttttgaaatataatgagttaaattttttatttagccgtatacctgataagaaaaataagcaagaagtaacagaaataacagtactgaaaaccatttacttataaataatagtgatgtgctagtagagaataaacattaacactaccttgtaatcatgtcttgtaggtattggtttatggagatctactttaataattgttctggctaatttctgttacagaaactaatttcctccttttttgattattgtattgagaaagctgaatgaataggctgtttgccaggctgttggcattcaatgtagagaaagtgtgtacaactgtttccatcaaatattagactgcagagattttgtttgcagggcccttatctaatctattcatctatcttatctatctatctatctatctatctatctatctatctatcatctatctatccacctacctatctacctgtctcttgagccgtggagctatctatgccatatttttataaataatctgaggaaatatgcttcaggttggaattggctattttgaaatttttactcagtgttttaaattttaaattttaaagtttatacagatgaaacacacccatcccttcaacttattacacccttttcaaaatatttgaatgacatacagtgcagtttcaatacttgttaactgggtataattcaaaccacacttgtcagcagccatgcctttatccaccttaccattttgtactccacacaggagaacactcttacaacctttggaactccagaatgaggtgtcatcaggatgaagaaaatgactaggacctgcagtgggatcaggagtaggacctatgcaagatttctgagaagccgagaaaggtatgcagaagccaagatcagaaattatggattatttaggcattgaagaggagttataggaagtcaggtaaataaaatttttactaaattcagaaggattagtgtactcagtcatttaatcctgtttgaacatttgactcaagccaacctacccccactttgttttcccgtaatcttaacaattttcagataattgtttcctgccccagtgtgtcagagtctaaagatagaatcccagccttaaaattaaaacaaagcatctgttgcaaagaataaagctgctttttccccctcaaatagttaagatccatagtaaaaaaaaaaaagaaaaaacaaatttggaaagttgttttgtttctcaaattagaagtgcaataatattactgtcttatttgaacaaaaagtatgtgatctatcaataattttcacttagcttactatttctttataaattaaaccaatccagacattttcaaaatgatttcaacgctatttactttggataaatcagtcacagtggaaataaaaaactgtctctcaactattttagatacctcatagaagtgaattcatgcaatatttgttctcctgtgactggttggtttcgcttagcataatgcccttcaggtttactcatgttgtaacaaacggcagttattttagttagtttgggctactataataagataccataaactggatggcttaaacaacagcatgtatttctcagagttctgaaggctacctagtccaagatcaaggtatttgctggttttgtttctagtgagggtcctcttcccagtctaccatcttgatgtatctctacatggcagagaggaaaaggaagcaagctctttcctgtctcttataagagaaccatctttatcatctaatcaccttccaaagcctccatcttcaaacaccatcaccttagggattagggttcaaacatatggattttgggatgacacaaacattcagtctatagcagcaagatttccttttttaaggccaaaaaatattccactgtatgtatatacagcattttctttatccgttcagctgtaggtggacatttaaattatttctacatcttgattcatgtgaataatgactgaaatgaacatggtaatgcagacatctctttgagatcctgtgagtagagagacatggagaattgttattcaattgatataaaatatcacatatagaatcattaagttctgtagatctactgtacaac

SEQ ID NO: 6249 - DNA, 6000 bp, Homo sapiens
accatcttcgatgcttccagtcttggcatctttttttctcagcttctttttggctatcttctggaatggagcaaactctaccactgcaggatattctaggccttttaacaggaaacatgttccagaagccattctgaaattctactacattcatttcggaaaataatgacctaacttacttaaagagtaagtgtaacaacgacaatgcattattactatttaaactataattcatccttccagtaagagattaaaaaaaagattaaaaaacctacaattttattacactttcaagcacctgcaaccttaacacggcaaactccagacttaaacaaggatgaactcctggtaagaagaacatttactaaaacaatccatcatgttgtggtggttgcataactgaagttgttcaaaattcatcaaattgttcactttaaaagggtgacttttaccatatgtaacttacacctcaatatacctgacctccccagccccatcccaaataatttatcgttggaatacctttaaataatgatttcttagctacactttacattttattttaaaaggttaattcaactatcaatttgttatttaagttcaagaaaattactttgcttagaagacaccatggctaaaatagagggtttcaaagggtttatagaatattccaggtgaaatctgcttctgataaaagtagagaatggaagtcattagaaactaacttcgttgctatgtgggggaaaaacaaatacacaaagagaaatgttcactaagagaacctgctatatgctgaatcatcaaatggaacactgctaccttggtactaaacccactgagtcatttttttttgacttgtcagtaatagtcaggtgactgaattataattcctttaactgggagatatttttgtgccaacctccactatccagaataaagtcaagactcagggggacggcagggcactggaccagcagggacgatgtccaagtcaccgctccacccacaaggcctagcacacagtggatactcattcaatggcagatgacatactccctgattccaaagctgaaagtaatcagtgtggtactgccatgtagacagacacatccaccaagggaataaaatagagagcacagaaataaacctttgtaatacttggtcaactgatttttgaaaagggtgcccagaccattcaatggggaaaagaaagtcttttcaacaactggtgctgggaaaactggatatccacagccagaagaatgaagctggacccttacctaacaccatatacaaaaagtaactcgatatggatcaaacctaaatataagacctgaaaccataaaacacttggaaaaaaacacaggggaaaagctccatggcaatggatttggcaatgggttgcatatgacatcaaaagcacaggcttaggccagagaccataaaaacaacggcagggcagcggctcacgcctgtagcccagcactttgggaggccaatgtggggggaatcgcttgagctcaggagtttgacaccagcctgggcaacatagtgagaccccatctctaaaaaacaaaacaacgacaacaaagataaccggaaacaaggacgactggccccttgctcactacaggtgggaacctaaaatggcgcagtcactgtggaaaacagtatggtataaattttgtgactttttttttttttgagacagagtctcactctgtcaccaaggctacagtgtagtaacacgatcttggctcactgcaacctctgcctcccgggttcaagtgagtctcatgcctcagtctcccaagtatctgagattacaggcatgcctcatgatgcctggctaatttttttttttttttagtagagacagggtttcaccatcttggccaggctggtctcgaacccctgacctcaactgatctacattcctcggcctcccaaagtgctgggattacaggagtgagccatcacacctggccatgttacacatattttacacacacacacacatatacatacacgtacatacacatacatatttttttgctccgtcgccccggctgggatgcagtggcatgatctcggctcactgcaacctccgcctcccaggttcaagcaattctcctgtctcagtcttccgagtagctgggactacaggcgcctgccaccatgcctggctaatttttgtatttttagtagagacagggtttcacgttgttgctcaggccggtctcgaactcctgacctcgtgatccacccgccttggcctcctaaagtgctgggattacaggtgtgagccactgtgcccggcccaccaatattttttaagtgaaaaagggaaactcagtaagttactgaataaatgagcaatgaacacaaaggtcagttcaagcatcacatttgcttctagtcacaggaactagcttggctaatgcttatttttttaacaatctttctagtccttacccctcattggagaaaaagaaaacactcatcagtgtcaaaacacgtggagtcggaagagggtggctggggaggggagggcagaaaacaacttgctgtgaaaggtatacaaacttgacagccaggaacacaacagcagacagcctgacaggagaagagaaggaaaaagatgaaagcagaaccctagaagtactgataagggaactattgagagtagagttgaagactgctgtctccgcaggcaaagctgtttaacagcagtgacttcctggtgacattatcataaatggtacagtcatgaaggatgctgtttaggaagatagaagtcagtgtacattttggaaaattcctatcaggtaaaatagtttagctttagaacctaaaaagatcaagttctctcatgcaacaaactcactcatgaaaaccttcattctctgatgataatacataaataggctgtcactattacacagaatttctggaatttttttggattaaataataaaattaaataatttcaatttttaatatctgcacataattacagtaacataatcaaaatttataaacttattttagtctgagaactttttaattaaaatgcacaaatagaccggatgctgtggctcacgcctgtaatcccagcactttgggaggctgaggtgggaggatcacttgaagccaggagttcaagaccagcctgggcaacacagtgagacccccgtctctacacaattttttttttaaatcagccgatcatggtggcacacgcctgtggtccctgctacctaggaggctggaggattgcttgagccgcagtgtgaggctgcagtgagccgtgattgcggctgctgcactccagcctgggcaacagagcaagaccctgtctcaaaaaataataataatttaaaaagcacgaatattctagcaatacttcattagtatacctacagattataatagatttttaaaaaccaataatccaacctttgctgtcaaggaagatatatccatcaaaacgatctctaaaaagaaggatgtcatcaggattcctaaaattaatgtatgctcttgagtagagatgaggataaagactgaaataagagataacagtgaaaatggtcagtgaaaaatacaatagtccattaatttagcctctttttccttttctgggcacaacaaactactttagataaaacttttgtgccaaatcatctcagttaattgtaacaacttggatattctttagcaaaaacaaacgcaaaacgttaactttacaaggcagaactcaggtcccttctccactgcccagaaccggtcctccgaggctgaaaccctaaggcaaggccagggcgcactcccagaggaacccgtggcgccgagagactctcctgacttggggaccttctccggtatttaaaaccgcactggctgcggcaccagcgtggaggccacaggaagagccggcgccccccggccccgcagcgccccgtccgcggacgagcagggaagcccgggaggcgccgggcgggcaacgctggtcctttcaaaggcacccgctttcctaagcgttagccgtctgaaaatcatccgcatttttcatgtaaaccacatctgtgtttctttgttggtggtatttttctttgacggaacggacacgttttactgaaatgtatttattcaaaaagctcacacgactcccatataggagaaatcagggtaaggaacgtaaggcaacgagacggccaccgccgccgagctctgggttccgccctctcttcctcccctcggggcgggcctcacctcaggtcggcggcgaagaactcgaagtagtcgtgtgctggcagcgggcgcagctgctcctccagctgctccttggtgaggcccggaggcaggcggcggatgaccacctgcggggagcgcgcggccgttcccaccggggcggagcgtggacaaggagctcaaaaggcaccgcgtaccgcgctgggaggcccggcccccgcccctccctcccctccctcccctccctccactcagggccgtcctctcctcgcgaggtttgcgcgccccgcccccgtccccaccttgctcagggccgtcctcttctcctcgcgaggtttgcccgcaccgcccccgcaaccggaggacgaagttggcggcgtctcagcctcctgctgctgcgagtcgcggtggaactgcacttctagggccgacagcttctccctcccgctcgggccccgcgcggcaacggccgcccgaaggcctccggccccctccttttccgagcgcatgccgcactctccgccgagccgcagccgccagcccccgacgaaacctcgcgagagctcggccgccccagccccgcccctcctcgagccgcggcggtcggggccgcccacgaaggggtcaggcgctgcgggactagtcggggtcggggtggtgacctccggccacacagcctggctttccgccgggtcaggcggcccctcagggagcggcggccgcggtttagggcggccccggaagcggggcgccggcggctttggtccgggcgtggtgggaggagttcgcggacaagccgccctcccatcccagcaccgtttttatcccactcccccaggctctccgtggccggggcgccatgaaagccgggttcacatttgaattcttaatttttttggagacagtctcgctctgtcgcccagaccggagtgcagtggcgcgatctcggctcactgcagcctctgcctcagcctcctgagtggctgggacctacaggcacgcgccaccacccctggctaatttttttgtttttttaaagtagagacggggtttcaccttgttggccaggatggtctcggtaactcctgacctcaagtgatccgcccacctcggcctcccaaagtgctgggattacaggcatgagccaccgctccgggcccttgcacatatttttttatgaacacacaggcagcagcactttgattacagtaacttacatggaagttattttaaaatggctttccccttctctttttcatgtaggctgcatttttcatctgcagcacgctttctctcaagaatctcaagcacacacaagaaaccagagagtaaaatcactgaggcgtgaacacatccagagaccaagggcgtcactggcagaaaagcttttaggcggatccacggcccgagagccaccctgcccagagacgcggtttcctaggagcagttcacacgcggctctgcagcacccacaagcggggccaggggctggttttcatagttcacagtctgcagggatcttaacaaaaacatggccgtggtaaaagtgcctagaccaggctttcgtcacaactcagtgagtaggaagactagttaggctgatgaaaagctctgatgatgtgtgattaaaagtaggaaaacgtggttgccaaataaaatattttactatatagtcagggggagagatggggataaaaaaatgtggaaaccatttattttaaaattttgactgttcctgcagtgttt

SEQ ID NO: 6250 - DNA, 6000 bp, Homo sapiens
agccacagctatatcctctccaacaaggtctggatctcagccctttgatacacttagcgtatgtgcattttctatttccttccgacctggacgtctactcaaatatgctttacctcttggctctattattttcaaaatttaggtttcactattttattgtgtgtatactttctttagtctactttaaattatttgtgtaatgtaaagtctagtcatggaaatatgtatgcagatgagggtcatacctatttaacttgctatactccattcccagaaaagaaccaggctcaatgcagtaaaccaattctttctgatgacaataatgaggctgatgatccaaagtcattccatcctaggttagactttcctataactgaaattagacccttagaagtttaaatattagtacaaggaatgacaaagccattagagacacccaaatcaaattctgttttcctaaacaatgcctgaaattcatgtggcctgagccaggctaggaactgattcaggagatactaactccagagagatggagggaggtagatgtggaaaactggaatgagacacaacagaaatttcaaactggagtcacagagcagagggtgacaatttgagattaacacagaagaggttggtgagcattgcaatgattaagaaataaggtctcagatgaaattcccagggtagccccacattgaaaacttcccaggtcaaccatcaattccattaccaccacccagggcatggattgctgcagtgtggggaatgtgctgagaggagctcaggaaactcaggctttgatttaaaacctcaggatctgctgtgtactcattatgtgccctgagcagttgcttaacctcctaacaatgcctacctccctgggctgtcatgatgataaaaggaagcactgaatatgcaaagcccttctcatggtgcctggcacctaggaagtcttagcaaatgtaattaccttctttccttatattggtttcctagctgcactaggctaggtggcactgctgcaacaaagtgccactatctgggtgacttagaacaagaggaatctattgtctcacagttctggaggccagaagttcaaaatcaaggggtcagcttggccgggcttgctctaaaacctatagagcagcagtccccaacctttttggcaccagggaccaattccaaggaagataatttttctatgggccagaaaagggtggatggttttgggatgattcaagcacattatatttattgtgcactttatttctattattactacattgtaatatgtaataaaataattatacaactcaccataatgtaggatcagtgggagccttgagcttatttccctgcaactagatggttccatctcggggtgatgagagacagtgacagatcatcaggcattagattctcataggcaggactcaacctagatccctcgcatgcgcagttcacaatagggttctcgctcctatgagaatctaatgccagggcagatctgacaggaggcagagctcaggcggcaatgtgagtgatgggaggtggctgtacttaacagatgaagcttcactcactcgctcacctgccactcacctcgcactgtgcagcccagttcctaataggccacggccagtactagccagtggcccgggagttggggacccctgctatagagaaagaatctttccttacttctctcagcttttgcagctcggaaattccttgacccggggccgcatcgctctaatctctacccccaccttcacgtggcatcctcctgtgtctcttcacatcaccttccctctgtgctcatctgtctctgtgtccatagttcctctttctataagaacagcagtcagattggtttagccaccctcttaatctcattttaacctggttcactctctgaagactctatttcaaaataaggtcatattctgaggtactacgaggttaagacctcaatatatcttttttgggggcgtggcagggggaacacaattcaattcataatatgtttccttagttttctgcccagagtagcaacctagccactttcctccatagtgaactatcagttagctatttaaaggacactgtctgccttgttagtttcaacaatatggcttaaaatatgcctatataggtcacgcaacttagagaccttccaagtctcctctgcctccccctattctgggactggccattggtgactgcctctgcccccagcccccaccgaccccagccaatcactgccagtcctgcacttaccagatgcccttctcttcccctcccttcttcatctgatttctgagcctaaagactcacaaccacatagcagctgcattaaaatctctagactctgccaaacatgaacaatctataaaaaatggcagagacagtgagaaaaacattccagttcatctgaacaaagtccccaccccccacattcccatgctgaagcccaagtgcttatttgaaatgtaggaacttttgggaaagggaatacattttgccactaacactttcatatgaactgcaggggtcagggtaacatgagggcactgggctcctctgtggaacaagaagagcacaggcaaggagcatagacaggggacacgcgtgtgcagaaacacaaccatgaaaaactaggaaactgaaaggagtgcgtacgttttctcataggccaaaagtcatggcaaaaatagattcatgagcattttcctcctctctctctctctctctctcccgtccctactgtaagcatctttgtttctcttaagaagaaaaaaggaagagatggatggcatgtgagaggcaggcccacggtagacagttacctgaatggtctgctttaagcggggataaaagattccctagtccaaagtcacctccccatcatgccctcagggcctaaaattaggatcattaggatcattcttaagttcaagacatctgtcttcccaagacaattgatgaaaacaaagctcttcgggggagaagcacactgccagtgcccactaatatatgcacaggcactgggatagtatattcactggtggtcaccttagacaaatgcccccaggggaataaatccagctatagtcatatgtttgctgtgttctctgctgtatcctcagagctgtgcaaatccctgggcataaaatgtgatatgaatctgcttctgtaaaatgggaacaaataagtacctaaagcattatgttgctttgaagactaaaggagttaacacatctataatgcttagaacagttcctagcctatagtaagctcccagtcagcattggctgctattgttattgctgctgctattgttgttgttgactgagaaaactcacaagtaatgagagacaagaaaggtctggagaactgcaactgacagctgggtggggtgataccaaagggaaggggcctggcagtggccccaaaaggaactgagagcaaaactaaccttgcccactacacgagcgctccaggcacatagcgcttaccaagtcccaagtaggcccctggcactgaattgtggccctcgtttctctccctggtggagctggaagcattcctttaactgctttgctgtggccgatgaggcatggtaaaggcaggagagtacagtgggacaaagcttccataaactagaaagccactgcgtcccggaatctctgaaactgaaccagatacatagggagcacagggcactgtaaattaggtgtcctggattcctgacctggacccacgggacaccctatagcctaaaggaaaggcaaagtgctagcacacagtttcccaaagtatgatacaggtagttcatgaaaaaggtattcaaataggtttctgggttaaacagaattaagtagatttctttaggataattttctcagaatttctaacatacataaatgcattgtgaatctccagggcatagatactgtgcacctatcccaaatgatcagagaagactgagtttaactgagtatctggtgaccagggtcttctgcaaaccctggggttgtagacgaatgctagatggtgtctcctcaagcaagccatttaggctttctgagcccttggtttcctcatctgaaaaatgaaagaagtcagtcagtggttattagctgattttgtcaaatgcactgtgtgaagctggtgaaggcaaaggtgctctgcctctaggcgcatattaagcatctgcctgaccattttttcatacaacttcagggagtcacaagtccctcaactataagatgttctaagatccattccatctctaaaatggtgaaggtacctgaatcagaagcatatagaggcagatataaattacttctgcctgcccagcatcctttcccttttttttttttttttttttttttgttaacagcaatatagtttccttttctgaaactacctctttcccacttctcagtccatatatttcaggaaaagttaaccaactccttccaactccagaagtgggcatgtcaccacagcctgaccaatcagaacacctcactcgccaggccatagtgaagggctcatgcaagggaatgtcgctgacagaaagtgttctccagcataggacataccgtagagctatcagatggaaggatggacagagggaaggaaggagggaagagggaagggggaggggggaaggaaggaaggaaggaagaaaggaaggaagaaggggaggggaggggaggggaagggagggaaggaggggaggagaagggaagggagggaaggagggaaggagggaaggagggaaggaaggaaggaagaaagaaggggaggggaagggagggaaggggagggggaaagggggaaggaaggaagaaagaaggggaggagaggggaagggagggaaggaggggaggggaggagaagggagggaaggaggggaggggaagggaggagagtggaggggaagggaggagagtggaggggaagggaggggaggggggaggcagggaagggagaaggggaggagaaaggaaggaggggagaggggagggggaggggagggaggaccaaagaaagaaaaaaaccaaaggaaggaaagtctttactttgtggctactaaaccagctgaataaaagcctgcagtcttggtagccatctttgtgtttgagagagaaagtgattcttgatgacactggctgactcacccctgaactccatgtcttcctccaaaatatctcacttatgagagccagtaaatatgcccttctatttaaattaacttgcaactgaaagagtgctgaacaattcagatatcaatcttgggattcccagagctacggtgaggctcaattaagaggttcacagtgttcatgctgagtctacattcaacagaaaaccaccgtaggaagacattaatggatgactgtacattgacaagcactagcaggacctgaccgttgacccatgtgagctgtgcaccaggaaggccccagagacttcaagtaatttcttccacctgctgcctgctacctgaaatgccatcatggagcatctgtgatgttggtagggggtagagggcaggtgtggagggtgttgcagagacttttgagaatctgaggaaagctatcaatcctctttgtaaataagcaaaaagatttgcatgcaatttcagtgctttatacactccctgaagccccagagggactctttcctcaaagtgtctcagggctccatccccttgctttaggtagagaagaattgctgaacttgtcaacatgaaagatcccaatctctcagaggacttcaggtggaaaggaaggcagatcaccactggcacaaaaagggaaaggggagtggcaccattccccacagaactctggcactcacacaaacagtgggaatggatcatgctgccccacccctgcatgtcctttttggagtattggagtattttaactcataggaatggggagccagcctagctagaacccctcctttgtcagatttggaatt

SEQ ID NO: 6251 - DNA, 6000 bp, Homo sapiens
ggaggagattctcatcattttttccaccacttaaaataaaaccactcaatgccttctccagtgtactctctggtctatttaaaaatagcagcgcaagtcccaccacttcttatttataaagggaacagccagtgaacatatttttacctcccgtgtctgtcatcatgttcttgccactcattgcctccaattccaaataggtaaagagtgagggccgtgccgctgtgcctggagtggcaggggcagccacacagacctgggggtccctgagctcccccagctccagggaggacgccccaggcatgagcaggggccgccaacaggacaaagaggccactctgtcagcctctgctggacccctgagctcccctctcatgggcctctccgtttgggtggctccgagaggccaactccagccccaactgcaggctcccaggactgcaggggcagggactctggaggtccgtgtgcttcgtgagagaggggaccctgtcctcctagcaggggtccagcggcaccacagcaagacttctgtggccaagtacacgccatgctcagctctgcccccacccgcacccccggaccatcctgtgtgcagctgggctgccccgggacccacacgcgcgaggggcacccggtgctcaggagcctccacacacagcagctcgcacttagaacccacacgccaagcagaaacccctcgaagcgggctgggagcacggacccctgatttatagaggaggccccgggggccctgtcgggggagctgtggggaccggccccccagagctcagcacagcccggccctccttccagacaccagcactcgcatgtcccagcaggtgagggtgggtcaaacctgctggatctgaagttaattgttcgactggaaggaaacctgtgcgctccccggagcatgacgccacgccgcctccttggcgctgcagagccaaagccactggcgtctgccgggatggaccttccctggaaggagagacctcagccccgcgtgggtaggacgcgcctgctgaacgccctctcagggccgacactggaaaacaccttcctctaaaggaacatccgagtcagaaaacaggtgctcgcagcaggcaccaaagcgcctttgcgaacgcttagggctgtttcaggaaaccgctcagtagcaaaggcagaagatgccaagacaccttcaaaaagcaggaattaactttccacagggagggcaccaccaaaaacaagggtgcggggctgtagggcgacaggctgcatcggttcacgctgaaaatccagctgctccggggccactcaggcagccgtgtggcctcacgggtccgggtttcagaggccaccgagtggcctgggacgatggatcgcgacacggaggtgcatggctccatcatggggaagaatgtgctttaaaataggtgcatggaggaagagcctaaaaaatagtccagagtagcaacaaaaaccatctcgaggcaatgtgaccacaggtggctttgatttccttcttgtgcctctagacagcattcaaatattccagcctgaacatgcattacctcagtacctgaacagggccggagtcgtgggccgtctcgggccagggcaggaaacacttctatgctgttcgggaggacggaggacagacagcgaggctctcaggtcaccggcaccagtggcaccacccacagggactgcagggaagggcgggcaggctcccgttcgttctcccagcacccagtttccagacgaagcctccctgggatcctggcttcccacggctctgcactgtccctttctcagaacttaacgtgggcatttcctgaggcctcttcctccggatgagctggtttcggcctgggatcccagcgtccccacaccctctggtgaccaccacatggcccagcagccacacagcacccggcacccacctgggcgtctgaggctggaggaagctctgccctttctttcgagtcatgggggtggggcggtgtgcatcactttgggcccatggatggtgggtgccatgcggccacgtcagagcagggcatggtggggtgtgggcagggagcagtgggaggtggccctgtgagagctggggaggtgtcccaaagtgccagcatcctgcagatcgaaggggacgcacacaccgtgccactgcgggaggtgtgagctccacgctgcaggctgtgtgagagaggggtgagccggcgcccccgagtgaagacacaaagaatcccgagggcctggtgaggccacaggcccgcacctcccacccccatggcctcgtggctctgtggggtgacaggaacccgacccacatgtagctcaatcctcccaaggtcagcttgtgaagaagggaaagaaaattatggaaacaggcgtctctgtaggggatgctccaagacgcatttggaggcaggaaaatgcctgaagtccctcaatgggcggatgtcacagtgctgggcgagccacggtgtgtactcggggcctcactttgggagctcagacgtgtcgctggccctgacgctcattggtctgaaggacaaatcgaaggccctctggtcacggaagctctgggctttgtacttggccaggtgcctggacctcccgcgacgctcgggctccgatgcctccatcctgtcctgcagggccctctcagccccagggtggtctggggacccctcctgggccggggcctggggagtcccgcagcccccagcctcaggcttgggctcagttgggctctttcccagccccaggggagaggtggcaatgctcttgcccctgagggggcggcttcctgggggtgggtacccggcgctgggctcccccaggccactgccccctgactgtccaccatccctgggggctgggcttctggaccccccactcctgccagcagcatccactccctcagctatgccactaatgggctgctcccaggcccgaggcgccatcccacttgtcaaggcctgttcccgaccctgttcccaagcccgttcctgagcccctttctgggtctgcctctgagtctctatctgggtctgctcccagccctgatcccgagcccgatcccgagcccattcctgagcccctttctgggcctgaccctgagcctctatgtgggtctgctcccgaccctgttcctgagcccgttcctgagcccctttctgggcctgttcccgagcccgttcctgagcccctttctgggcctgttcccgagcccgttcctgagcccctttctgggcctgttcccgagcccgctcctgagcccctttctgggcctgttcccgagcccgttcctgagcccctttctgggcctgttcccgagcccgttcctgagcccctttctgggcctgttcccgagcccgttcctgagcccccttctgggcctgaccctgagcctctatctgggtctgctcctgagcctgttcctgggcccgttcctgagcccctttctgggcctgaccctgaacccgttcctgagcccctttctgggtctgttcctgagcccatttctgggcctttatctgggtctgccactgggcctgtccctgagcctcttcctgggcccatttctgaacctctccttgaacctgtttctgggcctgtccctgaatctgcccctgagcccatttctgggcctgtccctgaacctgtccctgggccccaccctgagctggttcctgtgcctgcccctgggcctctatctgggtctgccactgggcctgttcttgagcgtgtccctgagcctgtccctgggcccaattctgaaactgtttctgggcctgtccctgactgtgtccctgggtcccaccctgagcctgttcctgtgcctgcccctgggcctctatctgggtctgccactgggcctgttcttgagcgtgtccctgaacctgtccccggtcccattcctgaacctgtttctgggcctgtccttgggctgccgggcttcccggcccctcgggctcccctggaggcacagctgggttcctggcagccctggtgccctctccccacgccgtgctccgcccccgctcctcccagggtccctgcagatgctgctgaccttggtcactgcgctggcaggcgcccccaaccccaatggccatccctttgtccccggccagatcctgtgcccaccatgtctgaggctcttttgctgggttcagcacaaccttcgagcccgacggcgccaccctcttccccgcatccccgggctggggggtctcctcctgtgcctggtgactctgttgcctccccaggtccgcctgtgtcaggggacgctcctgggattcacctgcctgcgtcctaggctcggggacactggcccggagctttgcctgtgtgtcaccagcagtagggggcaggtgtgcctgtagatggggagggccccgctggtgggtgccacctacccaccccatgtccacctccgcgggaggcactgcgggaagcagatggtcaggctccgccccacggggaaacctgacgccctccctgccctttgcctgtgggttctcaggaggcgacggcgggaggccagggccatagctgggggactctgccacgctccttgcctgtggcctaggatgatcagaagcaggaattccagactctgtgctgaaacccaaaaggtttccttccacagccacatcctttctgcctcctacagctgctgtatgtctgctggctgctgatgtgtttgaaatgtataatcgggccgcctctgggtgccgggcgagggccgcagcatcctccgggtggcgggcgagggtcgcaatgtcctctgggtgctggacgagggccacgcctctcaggaggctcctccctgctgctccactcttgggctccaaggatcccccaggggccaggaggccgtggctgtgagggtctcgagggagagcctctcctctggggtggctttcggacaaggctctgcttccccactggcccagcgtctctggctctcccgctgtgcggtctccagggctctgggtgctgcctggcgctggtgcaggcgtggcgcggctcgcaacgctccctgcagctgccatcgccccacaggctttcatacctggtttgggtggttcatttaatgaggacagtgggttctcgcgaacatcatggctggtgatttcctcggcagccttcaggggctgagaagactctattagcagcggccttctgcattcctccagcgcaccgggcactgtcatgcccatcggggtgacaccctcaggccccgtacgccccttggatgatgccgccagtgacgtgggggctcctgttgggtttctcccagtcggggacggcacttgctggctgctggaggcatggctggtgtttcccctcagaaggttttgtgaggctgcaggatcatttgttgcggagcccttcttctgcattgatatttcattagattccggcaacggatgcttcacatctctgagctcagaggtcctctctcctgaaatatcgtcaggattcctgggaccgtgtgaattctcaaagctgcctttgttttccttcccgccagcaggatctgtctggagtctctgtgtcagaagtgtctctgggacactgtggtcggcgcccacagcccctcttgctgctgccagacgcggagctgcccgtggcccctgcggcgaagaggcgctgagtcccgcctgcatccctgaaagcttgctcagttccactggggctcggtgaccccttctgttctcagtcacggtgggaaattctgtgtgggcattttcaaccacattctctcctccacaaatacaaggtttgttttcaccacttgacatattttgcagcctggtgggaggggctggcatttcatggacaactggaatttggacagttatccgtggaggctccgtggcaggctgtgttctccgagcagcctggaccgatggagcgttcaggggtgggatgtgctccggcaccttctgttctgggaaatacttctgggtggcaaagagggggtctctc

SEQ ID NO: 6252 - DNA, 6000 bp, Homo sapiens
cacatgaagtgacagtggtatcttttgttgccctggaaatggaatacaacaatggctttccaacttttctgtggcagagacctacagacagaagtacattttacactggatccaggacacacatcagtctgaaaacacacacatgaaccaaacgtttcctaaagcattacttatccttgctaatagcaacacattctcatattcttttatacttcatttaatttcatataaaaaagaaaaggaaaggaaagaaatctatttctcagcccattaataaggtcaggagcagcaacaccagactagaagaaaagcttacctatagatttttctgccacctcttgagtgcgtccagctttccgacaagtctcagtgccatctactgtgcgctctgggtattgcaattgctttttttttttttttttttttttttttagaatgagactaagtcagagaacacaaagaacttctttccccacagtggagatggctctgaaagcgtttaaggaatagcttagatgagtggctaacacattctcccggttctgaattctaagaccacagactccatgtccagtccccaaagagaggctttgcaagctacagaatacccctctgactgggacctcaggagctaaactgaccacgtaattggttctagaaagtgaaacgttttaatttgaaacatccaaatgagcattttgtgaaaagctactgccgtccatcaaatacaacacagccagggagtcatcgctctattgcccttgtcaatcctacatctatagttttttttgctacagcagttcatgagtgttgactctattctaacttgttccagaagcccttcaagatgatagatagcacaatatttttgtagccagagctagaatgtagagctctttttggcttccttgtgaatgatccagaatttccatgttggcaagccaccataatttacagaatttactttttatattcaatagaagtaaaaaaaatttacctatttaaggagttatagctctggattcatttctgaccaaaatgtgctttttgacacaaatacaattggaaatgtctttgtaatttatccacagtctgcctagataatcataaaagaactgcatggatatatttgtgagtaagagcacgtgtccattcagcaaaaccaaggagatcaactaattctaccattgccttgaaacggagacacatctagcagtttgaatttcccccaaaagattgtatgtgtgaaaataagaatagaatgaggaaaatttaaaagcctatataataatttcagtcacaacttggcaattagaattttatgagatgtctttaatttggaagcaaagaacaattaaattattgaaggctggaatttttttttaactctttgaatggaacaacagattttccccaaaagatttgactttaacaattttcagaaaacataagtcagggtgtggttcaattacacagagagaaattgtagtgaaatagtgttccctgtaataattacccacaaaggagcacagtggagccactcctgcattaaaattacagtatcatatgtaagttattattaattaaccagagatgccaggagcttgtcagtttccaactgctattttgaggagagctaaagtttctctttttttgccagttattattattattaatatttcaacagcaaggcaagaaaagggaatgtggtccattaactaatggctcttgaaaagacactcaatgaatccaacttgccctaaaactgccaagtggtaggacagtctcttcgcgtcttgcatcattttctgccatcacctacgtgtgattcgtgagtcggaaattcaaccaagacatgtttaatgtatatttagagcattcttcccggcgggaattcacggtgccattccatcaggcagttggcaagcagtcacttgaaatattaagaaatatgatttgtgtcacactgatttattgcaaaacagcaacttctttctttttggttcatttataaaacaactgtcaaattaaaatgccaaatagctttaaacattagcattttcaccttataaccttacaagtgcatcactttaaacatctgagtaaaagttcagctcgatgacaatcacctgggatttacctgcatggtactaagcatatatgtaaaaatattactgatgggtatctctggcactctgaagtgacaaagtgtagccttcacagatctttgtcagttaatcatcaatagttacctgaaaagtgcccacttgccatcattcaagatcaaccaggcagacaccacagtgagttttccatcaaaaaaccttctctatctggtcagtctctgcacgtcaatgagacaaaggtgtatgctgcacgcagcagtactatcctaagctccctgtgtcctcaccatggggctgggtggctggggtggaggaacacaggattgggcttcagcttctctagggactggtacattaagagatgaagacataaaaggtgagaaaaacatggtttatttccaatgtttccatttctgttaaaagtaatgctttcaacagaaaaaaaatgcagcaatataagtgtgtaatttacaaaataatttcaggatttctttaatcattaatttgtggtgtcatctgttaactggatttacgtctaagctcatttgtaaataacttcaaatatccaagccttccctcacccttttcccacctcacctctcctccttctcctcccctacactggaggacactatgtacatgcatataatgtcctgccctagaggagtcctgagcctacttgggaagaaaacaccaactcacaggaaaacagcagaaatcacacaaaacagaataaaagcaagcgctgatctgtaagtgaagacttaagtgctataggacttccagctacaaatcctgaaaacacggagtggctgtgataatacgactagccaacatcacacagtaattttgcacataaggagaactaaatcaaagaaaacaaggaaaagaaagttgagcctataatcgtgatacaggcactaaaatctcaggtgacatttttcaatgggggaaagtcagtcaacttccgatctccaaaccatctttactagcgagcttcccacaatggttctagaaccttccttcattccaacccaaccaggattccaacagactcataaacaccacagcctttgagaaattaaagggagaacccaccaaccggcgccccactccccaccccaagtcacctctggctcaaccaagatgcgctcaggccaagaaagctgccccaccccacaggctttgcctgtcatttttaacaagccgactcagcacatctctcagatgggccatgcaaggcttttcgcagctcctggggctttgcctcttcatgagcagacactccctcttagactaagacctggagctggaaagtaggtggtaaccgcggtacaaaactcacgctcgtccctgcagaaactgcctaggtcggcccatggccacggggcgccaatttttcaaggaaaagtcaatgctaataatggtggcaatcacgggaaatccattctgaggccagatctgacttgtcaggattaatcatcatttccacttaacttcgaactgacctgggtaaaaacgtgagcgcgaggggaccaggctgcacctctgacctggctcccctctgcaaaaatcgcgaagtgggtgcccgaggtggggcgggggttgggggagacctccccgggagtccccacccagcctgctctgcacatcttagtccctcatccgcttgcgctgtgcaaatctgtcttctgtcatttgtatcgcaagacatcaaaatccccaaccaaatgcaaatactgagacctcataatctgagacaaagtttcacggtatccagaaagcccccagcaggtgtgcagtgcagagccagccccccagcggtcttccgcagaatcctatcagtttccccctttcgtgctgtgtgcatcgagcaggaaggggcttggcaggttttacctgccctctttcctttctgaaaagtctgggcctcctcaccccgaaaggagtcacctccttgcagttccccagttgcgaaaagaggaggaagttggctgggccgggggccgcggggggcaccctccgcagatggcgggacccccctgccggccatggcaaaaacgaggcttgtctctcccaccgcccccaaccttagtccttggcacattgttgaaagtaattgaataaaatcggaaattcgagaaggcgttcgttcggattggtgagattttgaggggagaaagaagcggggacttcgccggcaccagcggcgccccctcctcggccaccgttaacccccattccagagggcactgccccgccacccagcctaggtccccctgcgagagcctcgcgggcccgcgcagcctccgcgactcgaacagatcttcagtccttggaggaatgcctgtttctctaacaataaaaaattaaagaagcgctcataaatgccaagtcctctcgcactatgcggagtacagaggacaacgaccacagccatccctgaaccccgcccacggcacagcgccggagccggggtctggggcgccgcttcctggggggtcccgactctcagccgcccccgcttcacccgggccgccaaggggctgggggaggcggcgctcggggtaaccgggggagactcagggcgctgggggcacttggggaactcatgggggctcaaaggaactaggagatcgggacctcgaaggggacttggggggttcggggctttcgggggcggtcgggggttcgcggacccgggaagctctgaggacccagaggccgggcgcgctccgcccgcggcgccgccccctccgtaactttcccagtctccgagggaagaggcggggtgtggggtgcggttaaaaggcgccacggcgggagacaggtgttgcggccccgcagcgcccgcgcgctcctctccccgactcggagcccctcggcggcgcccggcccaggacccgcctaggagcgcaggagccccagcgcagagaccccaacgccgagacccccgccccggccccgccgcgcttcctcccgacgcaggtgagcccgccggccccggactgcccggccaggaacctggcgcggggagggaccgcgagacccagagcggttgcccggccgcgtgggtctcggggaaccggggggctggaccaacacacgtccttgggccggggggcgggggccgccttctggagcgggcgtttctgcggccgagctccggagctggaatggggcggccggggaagtggacgcgatggcaccgcccggggtgcgagtggggccgggcgcgcgcgggaggggaaaaaggcgcgggcgagccgccagcgcgaggtttgtggtgtcgccgatgtcccttcggggtactctagcgcagccgcctggctacttgacccactgccaccaaacgttttaaattcaccgaaagcttagcttcgaagcaaagctccgtttcgccggtgaagcaggaagccttcgctgcaggaactgacctttacctcttggagcggcttctgcagaaaaatccccgggcagagatttgggcggagtttgcctagaactaacgcggagccagccgatcccggcctaccccggggccaagatttcagtggcttccctttttcctaaacacttcacgagggtctgtttccgggctgtgctccccgcctagaaggaaaatttttaggacccttgttcgcgaagaggtggtgtgcggctgagacccgcgtcctcaggacggttccatcagtgcctcgatcctgccccactggaggaggaaggcagcccgaacagcgctcacctaactaacagctgctgagagctgggttccgtggccatgcacctgggactgccttgagaagcgtggtacggccgtgtccccatgtgaccttagagtccctttcgaaactgctgtgcacagtcggtcaca

SEQ ID NO: 6253 - DNA, 6000 bp, Homo sapiens
aagtgtaatctccaatgttggaggcgaggcctagtgggaggtgtttgaatcatgggggtggatccctaatgaatggcttagtgccatccccttggtgaccaatgagttcacttgcgatctggttatttaaaagtatagggcacctccctgctttttctcttgctcgcactctcaccatgtgagacatttgctctcccttgtccttccaacgtgattggaaacttgctgaggccctcaccagaagcagatgctagcaccatgtttcttgcactgtctgcagaaccatgagtgaattaaatttcttttcttttctttttttgagaccggtctcactgtgttgctcaggctggagcacagtggcaagatcatagctcactgcagcctccatcacccaggctcaagtgatcctcctgcctcagcctcctgagtaacagggactacaggcacacaccatcacacccagctaatttttttttttttttttttttttagtagagatgaggtctcactatattgcccaggatggtcttaaactcctgagctcaagcaatcctcctgcctcagcctcccaaagtgctgggattacaggcgtgagccaccacaccggcctgtcttttctttataaattacccagcctcgggtatttatttgtggcaatgcaaaaacagcctaacacatgcatgttgggttctagatgtagctggaaccagttacccctttcttcctgcctctctctcccttttggaatgaaaatatctctcctatgcctgccccaccattgtcttttgggagtagatagcctgttttgatttcacaggttcacagctggaaaggagtctgcctcaggccagctatgcctgccttggagtcttagctttatctgatttagatgggactctggatttgaacttttcagttggtgctggaagagttaagcctttggggactattgggatggaatgaatgtatttcacatgtgagaaaggcatgaatttggggggctaagacagaatgctatggtttgaatgtgtcccctaaagtccatgtgttggaaacttaatccccaatgaaacagtgttgaaagatgggagggacttttaagaggtgaggaggtatgatggctttgccctcatgaatggattaatgctgtgatctctagagtgggttagttatcttgagagtgggttcctgaaaaaacaatgagtttgaaccccttcctctctctccacccccacctctctctcttttctttccctatcttctcattcttttgcccctccacctctgccatgggaagacacagcaagaaaaccctcgccagatgcgagcatcttgatatcagacttcccagcctctagaattctgaaaaataaatttcttttctttatcagttacccagtctatggtattctgttatagcaacacaaatggactaagacaactaattttcagttttcaaatgcgcatcccatcaagtccttaagttttatacagtccacatttaatttctgctgcaacaagactgtctgatgagtagcaaaaactgaaggacagtgttcaatgttaaggccatgcagactaatatagataacctgaacagaaaaagagatattttacacagtgatgagatggtttcatttttgcacacatgagcaaatgcaacacattctctgtgacaactttggtttgaaagttctatcctgcaccagtcctagaacaatttccactggtccaggatgtcaatgctcagacacagtactgcatggaatcaggtgcaggattgagaacagggcatgctttagaaaaagcaaaagctatttccaggactatctgctatgctggttcagctttgccaagcaatattcaaatactcatggagcagcacatactatgagcaaagtacttagtattgtagaaatgcaaaagaagaagaagaggaagaaaagcttaaactgtttataatccccaaagaagtttacaatctgcttagaaaaattattttactatgcaaacagctgagcctggctgaagcatctgtttgggagaggaatggagagaagactgggaagtccacagttagattgtgtggggcaggacagagcacccaagatttaccgcatagggcacatctgggcagtgtgaggatgtctaacaaaaaagcctagagatgctcggcgcggtggctcacgcctgtaatcccagcactttgggaggctgaggcaggtggatcacctgaggtcaggagctccagaccagcctggccaacatggtgaaacccagctctactaaaaatacaaaacctagccaggcatggtggtgcgggcctgtaatcccagcgactcgggaagctgaggcaggagaatcacttgaacccgggaggcagaggttgcaatgagctgagatcacaccaccacactccagcctgggcaacagagccagacttagtcaaaataaataaataaataaataaataaataaataaataaataaatttaaaaagcctagagatttctgtgtctctccactctccaagttcaaggccatttcaggggcctccccaaagtttttaaaacttgacttgggcaaattctttaagaaccttgttctcctcaaataaaatattttggaaagcggatttttatgaagtcttggctcaaattccatgacctttaacagacatcttaattgtttcgtgggagaatatgacccaacaagtggcatatggtttaggtggggacgtttaattaccgaacagttttgtagaataagcaagtcacacatcttttgtccgatgcgtgacaggtttgaacctgtaaagccaggtgcctaaatagcttccaacgtttccaccccaccagcccttgcaccactccctgtactggccctgagctttctagtcttgactgaaaagcggggaggcaatgtggtctctcctggtgcactgtcccgaggaaggcctgctccgcttccccggaggagtcttcaaaggatggaggtaattaataaaaacaacccctgtacctcctctaagtggtcattaattaataaagaacctccaggctcctataggagaggtctgtgcaccccgcgggctatgagaaggctggatcacccagaaagactgaggatgtgtcctggcaaaaacacagcctgcccctcacactgctccccacgggtgcactagggaggaagagttccctcgagggcctgagcaggcgccccacacctgcacccgtgcagagggggctgggcccgccctctgcgctcccgagggagagccctaccccctgcatccccggtaccccgttccctccaagggccggaaagagggccccgcgcactgtgcacttcttaggggtcccccaccctgcgcccccgccacgggaaaaaggtccccgctctgcgcatccggccccggagggacagccccggtcctgcactccttgctcctcagggggacggtccgcgcccagcggctagtgcgccccgggtaggtgggggcggggggctcgtcgagtgacagcgctcgcctcccgcagcccgcccgagccgcgtcagggcagaggcggggtggggcgcggttaaaaggcgcagcaggtgggagccggggccttcacccgaaacccgacgagagcccgacagccggcggcgcccgagcccgacctgcctgcccagccggagcgaagggcgccgccccgcgcagagcccgcgccagggccgccggccgcagagcaggtaagcgggcgcggaccggctgggtcttgcggggggcgagcgggcggtgccacctcggccccccagcggaggaatttcctccaagaaaacaaaacaggtgaggtcggcggctggtccccacctcgcccctgtcgctcctgtctggcaccggatcagagccggcagagcgcggccgggatgggtgtctggccgcacgtggggcgaccgggcccccgatctgcctctatccgcaccctcctgtccacgcgccccggccccggcccgatggcagtgggcgccgcccgcgctggaccctctctctgtacgcagaggaacgaggatggactggtttgacttttaccccagcgtggtcccctttgacttgtacaacaggttttatgaaggtttcatatcgtgtgtctaagaggccagagtgagggccggtgcccctttcccccgtttcatttgctgcgtgttggattttctaagcttttgtgggtcaccggggtgtccccttggatttggggagaagaaagccaggtctaggatgcgggtttcagttcagacaaaccctcaacttgggccgatgcataagtccccggagaaccgcagggtatgggctgcgtgatgggcttccgagaaacttgtgaaatgctgatgacaatagcgtggacgacagtaattaaaagtaattggcgacacatcttagttaaaacgtgcaggcaccagaaggcacttcctgtcggtgaagaagacctgtctccggtgtcacgggcatcctgtgttttgcaaacggggctgacctcccttcctggggagcaggaagggtcagggtgagtgtggcctgcccgcagctctgcactcccggaggggttagggacctgcaaccaggcggggacactggcccagcgacctcagtgtcccctgggtgggcgtgcactctgtttagtgtctgattgaacgtaaccgtgccgggttgttcttttccctcaagtagactttatgccatacagctattttcttgccccagttctagcagaatctaaccagtgttctagaagaaaatgtcctgcccccatgcagtctccttagaattgcagggtgctgctcagaactgctcctgtggagagctttgtctgttgtttggatccagcagcgtctttgggggtgttgcttgaagcttgccaaggaggagaggggggttctgaagagagaacaccagggctctagcctgtcacataactgggggtgtggagagcgcctcattgccactgcagtgactaaagctgggaagacgctggtcagttcacctgccccactggttgttttttaaacaaattctgatacaggtaatgatgactttatgctttttttcttatgtcttctcttctgaattctgagtgttaggaaggaaaagaagtacagaagatctggctaaacaatttctgtatggcgaaagaaaaattctaacttgtacgccctcttcatgcatctttaattcaatttgaatattccaggtgctgtgagcagtttgcatatattagtttaaatgttaaatgggataaaattgtgggaaagtgatttctgacccaagcttcttggtctgtgagggcataaccttctaatggccacctgccataggttatgatttctgttttagttgcttagtgcatgagcatagacctggaaccccagagggcctgctccatttttattcccagggtcatttaaatctagttgagcttaaatgtttggaaaggacacaggtttgcttgaatgaacaaacatatattgctaacaagacccagagaaggaaagtttaacttaatggaaattaatttttaactctttgaattcttaaatgatgtaagaaacatacgtaattgcatgagttttccatttttacatctagactccacagacagaaacgtttcatttttattgagttaattttgaaatatatgaatccctgacccattgttatcactagctgttactctatcaggacagttgctgaagttttttgtcactaaatttaaaaatcaactatcaggttgtcccttggatgacctgagatttctagagacaaaagaaatctattcttcctgattgaagaaagagtctgagattttttttaaaccactgatttggggatcagggtgtagccagtgtctcaaactctcccctgtccctttttgttttgctcaaggagtgggcttgaggcctcagattgggtgttactgttattttgatagggaaaggatcctactaaagagcacctttgat

SEQ ID NO: 6254 - DNA, 6000 bp, Homo sapiens
aatctacctgttcttttcccatttttgtctattattttgtttccaaattttgtgcaattttcaaatggaagatattccttcatttacttctttgtacaagcatgctgaatactgtttttaaaagtcttcatcagactgcttcatataattaattttattttgagtgaactctagttctgattgttgatttttatttgcatcctttttcagtattagatctcttcatgtgttttaaaattgtggtttaattttgaactagtgaattgtttgtattttcttcttcactctttccacatttatatgtacatggtttccataaaccccgtctaatcgtttcatagctgcctctacttgccctcattcttccccagctctcagtccagaactagaatttaaaatggtattttcaggttcctggatggtggttataatggggaaaccacagatctagtccccaggctagttggcagcttggtttacttccaggttggggagctgcatggtgtcctccagtctccatgaaaagccattatcctagagatcaatcagcacaattctcttttgttagagaatggaaagggatagaggttggggatgagggtttgaggctgactttgtcttttgttttctatctaccattgctatgttttggagtacagtgggtacatcaaagctggcctgaagtcctaagtagcttccttgtttttttttggagagagtcttgctctgttgcccaggttggagtgcaatggcgtgatcccagctcactgcaacttccacctcccaggctcaagcaattctcctgcctcagcctacggagcagctgggattacaggcgccccgccaccatgcccagctaattttttttttttttttttgtatttttagtagagatggggttttaccatgttggacaggctggtctcaaattcctgacctggtgatctgcccactgtggcctcccaaagtgctgggcccacaggcgtgagccatcgcacccagccctaagtagctttcttattaccttctccactgccacaaatcaaggtcaggctagcatcatctcttgctctacgactgcaacggcctcccaactggtttccttgcctctagactttcctccctccaatctgttcttcttaccacagccagagtgattgttataaaatgtaattctgctcacgtcactacactgcctaaagtctttaaatgattccctgttgtcaaaaccagtagcaaagatggagtgaaatcacaagcccaacatggaaatggaaggaaggggtttaagatactggcttctattgctcacaagcaaagaacattaattcatgtctgtaaccatttacgacagaaagagtccaaaataataaaaatattgcctcctcaaaaatgtgtctgtcctcattgtacaaggacatagatcagaaatattctctagatcccacataaatcaccttagaatatgtggcagtcatttagaaatcagaaactggtcgggcacggtggctcacaaaaaatacaaaaaattagctgggcgtggttgtgtgtgcctgtaatcccagctactggggaggctgaggcaggagaatcgcttgaaccagggagtcggaggttgcagggagctgagattgcaccactgcactccagcctggcaacacagcaagactctgtctcaaaaaaaaaaaaaagaaaaagaaaaaaaagaaatcacaagctaatgtaatctggttggcaacgccagaagttaggaggagtaactggataacaatagaaaactttaaatatttgttcaacaatttcttactaaatatttcctactgcaagtcactgtggatgtgcaagaaatactttctaccttctagaaccttacaaggtagtaggcaagatcacatatttcaatgagtatcaaaactattggctgagcgaggtggcttaggcctgtaatcccagcactttggaaggccgaggcaggcaaatcacttgactccaaaagtttgagaccagcctggccaacatggggaaaccccatctctagcaaaaatacaaaatgcaggcctcacgtggtggtgcacgcctgtaatcccagctactcgggaggctgaggcatgagaatcacttgaagctgggaggtggaggttgcagtgagccaagatcacgtgaccgcactccaacctgggtgacagagcaagactctactgaaaaaaaaaaaaaaaagaatgtggccttatttggaagtgggcctgttgtagatgtaattagttaagatgaggccatactagagtagggtaggcccttaacccaatataaggggagagacaggaaaggagaatgccacctgaggatagcggtagatattggggtgatgccactgccactgcaggtcaagggatgccatggactaatggtcaccaccaaaggctaggaagaagcaaagaagaattctcccctacaagtttcagagggcacatggctgtgttaggtcattcttgcactgatataaaggaatacctgagactgggtaatttataaagaaaagtggattaattggcccacagctctccaggctgtacagaaagtatggggtcagcatatgcttctggtgaggcctcaagaagcttccaatcatcagttggagacaacattggagacaacagcaacaggaaggtccctctcaccttcctctcgctcttctcccctgaagcaggccatagcactagcaaaagcgtctcaggccttcccctgaaggcagacctaagactgttattcaagaggtgccctccctctacccagacaaaggaacatccttatctctgaagacacaggaccacagagatagacttctgccttctcggcagaaggcaaaggggagccagcatgtcacatggcaagagagggggcaagagagagagtgggggaaggatcaggctcttttaaataaccagatctcatgtgaactactagagaaagaacccctcatccaaggggatggcactaaaccattcatgagggatccaccctaatgatccaatacctcccaccaggtcccacctccaacactgggatcacatttcaacatgggatttggaggggacaaacatccaaaccatatccaatatccttgccaacactttgatttgggacacctaccctcctaaactgtgagacaaccaatttctattattccccagttttgtggtactttgttatagtcaccctaggaaacgaatgtgacagttttatagttaggttataaacaaaatgtcgtgaaagatcatttctagcagccctggagcttgtaaaggacatggctttgtgctgagctctagcagcatggttttggtacgtagagatgacatagaggagaaacggctttatgttcttccatgtccatccgaattctatgttgaggtctaaccctcctaagcagcctctctggaaaactagttgaacttgaacctaaacctactgtcaactaggccactaactaatatgacttttaaggcacaaaatcagggagaacagaatcttttatacatgctttattactcaagcagcagtgtgcagtgattaaatacttactcgcttttactacatttctctgacacagcaaagggtgacgtcttcttcatggagactttagtgagcagtagctaatttaaagctcagtgtaggccggtcgtggtggctcacacctgtaatctcagcacttctttgggaggtggaggcggagaggggttgggattccttgagccttggagttcagggccagcatggcaacagggcgaaacctagtttttacagaaaatacaaacatcagctgggcatggtggcgggcctgtagtccctgctactctgcaggctgaagcaggaggagtgctttagcagggaggtcgaggcttaaatgagcccaggtcgtgccactgcactccagcttgggcgacagagcgagaagaccctgtttcaaaaaacaaacacaaaaattcattctaaccaaaactgaatgctagtagcaggaactggtatgaagattgcggtctggaatcccttctaatgcgtctgaccttgcattgtgaagtcttcacagtgatgcttctgggttctatatgattatcgtcattgcttagcaacctctagttgtaaataaattctttaaatttccttagtcgtttgcggggcaaggagagggtcatttacatgccctttccttctcgctactcaatcttaaatttgggttacgaatcaaactgatggaccctacatggcttctacccgaaattacaggtatctaccgttccatcttcaagaaagggaggggttccgccaagatggacgaacataaaaatcacaggaggagccttctaacaatgtgcattcttcgcacactgagtggggaatggccttgtcatgtttgaaacagtgccccaactactcaatgtcccaggaaccccagtggagcgagttctgtacacagagagggccaagatccacaaatcagctaaggaatcatttccatagtctccctcccctattgagtctcgatccacaaaagctatcccctgtccctctcatccatcaagggcgtgtttttcgcctctccttccccggcctcccgcgtccgcccagcctgtccgcatccagccccgccacgccccatgggcggtcccgagctgcggccccgccccctcaccgcctccccggccgcggaaaccccgccccaacgacgcggagaccgggggcggcccgcggcccgcggcgggcgggctggcggggacggacgcggggggaggggggcgacgggatgtggggtgggggcggggcctggctgggcgccgggacgggaggagtcccggcggcgcctcggacttttgctcccacaagtcctgcctcggaggcgggggagctggaccagcagccgcctggagcgtccgagtcaccgtcgccggggctcccgcgctccccagaacggtgggacgcggggctcggcagccgccagcggaacatggcgccctggacgctgtggcgctgctgccagcgcgtcgtgggctgggtgccggtgctcttcatcaccttcgtggtcgtctggtcctactacgcgtacgtggtggagctctgcgtgtgtgagtaccgtccccggggactgcggcggggcgcgggccgcggctagggcgcgagataggcctctgcgccccacacccgccgcctttctggagccagcgccggacgccgggcgtccggccccgaacgcgctcggaagcgccgaggttgctgcacccgccgctttgttcaatcctgcggcgcggccttggggcgacctggggctcctgaagccttgcggcggcttcccgggtgcaggtctggcccagggaggccccaagagcttcctggttcccgccgacaccgggggtctgcatccttctgggaaggaacgtgcagaacgggagtagtcgagcttcttagaaggtttaggttgtgtttgtggcttttttggcttttgttcattttttttaaaaaaccaaatctgttccttctggattgtttttgttcaaactgcgcgagaagaaacgcctgttacctgtagagccggctgtggcgggttgggggaagggaggtgtgtcttttggtggcctcgggctggaggcgggtcagacctggaggacgagtaagctcccacttttgatttttggtggtactcgactcattgtaaaattcgtttatttctactctgaatccagccggcttttgcagaaggttaagacagaaagaatgggtgggaggagacataacctgattatttttttcttggctgattattaaggaggcttatatttcttatactcatattttggcgtgttaattttcgttacttccattttcctgataagttcttagcacaaaattctcatctgattccctggaaaaaaggagtagcattgcagtatacttcaaggatttaacctactggcttgaattggttgcctttaagattgaaggaaattg

SEQ ID NO: 6255 - DNA, 6000 bp, Homo sapiens
tatggttattctatgtctgactttttgaggaactgtcaagctgttttgcacagtggctgaaccattctacattcccatcaatgacagcattcaagggatctgatttccccacaaccttaccaacattatttcccattatcattatcattactattattgtcaacctagtgaaagtcaagtggtatcttgtgcttttgatttgcatttctctaacgtctaatgatgttgaaggtgttttcatgtgcttgttggccttttgtagatcttatttggagaaatgtttattcaagccagttttttggttgggttgtctttttgttctgggttgtaagagttctcttatattctggatattagactcttttcgtatatatgatttgcaagtcttcgcacattttgcttttgtttatgccattcttttagataggaaggcattagtgaaataagccctccgtgaaactccatatctccaaaatggaaatatatccatagtaaacatcaaaatcaaaattaaagggggttcagtaaaacaatggagtaaggaggggggatgagagagaactatgtcaatagtttataatgacaaatgagaagaaatataattgaaaatatggaaattacttttctggaagtcagtatgtcaattacaataaaaataaggagggtgaaaaattaaaacttttaaagcaagaacaattttttttcataaatttatgaacatttttgaacataagtttaggtaaacagaagacaaaattaaaataaatgtaaattaatatatttgtttgggttttcacaaaaacactctaacttaaaagaacttttggtaaaccaaatgccaattttcagtactatttctatttatgagagaagaggagaaaaaaaaatgaatgaacccagtgaaagccattctccctaaacagactgctgatggatgtgcagatggtaagaaccttctgctcttgctgaaacttgcagaaaaacactgtagatcttgcagcttttagaactgccagccaaatgaaatattattacctccatctgatttgtatcaactccagttagtaaagttgtaagtaatcatttctttagttatatgacttgctatttgtactagtgaagatatgtcagaagtttgcttttaaatcaattggattttattcatatatatatttatatatatatgcacaggcacatactgaaaggcaaaataacttgaaaatatactttttcagttagtgactatagaattcaacttttttaaaaagagggctgcactctttcatatgtttttcaatatattttggcagactgcctaacatttcattttgattatcataaattatgattactactacctatatgttgtaattactagttatagcttctcagaagaaacgagtgaaatagttttggttgtctgttaagaccaatgagggaatttctttttatttcctatggaaggaacaagcctattttaatatctcccagtggcacctcccatgcagaacctcactaaatacttggcaagttattttataaaatttcagttcaacattccagatacacaaagaaacgataatacaagagagacaaagtgacataaaggacctttcagcattgaagacagtcaaccactacgtaaagtaactatgaaagggcctctccttaacttttaaggaagaaaagaaacacagtaattaaaaaaaaaaaaaaagacgaatttgctcagagcgccatacttctaagttcaccaattatagattaaattgtagactatttggcaaaaacattgtgttttaaaggtggcactatccagtcaccaaatcaattccaatatgaaatgttaaacaattttttttcttcataaataaactctgacaaattgtggatgttttggtgagtaggataagtggatcctggaaggaggttataggcataggtactgtctgaaataatacaattctaaatagaacaataagtacaattctctcgcattaattgtttttccaaatggcaaaattgaaagtattcaccctctgaacactacccaaatcaactcgtgctgccataggagcatctcatgatctgtacaggactcccagttaatcaatcctgggctttctgtagtggcggctgtggtgatcagcagtgcggtgagtggggtttggagtcaggaagaattgggtgcagtccaggcaaaccgacgctctctatctttagggattgagcaagtatcctcaccagtaaaatgaggatagtaatactgtcttatttatagggctgatgtgaggattaaatgaaaccatgcacatgaaattcttagcgtggtgcctagcccatagtaagctctcaataaatgttggctaatggtgtcttctaagaaaatgactcattctgaaaaactcaatcttcccttggcttcttctggtctctttttaagtgttactcctttgatgatttttctgacctccttccccaccctaacctagattatgtgcttaaattgatgctgttctcattgtgggtaagagctttgatcatacttgcattctctttgcttattcagttctttgtctttttgtctgatttctgtattttaccctggagactttaggccctatttgaaggaaatggccatgctgtctggcttcttgatgagtcccagtacccagcacagagcacagtacactgtaagtgcatggcgtgtatttcttgaatgaatgatttcttgacattgaaattttttttagcttactagcttaagacatttggtgaatagtgcatttaaagtatataattttgtgtagcttaaaacgatacacaaccaaaaaactgcaagaaaacaaagtgcaatgcttggagagaggtttagtgaaaagaataaggtgtgtgttggggagcagggacatagggtagggttttttttcttggatttgacattgttggggcaagtggaagaataatcaacaatgtctgaatcttcacattaaccaggcatacacaagcatccaatggctgcttgaacctgagtgtctttgctgtgaataaaactgcctgtgttctgaagtcatggacttgaaagggaccttagtgatcgtcacatcctatgctccactttatagatgaagaaactgagaccagaaaaacgcagtgattccctgctagtagggctgggtctagaattcaggtctgctgactcccagacggtgtgggaaggggcattcgttcctttaaaaataagcactgctgctttaataacatcagcacctgttgttccagcttctgcaagagagaagctattaatttctccttcatcaaagctgaatttctggtctgtctgaaccttgttttcttcctgactgcagctgtctaaaccactaaggccacatgttggacggaggcactttcctgctggaatccgataaatcaccacacccaaatatagaaagaaaaagggacacagatcatccacaccgtggccgaatgtgtgacatctttgctgaactctctccgttccaccttgtggtggaggcctccagtccaccaaacacagccctaggcgtgtgaaccctgccacaaacatcggtgctcttcctgcacagggcctgggaccaaccgtggccaggacatcagctgctggaagccgagagagttcatctgagtggcgattttatgatctgcagagtggaaagtaatcataatcccttgagaagtttgcagaatcgaaccgaatgttgaatgccaaagatcttcacaaagcaagttgagtttcttccgttattattgttatttgtgttagcgaggcctggattgcttaggttgggtttcctcccgcgcctattccagcaggcagaccccgcccttggccacacctttctccttgcccggggtaggaaagtgaggggctgcccggcgcccgcgggcgtccctgaggtcgggggtgggggggagccgcgcagcgcgcatgcgcgccggggagccgccggcctctataagagcgcggctcagcgcggcagcgagcggagtcggagctggtctggcgccgggcggggcgaggcgaggctgtgggcggctgctgcgctcggcttctcccgtagcccggaggaaagaaacttccgtgggaggcttccatcggtgcgcacacctcccgagggcgaggcagcgaccgggagagggagagccggccggaggctgccgggctcctgtgggaccgcgctgcagccggggaggcggagaaggggaaccggggcgagccgcccgcctggatccgcgcccagcagcagccgcggccgccgccagctgggcaggctcccgggactgcggctgggggcgcgcaggaccctcgcctgcgtcctggacgttcccggggtcaggagcgctccctcggcgacgtgctgggaagattggccgtcggccccgccgagtggagcgtcggggctgcacccccgtgggctgcccgggcggcccggccggagccatgcggaccaagttcggggcagaggaggctgagcgcggccggctgcgtcacttgctgcccagagccttgcgtgcactgcccgccttcgccccttctacccgcccgaggagggaataaaggaggggagacgggccctgattcgcgcgcgggaccctgaggcttaaaccctgcgcagagccctggctccaggtccgcggcggcgcgcccagcggtcattcggctcgagtgagcatcccttcggggatgctcagggagggtccggttgccagtgaaacctccagaggcttccggacgacagccccgggggccttctgactgcatcccgagatttccatcagcgagtgcaactcataaggcagtccctaaggggaccgggccaccggctgaggacggggatggcttaggagctcctggacctagggcccggcgtcgtcgcctcctgggcgtcgcggcagaggggagtggcccgcgcggaaagcgccgcgggacagtcagtgacgaggcccgggggtcgccggggccacgacttctcggagaccgtcctgcgctctctggagacgcgctgtccgcgcccagggtggtgccatgtggggcgctcgccgctcgtccgtctcctcatcctggaacgccgcttcgctcctgcagctgctgctggctgcgctgctggcggcgggggcgagggccagcggcgagtactgccacggctggctggacgcgcagggcgtctggcgcatcggcttccagtgtcccgagcgcttcgacggcggcgacgccaccatctgctgcggcagctgcgcgttgcgctactgctgctccagcgccgaggcgcgcctggaccagggcggctgcgacaatgaccgccagcagggcgctggcgagcctggccgggcggacaaagacggccccgacggctcggcaggtagggcggcctgcgcccagcgcgaaagggaggacggttggcgttgcctggacgtcagggacctgggagtttgaaggggggaaattcaggaaagggcctaggaccaggaggcggagtctgccttctggcttattatttggtcggtgtgggtccctaattcaccctcacgggcctcagtttctccatctgtcagccaaagggtggcttagagttaattttccgaacaaaatcacactcctaaggcagtgtgggccacagacagcccccatattccttctgaccagggtcctccgggcccctctggcgtctcctgtctccatagggcttcatgtcttaggggtacccaaggagacggcgagggtgcgcccccacccgtgagggcctggcagcggtgctcccctgaaggctccccgaaaggaaggcagctcctcagggctttcccggggctgctgccccgtgccagacgccgcggattcccatcttctccacgcggcggcccctctcccctgcagcggcccgcctgtggggcttctggactgttttccttaccacgtcagacttagtaggtgtaacatcggagcagtgcccagccttgctcttt

SEQ ID NO: 6256 - DNA, 6000 bp, Homo sapiens
cttttagtagagacggggtttcaccatgttggccaggctggtctcaaactcctgacctgtgatccgcccgcctcggcctcccaaaatactgtgattacaggcatgagccaccgcacccggcctttaattttcttttgttgtgaaatacatcatattcacagcagtgtgtaaaaataattacatagtttaaagaataacaataaaatgaacatccagcacccaccacagaggttaaaaaaaaatagggtgtggttggacatggtggtccacacctgtagtcccagctacccagaggcttgagcccaggagttcaaggctgcagtgagctatggtcgtgcctgtgaatagccattacactccagcttgggcagtgtagcaagaccctatcgcaaaacaacaatagggtatgttagcacctcagaaatccccagtttgtcttctctaattaaacctcctcttcccaccccataccagacgtaaccacaatcctgacttttgtggtaattattcctttactttccttatacccctatgaatgtattcctaaggagaatattgtttgcttccgcctttatgtctattattccatgacttgcttttccccctcaacattatgtttttgagattcattcatggtgtgtcaggtaactgtagctcattcatttacactgttatttaatatataggtattttattatgactgtactgcaatttatccttttgttggtgggcatttagattgttcccaattttttgatattataaacaataatgctatgaacattcttatacttgtctcttggcacatatgtgtttctttgaggtttatatctgggggtgaaactgctggctggaggatatgttcaactttagtaagatatgccaaattatttttcaaagtgctcacacccattgggatgtccaccaacagtgtgtgggtgttctccattgctctgaattcttgtcaacactttgtattgtcagattttgccaattggtgagttcaaagcccctattaataaaagatgtgtaaaattatactataaagttgatatctcaactgaactcacatgaaccctattcaaatattccttttgtttgtccctgattttcaggaaaacataaggctttgtaagttaaaaatgacatgaaagtatttcacctgtgagctgctacgaaactatgtcacaatttttggagagagagaggaaagggagaggagatatttgtgtgacttaaggggtggaaacatggtatcaagatgctggtaagatagatgaccacttactcatggctaagcatcatggtgctaagaatctagataaaatacatcctttcgtagagttagcactagacactccattcaacccagaaacaaacttactcttctcttttccgatttcccgtttcagctcatttcttctagttgcttttgaccctttaagagtttctttattacagaattcctatcatgaactctgacaccaaaatttcatacttgggcatgcatacctgggcgtgtaatccaggactctagacaatttcaggctactttccttaagtgttgctgtgaggaagaaattagttctcatattagatatgactcttggcacatcacagaaaaacatgggcattacttcaccttctgttagcctatacctcatactccaaaatatttcagtctataagatttgctccttctagaattattttttccaccaatttccacggaaaatcaagtgttcctagaaaccattcctggctggccgcggtgactcacacctgtaatcccagcactttgggagtccaaggagggtggatcacgaggtcaggagtttgagaccagcctggccaagatggtgaaacccttctctactaaaaatacaaaattagctgggcgcagtggcgggtgcctgtaatcccagctactcaggtggctgaggctggagaatcgcttgaacccgggaggcggaggttgtagtgagcctagatcgtgccactgcactctagcctgggcgacagagcaagactctgtctcaaaaaaagaaaccattcctaacttctcctctctcaccaaccccctttttcatgaagatctctgccttgtgtccaagattcttggacaaagcagcagtatctttatgattttgtatcctgaatactgctgcactcaagctgatgttctgcaaatttgtaataatcagtttcattttttttttagtttttcattttatttatttatttttttgagacggaatctccctctgtcgcccaggctggagtgtagtggcgcgatcttggctcactgcaacctccgctccccaagtttaagcaattctctgcctcagcctcctgagtagctgggattacaggcgtatgccaccacgcctggctaattttttgtatttttagtagagacaggtttcaccatctttgccaggctggtcttgaactcctgacctcgtgatccacctgccttagcttcccaaagtgctgggattacaggcatgagccactacgcccggcgaagaccaagtcttgctctgttgcccaggctggagtgcagtggcatgatctcagttcactgcaacatctgcttcctgggttcaagcaattcccctgcctcagcctcccaagtagctacgactacagtgccaccatgcccagctaatttttgtatttttgttagagatggggtttcaccatgttggtcaggctggtctccaactcctgacctcaaatgatccacccgctttggcctcccaaagcgctgggattgcaggcatgagccacagcgcccagccaatcagtttcctttaagacagtaattgagctttaaatagaaggtagtgtgttaggtcttggccattggaagctcgcttttctccccataaccagcctgtttcattgctttatctcctcatgtttcacttatttcaggccatcttccttcacttctgtttctgacctaaggtagacacaacactctttaaaaaaatttttaaacccccagcagctacacaaaaacttaaaaaatttaaaattgaggtaaaatacacatacataaaatttaccatcttaactttttgtttttgtttttgtttttgagacagagtctcactctgtcacccaggctggagtgcagtggtgtgatctcagctcactgcagcctctgcctcccgggttccagtgattctcctgcctcaacctcccaggtagctgggattacaggcatgcgccactacgcctggctaattgttgcatttttgtagagatggggtttcaccatgttggctaggctggtctcgaactgctgacctcaggtgatctgcccacctcggcctcccaaagtgctaggattacaggcatgagccaccgcacccagccttagccatttttaagtgtacagtttagtagcgttaagtacattcacattgttgtgcaaccagtctccagaactctgctcatcttgcaaaactgaaactctgtatccattaaacactggctccccatttccccctgcccccagcccatggtaaccaccatttaactttctgtctttatgaatttgtaatgggatacagtattgtattttttgggactagcttatttcacttagcataatgtcaagattcatccatattttagctgtatcagaatttccctcctctttaaagctgaaaaatactcagtcgtatgtatatactgcatttttgtttatcattcatctgttgtggacatgggttacttctgccttttgactactgtgaataatgctgctttcaacacgggtgtacagacatctcttcaagaccctgctttcaattcttttggctacatggccagaaatggaattgttggaccgtattttttttaattttttgagaaacctctatagtgttttccatagtggctgcaccatggtagacacttctaaagtttctgccataccctaggggaaagaattattgtactgtagacaacatctaaggaaaagaactgtatggccaagagtaaacagtcaattttcatgctttattagaaaataattaaaataattaagagcgtggaattcctagaattgggagagacattatgaaccatttggtccatccctttcctttacgatgagtaaacagaggtttgtggaggtcaaacggctagttaagtaagggaagaaccagaactggcatccagagctttccaatcctcaacttattgcaaagaaaataataataattttcaactcgaaaaattatgcgatgaagaacaagaactattgagcggatgattcgcaacatcctctgggatgtattttctgtgtgttttgttttgaaggctgtttgttaacctccctaattgccttggttgacattgaaaccctgcctgtttttcttgatcccgccgctgactgggtcctgagcatcctaggagatggaggcagagacaaaggaaatcagtccacaattaagaatggaatggttcttaatggaatgctcgcctgtgcgctggcgggagttgccagcgtgccgagcggattcagcgcctttctcagggcctcaaagatcccagcgcactaggagggtggtttgtggctccctgcagtccccacgccccggatccaaacgacagagttcggggactcacaggggcagcaaggcggcagagccgcggagccagtgcaacttctccggcgggaccgcgcccaatcttccccgccgcagtcggggagccccgggggccgccgagcacaggctgcggaccgcggcgggcacgtgggctcggctgcagcgctgcgccaggcaccggctgctcggctctgcccaacctctccgctcccgcctcggtccctgcctctggggagagggttcctccccccttccactttgcaccagtccgagggaatttgcggtcggtgacgcgcatccttaagagagccacctgcagcgcgaggcgcgccgctccaggcggcatcgcagggctgggccggcgcggcctggggaccccgggctccggaggccatgccggcgttggcgcgcgacggcggccagctgccgctgctcggtaaggccccgctcgctcgctcgcagcccctcgcggtccctcagcccccaccccgcagtgtggacccgggcgcgcgcctcctccggcccagccgcctcgctcctccccgcgctcgctccttccattgcctcccgcgcccctcccctctttcgcgccctccggactcgcccactacttgcctgcggccccggcgtttcccaccccgcgtcctcttccctcttctccgaagtctctcctctggctcgggccgcggtcccgagtggcggcccggacttcgcagacggcctcgccgaggcgctgcgccgggtctggggcagctcggcccgcgcgctcgggtgctgggccgtccgtgggagtctgcggccgcgaactcggcgccaggtggccaaggacctctcctggcccggcccttggatactgtagacacctgggtgtcgtctttaactcttcttttgaggttttgatttatggagggaactctgatgggaaaatgcgtccgcgttctcccctagagcgagtcatcctcaataacgataccccccagccccgccgaattttggttggatcaacgaatagtttacctaggaaatattatgcaaacagatttacatattaaaatactagctgtccctttcttctagtctcttcttatcctggcataaaccccaaaggggttttcaaggactccgaggactgtccccaaagaatctgctgggtagcatagttgttattgaaaaaaaaaatcttcccatcggttcgcgtcagctttctatttggaaagatgagaggactgaatcgaatttgggttgaaggcgacagagttctgggtgcccggcagctccggtccctgtcctaggtctgcaaccttgggactgacactcacctcccccggcctccgcgtcctcatctgtgcagtgagggagtccgtccgagtcc

SEQ ID NO: 6257 - DNA, 6000 bp, Homo sapiens
ggatgtaccacagtttgttcacctacctactgaaggacagtttgattgcttccaagttttggcaattatgaacaaaactgctataaatatcgctgtacaggtttttgtgtggacatacattttcaatgcatttggataaataccaaggagcctgactgctagatagtgtggtgagactatgtttagttttgtaaaaaactgtcacattgtcttccaaagtggctgtactgtttcgcatcctcactggcaatgaatgagagtttgttgcgccatatcctcgcccgcatttgatgctgccaatgttttggattttagttattcaatagttgtgtagtagtatctctttgctttaatctgcaatttctccgatagtatatgatgttaaatatttttccatatgcttatttgttatatgtgtattgtctttgatgaagggtctattcagatcttttgtctatttttatttatttatttatttatttatttatttatttttgggacagcatttcactcttgtcgcccaggctacagtgcaatggcgtgctcttggctcactgcaacctccacctcccaggttccagtgattctcctgtatcagcctcccaagtagctgggattacaggtgcctgtcatcatgcatggctaattttttgtatttttattaaagacagggtttcaccatgttggccaggctggtctcaaactcctgacctcaggtgatccacctgtatcggtctcccaaagtgctgggattccaggcgtgagccaccgcgccctgctgtgtttttaaagtgaggtgttttcttattactcagttttaagagtcctttgtgtattttggataccagtcctttatcagatatgtattttgcaaagattttctcccagcctgtggcttgtcttttcattgccttaacattgtctttgcagaccagaaggttttaactttaatgaaggccaacttggcaatcatttctttcatagataatgcttttgctgttgtatctaaaaagccattggtagatttcctcctatgttatcttctaagcattttataggtttgtgttttacatttaggcctatgatctgttttgagttaattgctgtgtaagatgttaaagtctgtgtctagatttattttttgcatgtggcggtccaggtccagttgttccaggaccatttgttgaggagactatcttgtctccattgacttgtcttagccactctggatcagctatttgtgtgggtctaggctactgtttgggtttcgatgtttgtgccctccagacctcatgttgaaatttgatccccaatgttgaaggtggaacctaatgggaggtatttggttcacgggtgtggatccttcatgaaatgtccttcctgggggtaggtgggacggggagatgaattttcactctattagatgactctggagctggttatttaaaggaaccgggcccttctctcctctccctcttgcttatactcttgtcatgtgatctctgcacacacgcacactccctttcatcttttgccatgagtggaagcagcctgaagccctctccacatgcagatgtccaatcttgaactttccagccattagaattgtgagccaaataaaccattttttctttataaattacccagactcgagtattccattatagcaatacaaaacaaactaagtctatttctgagctctatattctgttcatctttatacacatttttcatccttaccatgaagttcgtatgtatccagcaggtagtaaaattcttatttcgaaaatgaggaaactgaggcacagagtgagcagggcccctctccccaggccagcagctggttagaattgaaacccacatctgcctggctttgattctgtgcactttccttgcccccaaggtgcctaatggtgctagaaagagacttagtatgtcaaccttaaccttagatgttgctctctagggcctaaattgtagcatctccctttcttaatggttgctggaatcttgggcagctgctctttgattgtaatcaaggctgcctgtcactcacggtttctctgaacctgtaatgtgagtcttgacctgcctaaaaactggctttgcttaaaacatgtagccctctttatcagcatcctctaatgttttgctgagatcttgtgcgtaactattttttccctggttcatactgaatcctttttgctgagaagtcacttgctcatggggcttgtcttattgtctttttgaagacaggaccttgctgagtgggattgctaaacggagcacagtgctaaaaatctcctgggttaaatgtcaccatactcccatcagggcctggagcacttgctctcagaatttacaaacattaactcatgttggcgctctgtgttgcccaaggagagcatctctacaatttatgaaattctattttactgccagaagtcagcaaagagaaaaagaaagaaagagaggcagaaagagaaaattccacagtcatatttcaaacaccaagggatagatttttttcttaagaatataagatttacaagctccaaacaggagtgaaatagtttgcagaagctctcacagcaaatgaactggtagagttcagattcaaatcctgatctggtgccaagggcaaagcaggtggtctttaatcctaccaggcttctctctgtgagaaggggacatgcttactgtggcctcagcagacagagtaggctgcgtgggatctgggagatcttctgtgaatggaaggcatcatttcaccactgtgcaattgaactaagatacattgttttatttattttttattgatttttattattatttttttgagacggagtctcgctctgtcaccaggctggggcgcagtggtgcgatcttggctcactgcaaccgccgcctcctgggttcaagtgattctcctgcctcagcctcccgagtagttgggactacaggcgtgcgctaccacgcccagatcatttttgtattttcagtagagacggggtttcaccatgttggccaggatggtgtcaatctgctgacctcatgatctgcctgccttgccctcccaaagtgctggattacaggcgtgagccaccgtgacaggccagatttgttgctttaaaacaaagcatatatggtggcttactatgatgtcaagcactgttcaaagcacattacaaagctgggcaggatggtgctcgcctatatttccagctactggggaagctaaagtgaggcgatcgcttgagcctaggagttcaaggctgcagtgagctatgatgttgccactgcactccaacttggtgacagagtgagacccactctctaaaacaaagacaaaaacacattttacaactgctaagccatctgcatgtgttcattaaaactttttctggggactttttctggctcatccctgtagtcccgatgctaggggaggttgaggcaaaatgatcgctagacagctggtatttgaggccagcctatgcaacatatcaaaaacccgtgtctatatgtagaaaaaatattaactaggcgtgatgacacaagcctgtagttccatctgcttgggaggctgaggcaggaggatggcttgagcctgggaatttgaagttccagtgagctatgattgtaccgctgcattccagcctgggtgacagagtgagacccctgtctctaaaaaacaaacaaatgacaacagcaacaacaacagaacactttttctgaagctagcaccatgcagttatgtactttataaattgctagtctaattccaagggaatagttcagcagctgatatttgagaaggacctgtagaaaggattcaaagaccacggacaccgtccactgtttttctgttttcctataagatagaagaaggatggcattattaatttatgccctgtttacctatcccaagtcccagatcactggatctttaaagattatgattctcgcttggcttttggtacaaaaggagacaaggagggagcttaaaaggtgagcacggtgtgattcaggactgaagcttctgccacttcctggggggtaactgcaaaagtgagccgttctgactagccgtttgtgcatttgccactgccaagggggcacaggtagattcaagctttggggctcttctgacaactggcaaggataaggtattagcaagggcaaaggaatagtaataaaataatccaataacaaagacatgaagatttataataatttttaggccggtgcagtgtttcaggactgtaatcctagggcgctttgggaggcccaggcgggaggatcgcttgaggccaggatttcgaggttaaggtgaactgcgctccagcctgggcaatagagtaacaccctgtctctaaaatgaaaagaaaacagtttaaaccttttaagtgcataccaaatcttttattttggagaaggaaaactggtctcgagttccgtgtgagctccctggggcccgccgggagggggttggcacggccggacctgcagcactagttctggccagggcgctgtgggatctgcaggggaccacaggatgctgtggcgcggtgcgctcagattggcggagaaacggccacacgcctacggagctactgagaaggcgagcggaggcgcagcccgcccgcccgccgcgggaaccccaggttggggcgctgggcgcgcgaagactcagccgccccgcccaccaagggcgcgtcggtccccggccgcagcctctgggctggcagccgccgccgcgccgcgctcccattggtgcccggcggtgacgcggccgagcgggccggggctgcctggtccgggggcgggcgtggggcgcggggcgcggagcgcgaggggcgggggccgggcgcactgctgatgaaacctggcgccggaacccgccagccctcggcgcccattcagtccgcgcaggcaggtgtgagcagcgggtcaactacctggcaggcgcgcacgcggccgcgggctcccgctaaccgcagcctccactcctctccccgcgcgccgcgcccccgccccgccccgccccgcccggtctcgccggccgagcgtccgttggtccttgagcgcgtccgacagtctgtctgttcgcgatcctgccggagccccgccgccgccggcttggtgagtgcccggccccgccaacgcagggggcagctccttgggcccgggtcatcacggagggggccctggcgccgcgtggggccgcggcagggcggcgcgggagtggcgagggcccccgcgccgggaacgctgccatcctctgggaagggccaggaccagggccgggcgggccccggagtgggcgagcggggctggtgcccatgcgactgtcgcctccacggagtccattttggctccctgaaaccgcggcgtggtgcatgatgcaacaccgagtgagtaagcgtgggcgatctggcgatgcccgctccgcgcgcctgtccggggacccgcgcgccgctacgcacggggtggtcggggtgcgtaggcgggcggcgggcacgggggccagactgggaggcacacggagcccgccggcggcgaggagaccttcccttacatggcgcggtgcagagcaccccgccccgccacgaggtccggggatgtgtcatcagccgtgggtggggactctgcccggccgcccggagggtggtcccgcggcaggtggccggcccagggactctgctgccatccccgcccggtggccgccctgacctagggcgcctggctctccgcttgtccctagaacccgggacgcgccgcctgcacctctcgtctgggtccccaagattgctttgaggaagtctcccctaggtgggcttccttgtgacccagtgtggcctggaaaggccgggttcctcaagccctccacatggtttggaatgagaggaagttcttccgcctttagcaagacaccgtattctcagggtgttcctttctgcgtagtagaaaacttcccaggcatgggcaggtcagagt

SEQ ID NO: 6258 - DNA, 6000 bp, Homo sapiens
cacagagctgtgtccctgtctccctctcctctgttcctggggcccctccttcccattattctcagtagatggtttctttgaattggacccattgtctcagttcaagaagaggaaacagacatggagaaaatcagagctccacctcacctatgaggtgagcacccaagaagctaaaattagggaaaaagtacgtcttcttccctctgttaggtagttgtctcttttctcttggtctcaactgattccctatgcaccccccaccccctgcattttttttccttctcaataatgtggcaagcaaggaacaaaagctgagaaagagattttagggaatgaacagcctacaccatgattagggagtaaaggagagtctaaggcaggaagccagatctccctggcagcgtgcctgaatcgccacccccaaacccaaggacacacacatatatgcaaacacattctctccccaaatcttgacaagtgcagcaccagaaataaatgagcctccttaagtgctaaaagaagacagggaaacagtaaggtggatttcacgtccaaaaagttgcacatcttttaattagatagtctcgcttggagatttctctaacttcagaaccaatttgagacacttactaacattcagctttcacttggtgtctgagacttttaggaacgcgactgcaaaaagaagtgttaacctacatatgcgtggaaagtcatttaaaagggcaatgaatttgtaaattaagccaagtatttccaaattctagattttttaaagtaactttgatgtttaatcataagcatcttggggacagggagcaataagaatctagcatgtactaagtgtacactacgtgtgctgataggttgatatctagggccctggactcgtggctccagttagtgaagaagagttggttcacctgtctgaaatgatgaaggaaaaggtggatctgcacacttcctgaggagtattattcaacaatgcgctgtgaccggtatatgctgttggatccctgacaggcttaggtgacagctgagtcgaaataaaggagggtcatgtaccgtcgggagggatagaagtcagctctgcagtgagatttcttccacagctctttggtggccagtgatgttaattggtcatcatggtatcagtgaatgatccattttgaagttgagcacttctcattcaagggtaacaagcacagcaaaggatgacatttcctattttttaaaataagaaaatgtacctatacagataaaagcaaaggagaccagaactgggtaaaggcagcggttctaatgagttctttactaattcagagtttagtggattcagattgaaataattaattgttcagccctgcttggctgtttaacaacaaccgtgttagtttaattgttcccattcaagataaagaattgtgtaataagggcctctgaaaaaataatgccattttaagttgaattttaataagttctattaaataagtcacaaagccttgttatggcacttagaaacttctggcattacagagtaaaaaccaagtgtactcagtacatgtgtcaaacttatttatgaaagaaaattatttatcccagcagtgattcaacaagaaggtgtgtaatgctttctggatgtcaagaaccattttaagaagttgctaatgctcttctgtatggccaagaggaagagtctgaacagagctctgaccctaagagtacatgctgttcccaatgttcagacaagttgtgttccaaaagcatttgattgtaaatgacttgtctggcacttgagtttcatttttctagagatggcgatgcaaatagaagcactgagcccagtggttttattaggttggtgcaaaagtaattgcagtttttgctttacttttaatggcaaaaaccacaattaccattgcaataaccttgcctaaaggaggcagatccgagtgtcccggtggtagagagagaagcctaggcatcctcagccctgcagatgctaggagggttctggacatgccctgaggtgccaggaccagccactcatgggaaaagtgcaaagttttttgagtaagacctaaatgaaatccagctttaactctgccatcttccagctgtttgtctttggacaagttacctgactaaacatgtttcttcatctaaaacagaaaacattgcaccaacttacatggcagaactgatgttacctaaggtgcttccgttcaaagtgtccaaactctctgtccttgcaaacatgctcccttttggccttaatcttctacagccaatcaattaccaggttctatagtttttacctcttacatttctctggaacgtttccgtttacctccaccccatgacactaccctagatcagccacgtcagcatctctaccataggacccttaaatgtgccccactctctcctaccttgacattctccttgcacccagtattgtttccctctaatccattcttgacagggcaagagctggagagcattttcaaatgcaagcctgatcctgtggcgcctgcttaaaatctttgtttttgtttttgtttttcttctcattgccctttggataaaaaccaaactccctaacatgaattttaaagcactactcactatgcggcccctgcctccatctcattcctgacattcctccgcctccaaccccacatacttgctttacttagttatttaagtctcttcagtgtaccacactggcctcctttctcgtatccagccctgaaacaggagatccctgggctgaggacacttttccttcattgtgccccccttgcttcaccaggctaacttctgtatccactgccctctgtgaagggcgtaggccaactctcactgttggttattaggattccaattgcaacacccaatacttctgttaatggctgttgtgatacctcggttcttgtcttcttagtttaaaagaatttaaacaaaagacacacagcaaaggagatgcggcagagagtcattcactgcaaaaggaaaagagtattttgaaagttagatgcagaatagacagtataccctgagagagagagttcagggtgggctgcttgcaagggtgaggcagtgttgattattgctagagaaaccccctttgtgggagtcttacatgataattcataaggagttgggaagaggtgttgctagtaagcatgttctgggtggtcctctgggtgcacatgcactgtagctgtatgtttgtgttcatatatcacatgtctcattagcatcttaaatctccacccaggggtgtgttttttactataaatgagcaaagggtcagtttgatgacaattaaaatcaaaatgcacatgccctagagaagggacagtccctcctgaagatagctttgcttaaatgagctcatttatgatgtgaatgccaaggcttattgtgttggctgtgaggtcaccaccaatgctgcatcccgagaacatggtcacttccttgactaactatcctgcctcacttcccctctcaaaatactttattgtaattctagcttagttctctggtttacctgtaggttaaagggctggcacagtaaggcaaggtagtagtaagactgcaggttttgaactgcctaggttagattttaggctctgctccatatttgcttgtgaaatgactcatcatctgtaagcctcaatttcctcacctgtaaaatgggtggaaatgatgctgccaatcttatagagttattctgtgagttaaatgatgtaatatatatacatactgatgcacacagatgcatatatgttcatatataaaaggtctaagtgcattgactggtgcataaaaatgccttcaataaaaataaatgtctttcaaaaaatgccttaaaaatacacatacaatggatacttactaaatacttacaggcttttattgttttgttttgctttttaaagcaaggtattcctgagactgttttcttgtgagccctttgtctctttttcttcattttccattagctggataagatcagagtctcaaagtgaaaagtgttaacactgtgtttgcttccctatttgctcattttttccctccaatctatgtagcctttacgtatgacataaagatgtgcagtagaatgcgggtgggtaaagaaaatattatattcacaaaatgtgttctccagccaaccagtaaggcatccctttcttactagttataggctctgcttctgcccttgtctttaatccttttctatttctgagccccttccttagaggctactggctgaggaagtctaatgtgatgaggtccgagcgtgaagttcactcagcaaagacaggatggtggcatgcaagcaaattaaagcattctcagctttccagttcactctctctgcaaacaaacaaacaaaaattcatagctttttaggtttctatttttaggagttgccaaatacatttcaaaagcaaaactacaaattaatgcagcatggggtatgtgacattttttaaggtctttggaggagatgacaaaacaaggagcttcccactttccagggttgtaagtttttgggaaaacatcaagtgcgaaaaatcaataaacatcctaccttgccactgaattgtgtgagggtttcctgattacctggtagtcaccaggctttagaagagttattgtcatttcgattttcagatgagtcactggatctcttgcccccagggccacttcattatgattcagtgcaaagtactgacagcactggggcttccggaagggagtggtgtcgggatgggggttgctgttggcaagaggcttaattgacacctttgatgtagcctaagacagaacctgcacctcccactgctgcttgggagacgtcagctttacgcagaaaaggcatctgctgatgaatcctgcatctcattcagcctgctctgggagcagccttagccatccttaaactcatccaaccgattcccatttccgcgggtgcttggcttagtgctgagacgggattccgccgttggtattcaggtccaacactaagactgtgtccatgttagaactcatagaaggtaagtgaaatgcattgctgctctcccttgtggaaagcatttattttgcaccctcaagaatctatgtgtctcctggttaattctacttcactgactgtggggctgtaatgccatttttacaggtaaaatagaggtgacctgatacatctttataaaaccatgtctttaagtgtttcatctgttgttagagatgatgttacttagagaaaagaatggcttacttgagttctgtggctttagttcagtttagtgaaaatgtgcataaaactcttgagaactgggtagaattccagtgatttgaacttgttagcagtttttcttttcaaaggcagcaaagagaaactgtgaggagtttctcagcgtctgtggccaatgactgtcctgttcaaggcaggtccatcacaatcagcctagggggatggacaagacacaggtggatgcaggacatttttctagaagtgagttattaattatacaaatacagtgatctatttatcaggtcactggaatgtcactggtgatctgtgcttatatttattcctgctgggtagtactaggtagctaaactgaagagttaaggattaatctcattgaaaatgtctcaggaccatacattcctaaagtccctgctggcacagttaaagacatcattaatacattcatcaggaaagttgtgaaaggtacatcttaaaaaataattctgtaacctgctgctctatgaaacacaggatttacaaaactgtgactctctgaaggttacttccccaaagctgttcctcagtgtacatatggaagggtgtctagagttctagtagatggctctctatataattgtttatttcttgcagaagatgatttgtcatgaaaattatttaacgtgccatttttctctgtgtgtgattctttgtatttctagttaatggaacccctg

SEQ ID NO: 6259 - DNA, 6000 bp, Homo sapiens
tgctcggcaagattacctggagatcttttaaaaaatagtaactgggtttgtgcccccaactactagccaagaatcttaatttgttctccagatgatagagcaagatttaggaactgctgctttagtggtaaagagcaaaagctcagctgggcgcggtggctcacaccggtaatcccagcactttgggacacagaggcgggcggatcacctgaggtcaggagtttgagaccagcctggccaagatggcaaaaccccgtctctactaaaaatacaaaaattagccaggcatggtggcgggcgcctgtaatcccagctacttgggaggctgaggcaggagaatcacttcaacccaggagacggaacttgcagtgagctgacatcgtgccactgcactccagcctgggcgacagagcaagactccgtctcaaaaaaaaaaaaaaaagcaaatgctctgcaattactaagccagttcaaatgtcagagccatacttactggctgagagacttcaggcaagttatttaacctcttaccttaaactcctcatcttgtcaaatgggaagaaaatagtgtctactcctagggactgttaataagggccaaatgagatagacctgttaaatcccaggcataaaacctgacaaggagcaagttctcaaatcttactgttatacatcactccaggtttacgaaagaagaatctcaactgaggttaaataacacagggtatactgtagtcaaagaagcacaggctttggagtcagatttatgtctaagttttacttatgagtcttatgtacctggacaggttactgaaagtcatctgtaaaacaggaggtgaagacaagtaacaaatgattgttataggcattaaagtggataattctgtaaagcacctaaaaaggtgtctggaacatagcaagtactcagtaaatggtagccagtattccctcaaatttttcttttcaacaatttcaattttctacacatttacacagattacatgtcatcactggctaaaaggatgtcaccaaaaatctgttaatgtctcaaatgatataacaatttttttaaaatggtgactcagattttaaaagttgtttcattttgctacatttgacaattgttcacttagtcattaaacttgggtcatattatctaacactcatagtgaaagctcttgggaaattaaacattaaaaattgacacccaactaccaaatcaagagtagaattacaggtgtatattacaatctaataaataaagctaactttgtaactcaaatctcaataggacatatttagacttactgctttaactccacagattactgtagtatttcccaacttcactaaagcagaaccatctgcggtactaattgaacctgaaaagataagcaaaatgaaaggttcataaaaggaaaacagctacaaaattatccacataataattaaaattaagtgttttagtttgctgtgtacgattatcttgctacccctctcagttgcttatgaatatttcaagttagaataattgatttttacataactattttaaattagtgtttaaataattattcacctgtccttgaatttgtgttaatcatttttcatttagttacagggcttttgtacggataaaaatctcttgacaaaaaaaatcatcaaatcctttagacaaagaatttgggtgaaaaactgtttggctggttcatagactaaaacttgggaatatcatacagttgaaagtggaaaatacatccttaccgatgttgacagttgtggttctgaattcaccaagttctcttccatcaggacggcagttctctttctaaataaatatgtttatataaaaatagattatacctattacatattttacacatctatcacaagttttacacacacattaaatgttacttcaaatggattaatttaaattacttgaaattcatctttaaaagcagctcgttatcaaaacgcataacatgtacataacctttactcaccagaaatctcctgtaatactccagaggttccacggttctgaaacacgtgttaaaaatatatctgagataaactgatgaatcttaacataaatccagaaattggcaaagatcttaagtgtggtgatgcagcataaatctccacaactttttaactaaaagtaattctagaaagtaaaaatccttgtagtagcaatcacattcaattgctgtccttaactctgccataaacgattagaagattggcgtctaaaagccctttgagtgagctctttaaaagctcaatctgtgtcaaaagaatcatgtcgttcttgctctgaaacaaggattcagagtgatctagtgatcatgaaaaaagattattttaataatctagtgatcatgaatagttaacctcttactagataactcaggaaacaaaaaggtacatctttattttcactgtaagtgaaatttagcatattcttcaattatgactgtaagcaataagccatagtaacattagcagtacctgcaactttaacaaccacggagaccacagatgttttcgtttgcaccctttagctgtgtaaggtatgttcaggctcaccgttactttgaaatcccaggagttactactagtctcgccactagatcttgtttacgaaggttaattttaaaccaagtatatatactactatatcgtgtcttcggagtttatactcatagataactatttcaacataatggatttcctttggaatcctatttattttatccattttttaaaaactttaagaaagtccactggcttcacacacacaaaaaccttccaaacgaggcatgatccttttagaaataaattacgggagagggagaagcaggcggtatgtggttctgatgcaacaatcttgattgattgattctgacagagtctcactctgtcgcccaggctggagtgcagtggcgcgatctcggctcactacaacctctgcctcccgggttcaagcgattctcctgcctcagcctcctgagtagctgggactacaggcgcccgccaccacgcccggctaatttttatatttttattagagacagtgtttcaccatgtacaccaggctggtctcgaactcctgacgtcaggtgatccgcccgcctcgtcctccaaagtgctgggattacaggcgtgaaccgccgcgcccggccacaatctttaaaagattacaactatgtctcctgggactgcacgttcactacacaccacgctcacgagcgctcgcagcgggtatggaactctacagagtcctttcatctcccgtctcactgaggaagaagccctttcttttcactgtgacaacctccaggtcctcccgcccatcgtctgcctcgacgaggaaggaaatggcaccccaacggggtcggcctccaggtgagagaatcccagctaagagttaaaggaagctgccgtccgccagggtacagaactctacccgccacccgccaacactcacttgaacccagccgccatcttcccgcccgcgcgtctgcgcctgcgccgctcctctcctgcgcgcctgttccgccgccgcactttcgacacggatgccggggccgctcacgccacgggaaatgccaaggtggggacgcgacgaaaggtccctggcccgccctcgcatcgactttcccctgcccagacgcctttctaggtttccttgccttggacgtattttgacgaatctgctgttaaagaaggagcgggtctccctctttataaaagagctggtgctgtgactcagaataacaccaacagttcggagataacagggtttctagcgcagaatcaagcagtgcgtgtggagcgttattccaatgtttctgcgtcttttttctgcctgtgacttaggctcagccctggccttgcctcttcactggtcaagggctccgtgctccaacacatgagaaacctgaactttttttttttttttttttgagacagagtctcgctctgtcgtccaggctggagtgcagtggcgcgatctcggctcactgcaagctccgcctcccgggttcacgccattctcctgcctcagcctcccgagtagctggaactacagacgcccgccaccgcgccccgctaattttttgtatttttagtacagacggggtttcaccgtgttagccaggatggtctcgatctcctgaccttgtgatccgcccgcctcgtcctcccaaagtgctgggattacaggcgtgagccacggcgctcggccgagaaacctgaactttctgtgcgctcattgtccgcaccacgttctgctctgcaggtcccggagctgagggctcctaagcatcaccttgtgttgtagactgtgtcgtgctcaaggctgccatctccctcctaggtggggttaccagataaaatacaggataccacgttaaatttgaatgtctgataaacacagcgtggtttttttgttttttgtttttgtttttttgtgggtttttttttttttaaagcatgagtatgccccaaatagagcatgcaattagttgttgccagaacctggagggagctgggaaggctttacagatagatagtggtgatggttgcacagtatgtatgtaattaatgccactcactattgtaaacttaaaatgattaaaatggcaactttttattttaccacagtttataaaaactaatgtaataaaccagaaacctgtaactggatgagtcgtatggtatgtggctatcttaataaggctgttaaaaacatgattagttttttaatctgaaattcaaattaagtagacgtcttgcatacttgataaacctggcgccccgctgtggaacctagcgctcctctccaccgactgggcgccgagggcacgagagcggcgttttctccgcctcgccacgcgggggcgctgcggccagcgggcgcgacctctctggcggcggggccgggtcgcgcgggcgcgcttccgcctgtgtggaggtgcgggattgggcgggctgccacggcatggagaatggctccgcttctgttgcagctggcggtgctcggcgcggcgctggcggccgcagccctcgtactggtgagaacagggatgggaacccgcgcaggccggggcttaccgctctcctggagactgcggctcctcaggcgtcccctcctccgcgctaccagttctcggagaagtcccttttcccctagattcccccaaattcctgacctcggagtttcctggagtttcactctccttttcttcggttctttaattttcccttggaatcttatctctttgtgtgctcagagacttgtaagttttttcacactggagcgcacccacccggcctggcatcatcgccgcttccatcgcccctggcgcccgcgccccctacccacctcctctgtcaacctcgacctctcccagactctccgggacctgcagccgctgcagttctgctccacccagggaggtctcgagcccccagaaggggtgtgctccctagcctgctcccttggctgatgtggttaagcaaataggggtgacggagccttgacggcagccatctgttacaaatgggaataaatgcgtggatcgatgagacccactagggacgcagggtgagcgagagagacaggcctcaggcgccttgtccggggtcgcattgtgtcccagaattaagcaccctaaatatactgcccctaaacaaggcaggacgatagaatgcaaactcgattgtctttgcccttgctctcgaaacacaaaaacattgtaaacacttgctgattgttaagtggtagaaaattggcgaactctctcccgcacaccttggaatgagcctgccctctagttagtaagtggagaggatttcagcttccttgacattcagattagccacctagacagcactgccaggaaggccactctgccatctttccagaggttgtataaatttacagtttagataaaatgtaatgcatccttacttctttgttgatagtatctg

SEQ ID NO: 6260 - DNA, 6000 bp, Homo sapiens
tttttagtagagacgaggtttcaccatgttggccaggatggtctcgatctcctgacctcgtgatccacccgcctcggcctcccaaagtggtgggattacaggcatgagccaccgcccccagcctacatgggtattttttaaaaaggcaaaagcaaaactaaatcataagtgttttagaaatgtaaatatataatttaaaaggttctattttaaaagcaagagaataatcaacaaaattataaattacggttttagagaggtgaggatgagacccaggaggaatatgcaagtagtttcaatggtattggtaatattctagtggtgctgttgtgtggtatattgatggttgtttactttattcaataaatacatacatgttaaatatatcaacagtattccataatacaaacgccttaattcaatagatttcgttctaacgtatagaatatttaattgggggacgtccaggtagagatgtttcgtcagccgatagttaaaaatatttattattctgaagagaggtataagccagatttgcagcttggggagttatcactataaatatctttacagatttggagaccgaatttctcattttaaaatgtgagaattcggcagggcgcggctcacgcctgtaatcccagcactttgggaggccgaggtgggtggattgcctgaggtcaggagttcgagaccagtctggccaacatggtgaaaccccgtgtctactaaaaatacataaaaattagccgggcgtggcggcgtgcatctgtaatcccagctacttgggaggctgaggcaggggaattgcttgaaccaggaaggcagaggttgcagtgagccgagtttgggccactgcactccagcctaggtgacagagcgtgagactccatctcaaaaaaaaaaaagaaaaaaaaaagtgggaattcaagaatggaataaatgagaatggataagttagaatgtatgatgtatattcgtaaaaaagttaaagagatcagagaatttcaatttaaagaaaagggcatgttttcttaagagagcagccactgtcctggaacacctggatacatcttagcaagaaaggatggtgggtgatgtctgaaaccagaagcttaggaaaggaaataggtggaagtttagaaaggattgtctcaagagagggtttgtgctataaggtgaacattcagggaaaaaaatatatacatacttaaggacacatgtcctgtatgtcaagagtgggaatagaattaggccttttaaaaacatagctgtcttcagccagggtcattggctcatgcctgtaatcccagcactttggaaggctgagttgggtggatcgcttgaggcctggagttcaagatgagcctgggcaacatggcaaaaccccatctctactaaaaacacaaaacttagctgggcgtggtggcacatgactgtaatcccagctacttgggaggctgaggcatcagagaatcgcttgacccctggcacagggggagcggaggttgcagtgagccgagattgcaccactgcactccaggctgcgtgacagagagactccatctcaaaaaaaataaataaataaataaaataaaaagctgtcctcatctcagtactttcactagtgcagaaattgataaaatgaaaatgcagaaacactgaaaagtcttcatccgaagcatcttccagaaattcccgtatcctcctttcccaggataagtgaaagaacatccacagatgataataattcatccactgggctaatttatattttacagaaaaagaagtaggaaacttgaaaatgagctcatgtttcatttcctgaggccctgctatgaggattcagtttgtcataggtgttcattgcttgctgaaacccttcttgctttctaggctgagacatttgaaactttctttaggaaaaagaaaaacagttgcttagtcatcttccaaagggatggaccatagcaagcactcttgaggctctttgtagtggctcccagggaataattattgtttctgttgctttgaaccttccacctcagtgactggcagtgctagcataaatggtatttggctaatattaagagaaaatgtatttagaaataagctaaactagcacctccagaacactttgctgtatgactatggagaagcatctgactcaaagggaaaggggctttcagttccaggcaaagattgtctttggcttaagtcgggagaaatgatggaaacaggaagtttttctgttgctctttccatgagaggttagttacaaagtgatgatgacatggtgataaagtagaggccggaagaaacgggatggcaattatatgacaatacagaccaggaatgggcctcgagtttttaaggtagcattagatcagagagagaagagagttgataaatgtatggacataccaaatcaatctctatcagtcttcctttcacttgaaattaggggacaagggagacattgtgaaaattagcccaatcttgccattgtagagagaagttaactcagtccttagaaatacagcccagcttccattcatggtaataatagttaccatttattaatgttagtcattattctgaatattttacatgtaattttcataagattctcatacaggcaactctctttggtaaatattatattaccatccccattttacagatgagaaaaataaaacacagaggttaaatagcttacccaatgtcacacactagttcatgacagagcaaagttttctttgtatctgggcagtatgagcccagagccttctctcctgcccactgtgcctccagcaacatttctacttggagctgtaagcgaggatgtttaagggaggtgcagagaaaactatcctagagcagacagttgctgactctgcacacattatgcatgtctgttttaatctgtgttcttgtctcctttcctaaatttctaaaactctgtattaattattgtaattacaaactgtggatgacagccatagtagttatttccacaatttgagtttgtggaaaaggcaatcaagattatcaagtagttggtataaataacccataacctggaaaattttttacttttgtttttttcttttttgagttggggtctcgctgtgtcacccaggctggagtgcagtggagccatcttgactcactgtaacctctgcttcccaagctcaatcaatcttcccacttcaacctccagtgtagctaggactataggtgcatgccaccatgcctggttaatttttgtatttttagtagagatggggttttaccatgttgcccaggctggaatctgagaaaagttttaagatgaagttgcaaagaaggaaataactaggtggttggcagaagaaaaaccagaaaagacaagaaggccagggagagattagagattttttctactgttttcacaaaataatacaatataatataataaatgccatacaataaatataatggtatacaaaagaaaaacaagatatatttgggatattgatatgagagaaatgaacatcagaaaattagaaaattggtgttcttagtattggaataaccacaaaattgtctgtggttctatgtggtctgatgaaagaaggaatcctagtacaggatcctaaggatctggatttgagaaagagctttgccatttgagagctgttttcatttgtgatttatatattcattcattcagcaagtattgttgaacatcaatcatgtgcccacgttgttctaattgttgcagatgcaatggaaatgttagaccaagtcactctcctcatggaaatgtatagtgcaaggcaggggtcagcaaactttttttgtgaagggacaaacagtaaatattttaggccttacagcttgtatggtctgtgtcacaactactcaaatccacgggtgcagtgcaaaagtgagcacagacaatacaaaaatgaaagagctgggcatggtggctcatatctacaatcccagcagtttgggagaccaaggctgaaggatcatttgagcccagagtttgagaccagcctgggcaatatagtgaggccccatctctaaaaaaaaaaaaaattaaaaattagccaggtatggtggtgtgcacctggagtcccagctgttgaagaggctgaggtaggaagattgcttgagcctggcaggtcgagattgcagtgagctgtgattgtgccactgcactccagcctgggcaacagagtgaaatcctatctcaaaaaaaaaaaaaaaaaaaagaaagcaacaaaaggacatactgtgttccaataacactttatgttttaaaaacaagtggtaaattaaatttagctggcaagctaaagtttgtcaattcttggtctagaagaagaaacagacacaagccaaaaaattatgcatatgataacacgtgcaaagatccggtggcgagaagacatatcaagctttggaggcactgataggagaccaatggagctgcttcacggagagacacatgagtgaggctggaaagggaggaaggggcaggccagcagggtcttgtaggacacttaggagtttggtctttacaatattgacagttggcaattttttgattattttaagcaggatgaagacatgatcagatttgagtttcaaaagctcactcactgcagtgttagaatgagttgggttaaattttctcatctgaaacataaggatggatacacttgccctgtgtattgaacaggtcattgtgtaatcagtgatcacacaagatttatacaaggtgcatagaagtgttttatgaaatataaatgctatagaaaattacacagcaatattttacaggaagcaataccaccagatggtcatattctttcaagttttttctgtgaacaaaggcagtctgaactcataaaagaaatctttttgtttatgttatcaggcttccctcaccagggtaactaccccttagggagttcactaaagagaaggaatgtctttcactctctcatactttctcctctcccctctcccaagcacatctgagttgctgcctgttcttcacacttagctccaaacccatgaaaaattgccaagtataaaagcttctcaagaatgagatggattctagggtgtcttcacctgagaagcaagataaagagaatttcgtgggtaagttcctttttcctgtcttaggcttgttttttacatatatggcaaagcaggagttgtagcattatagacaggtatagagtaagtatgagatatatttgcagaaatcggcctcaatttcatttatagcccaggattttgaattcattgcttatgctgatttcatttgcttcttgaacggcagtctataacttgctttatttttccttcaattttagataaagttggtgtttatctttgaatttcttctttctgtatgaaatccttctcaggattttgaattcattgcttatgctgatttcatttgcttcttgaacagcagtctataacttgctttatttttcattcaattttagatagaattggtgtttatctttgtatttcttctttttgtattaaataacaaagatatgttgaagaggctgacttttctccaacttcaaacattttctgatgatgctgagattaaaaagaaaagttggtttgagctgtatcctgtttgataaatggagagaagttgagaaaaaaaacttagcttataagtaccaactactatcattaatactaatgactattatgtgttacaaagcattttgcttgcattatctctttcaattttacaataattctgaggtagatcctcttagaatctcattttacaaatgagaaaactgagcattggaaagtttaaaaagttgttcagaaagtgattatgatgatggtgtgcgtgtgtgtgtgtgtgatgatggtgtgagtgtgcgtgtgtgtatgacctaacctgtgctctgtaccttatgttgccaaaaaagccatagtacatgttagaaatagagaaca

SEQ ID NO: 6261 - DNA, 6000 bp, Homo sapiens
aaattgcattttgccaaatagcactataaaaatgagttctgtacaatattataattttaatgttcatttgatggcttacataagtgctatgctcatctggttacaatagaattttccagtaaataataacgcacaggttatatttcaaaaaaaaacttcatttttaaaaaacttaaggtatgacttctgcttacaaaattataaaacacaggtttccctgaaatactcattttccaaagtacatgtaaaacatgaattaatatgacttataaattgtcaagattgcctctgtagtgaaaatcaaagaaatgtggaatggaatttcacctgaacttctgagctagtctgttgtctttatttgtgctccttttgacacatagtgccttatgtttttctatactcctcaaatgaagctaaaacatttaccaatgtaggcaattttcctgggcttccttgaagacgcagttcaacactgcaaaatatttacagctgtattctttggactgcaatgacatgttcacacgaccttgtggccagaggttacgtcctattagtcctaggaaggttcaagtacttggcacagtttgtgagatgctgtggtcaatcagttacataaagtggctgccatagtacttttgttagtgtaataccagtagcagacaacatttagagcagataaattttatatttcaaaatagaactaaaatttggacactcaaaaagaattacattaacatgggaaaatccttgattcttaaaacatgtcaataattagacagtgtaatttttatttttaacacacaaaagaagccaacacaaaatattcatacctcaatatcaaaatgaatgtttcttacattcagtgctattgacaagaggcaatgaagcaagtacatgttaaaaaaaaagaaactcagcttgtgaaaggcagaggaaggtcaaaacacagatcaataaacaaaaaaacaaaaaaaaaatgtgggcaagtccaaggcagagatatactgtcagatttaagtaaaaagttgacagcagcttctctagcttttactttctttctaaggtaatgggaatgaaatccttttaaaagacaagcagagaagcatgcagctgacaacaaccaagatttgatagcaggggagaatgtggagacagaagctccctgttcttatcaaacgcagcttctaaaaccattccttttccttgaagagtgtctgaattttatagaggaatgatctgttaagtctaggagaattatcatactttttgtatcttccagtcgggagggataacctcctggtaaggtttcacttccttccatggcatgggagtatctctggcatataaatggagcaagtgtatatattacaatgatgtcctgcatcaatcacgggatgacaaagacctcatttcccataaggagttggtaaaaagatgggaattcctgctggaatgagttctgccttatgcagatggtaggacattagtattacctcatagtggaaggttctgccagagtttagttaggcattggacccaattaactataggatatactcatactaaggaccagtttaaattctcaaagttggttatatatgattaaagctgtctaagacagaggtgatctaactctaataaagagttaaggtactgagtaggaaacaggaccccaatctttcaaatttttatatgtttttgcctgcaaaggcagataaaatcttcaaatctagtggccaagtggatccaggtaagctaatctttgacatgtgtggtttaaacccttctgctgaaaccattaaattgagcagttccggtttgtatctgcaaggcagagaaacatagtcccatgatccagggatgtctcccttggtataggtactgaagcaccatttttatagttttagggctgtggagaccttacagatattaccttggacaagcaacacccactcgccaccccctagcaagtaaatataaatttagaatagactaaaacgagataatctggctttctcctaaggggcatgtgtaccaccacaggcagcaatgatcaatgaactcctataatttccatgaactacagtcatcttgctttgctggaggtaatatggagtattaggcatacagcggggcctactgggtgcctttttttttttttttttggagacagggtcttactgtgttgcccagactggagtgcagtggcgctatctccactcactgcaacctccacctcccgggctcaggcgattctcctgcctcagcctcccaagtaactgggactacagacatacaccaacacaccccagctaatttttttttttttttttaatttttggtagacaaaggatttccctatactggccaggctggtctcaaactcctggcctcaagtgacctgcccgcctcagcctcccaaagtgctgggattacaggcataagccaacatgcccggcctacatttttcttctttaagtctgcaagttgggccaaagaggacacaaaagtcctatggatttgtataagccaggcactaagacaaagcttcagttatactactgttgccaggccatgggtggcaaagaaatcacacatgtcaactttgcagaagaacaccagagtgaagtctagagtgagaaaaaacaatcaaggagaagaggcacaagatggaatggttcagagtctgttcaggcaagcctgcagaaacgagcactcatcagtggttttgaaaacctggcaggagaaaccaaaagtgagtgagctaggaagtgtaaggtggccctggggtgatgactgaaggtcagcagtcccacttccagctgtcctgactcactcctgccttctcatcacctcatggaagcctatcctccaacagcaacagcattggggcttcccatgaagacatctatagacaggccaaacagggtgtaaggaagcagacccagagtacatagtatctatccacatcactttatttaaacaagaacatgctagcacagtctccatcactatactacagttatgttgtactaattctggtatcctataaagttcaaaaaaagaggactatacctataaatgaaattgttatgcctttttgattttgctattatatgatgctactcatgtgcagtgactatttgtaatggtaacacaagaattccatgaatgtacttccagagttgtatcccttctccctcaaaatctattcagtatttcttaaaaagttgtattgacagaaaagacttaatctaaaaaagcaaaatcaagacaaacatgagattgtcagaatataagagtaagtcttattaagtgctgcaggagtaaaggacgttttagtcaaaatgttggctttgctgtgaagtcctagataaaatactaaaaattctctggaatgcaatgttatctttggtgaaatgaggaagttgaatttcacagtctctaagcaaaaacacagctctaaaaacattatgccttagttttctagttcgatttcaacgaacttttgatctcaataatacataaatgttaacttcaagatcactataagaatataattttttatacctgaaaatctaatattgtttaaagaaaataagaagtatgcattttagaagaatctcttccaatattcctatgtcaacatacagttaaataattttaaaatacttttaatgcaagagaaatataaactaaagtctaacttttaacagtgtggcccagcgcagtagctcatgcctgtaatcccagcactctgggaggctgaggtgggcagatcacctgaatccaggagtttgagacccgtctgggcaacatggcaaaaacttgtctctacaaaaataaattaaaaactaaaactacaacaaaaaacaatgtagtttcccagaataatttagcagataggccaaataatagtgtactggggacaatgtttacatttcttaccactgagcctttaaatgctagaagtgaaacctcagaaccctaaattgctttggaagggaagttataggggaaagaggaaaaagatgtgagaagtggagggtgacatcattcacactgttccagctcccaagttgaaaaacaaggttaggctttggtgatttattttgcccactgtgaaacaaacaaacaaacaaacaagaaactaacttacccatgacactattttgtagtaggtattctgaatctagatctttctcctatcttcctacggtatatacatgcatgcacatacacagtcacagtattttctataattgtccaagtctttgttcagcacagaagcaggctccgagtgaaacaagttcatgaattttccacagaaaatcttaagcaaaaaaattaagtgattactgtaaagcctatttgattttttttttacttttagggtaaataaaataataaaaaataaaaaataaaaaaaattcttaacatcctttaacatagatctccaaatcagaatcatatgcaaatccaattaaattcaagtgcagtgtcacaagtagcaggttaagtattcttatttgtgtctcaaaaatgactacaatactttgaaatgtgtgactttttccgggaaagaaaattgtatacacctagaattttcaccttatgtttcctacttaaatttactttaaaaagatgacactaaatcaatatacattattttccaaaagatgacaatattattcaacattaagcctgcctgattaaaaaataacttaggcatttagaaatagttaaacattcacatttggatgaagaattaaacatttggatctgcttaactgacaagaggaaattcaatttattctgagtaactcttattacttcaaaggatagacatgaaaatcctttcacaacaaatcccttccctgatacagttaaatgcaaattctcttttccgtcttactccagaaagctcctgcatacataggctgatacgccacctactgcaaaaccgagctgacagcgcaggcgatgctgccagcgtttccattccatcaccaggctggggctgaataaaggcgtgcttgtgtggtagtgtctctttttaaaaaatctcaaagccaagaagaacaagctgaaatagcatcttcaaaaaatggagcgtaaaataaacagaagagaaaaagaaaaggagtatgaagggaaacacaacagcctggaagatactgatcaaggaaagaactgcaaatccacactgatgaccctcaacgttggtggatatttatacattactcaaaaacaaacactgaccaagtacccagacactttccttgaaggtatagtaaatggaaaaatcctctgcccgtttgatgctgatggtcattatttcatagacagggatggtctcctcttcaggcatgtcctaaacttcctacgaaatggagaacttctattgcccgaagggtttcgagaaaatcaacttcttgcacaagaagcagaattctttcagctcaagggactggcagaggaagtgaaatccaggtgggagaaagaacagctaacacccagagagactactttcttggaaataacagataaccacgatcgttcacaaggattaagaatcttctgtaatgctcctgatttcatatcaaaaataaagtctcgcattgttctggtgtccaaaagcaggctggatggatttccagaggagttttcaatatcgtcaaatatcatccaatttaaatacttcataaagtctgaaaatggcactcgacttgtactaaaggaagacaacacctttgtctgtaccttggaaactcttaagtttgaggctatcatgatggctttaaagtgtggctttagactgctgaccagcctggattgttccaaagggtcaattgttcacagcgatgcacttcattttatcaagtaattacctgtgtcacgaacaaaggcaacaagcatgcagccagcaagcttcggaaaaccacagcatcaaagacatcccaaataacatgcccagctagctctgtactacagagccct

SEQ ID NO: 6262 - DNA, 6000 bp, Homo sapiens
tccctgcactgttgttcttactattgtgtctagtggaacacatctaaggaagcagaagtactttttagcaggacttacaactgtggtaatatcaatgggaagggacagacaatttgacaaagcctccatcctgacctctgtcttcctgccaactctcaaattatagagactctccaaatgtgcttatatttattggggacccacagtgccaggtgctatgctgagcactaagaatacagtagtgagcaagactgggtccctaccccaacgagcttactgtttcatgggaagactgtcgagaaaactgctcattcttttgaagtgcggtaactgttctcatagcagcatggatgcacaaagagggcaggcacccatttcacccagtttttagtgattaggagagacttcctggaggacatggtgtccaaactgaggcctgatggatgagaagggcttagcaagagaaataactcagcaggtgcaatgcagtgtgtgccaagttgcagaggtaaaagggagtatccctgtgtttggggagctgtgagtattttatacagccattcagtgacttacacaaaagatgcattctcaacaaagcacctgtaaccaagaaaaacaaatgcccaaagcaacattcctataaaacaggatttctaaaacttcagtactattgccaccttcctgggcattgttgaacgtttagcagcaacctaggtccctaccaacttgccagtagcaagcatctagttgaggcaaccgaaaaactccagacattgtgaatttctcctggagggcaaaatctgattcagattgagaaccgctgcaataaaatataatgataaagaattttatgggctcattcccagtacaccagctaggaacactggcctatccaggtgttcttcttaggagtagcaatggctcattgcttctgcattttgccaaggagaggaggtgaccagatgtctcagtcagatacaacctcctcctttcgccaaccaccaaatgttacccctaaaaggtctgactaagccctttcattctgcaagcaccaaccatccagaaaaacctgtgagactcattcttgacaagacgcaggtccatattatctgcatcattcctgtagtttaatgtaattaaacaaacatttatcaaattgtagttgattccaaagcatttgttatttattgccactatatagtgcacacacaattgccaagatgatgaaaaccatgatgtgggtaaaaaatggttcctgctgcccagctcctcatagagattggcatcatccacctaagggagtgtagtgagggcttttggctgtgtggatgttactgttctaacagtttgctaataaaaggcctaaatggcaataaaagcccagctacttgagaagtgcctatatggccagactttagaatgtaggattgaggggcaagtgcatgggtgaggaggatagggaactggattcttatggctggagggctctaaggaccacgtggtcaggggccttaatcttgaggacactggggagccaatgaagaattttaagctggtgagtgccatggccagatgaattcaaagatatttctacagcacttacattttacaaagtatgtttttgcacacgtcgcctcatttaacattctgtagggagggtattgtttccattttgcaactgaggactttaattaactcaaggccagagagctaataaagctgtggccaggattgagtagaacctaggtcttcatttccatattgctacctgggtgtgttaactgtagtcagataaaaaacatgcacaaagagccaaatagggggaaagttgaaggcaaagaatagatgaaaaagaagttgcttccaacagggactggcactgaatagttcgtagatatatttctggacttaccacttttttttaattctttttttttttttttttttttggagatggagtcttgctctgttgcccaggctggagtgcagtagcacgatctcaactcactgcaacctctgcttcccaggttccagcaattctcctgccttagcctcccaagcagctggaactataggcaggcagcaccatgcccggctaatttttgtgtttttagtggagatggagtttcgccatgttggccaggctagtcttgtactcctgacctcaggtgatccacctgcttcggcctcccaaagtattgggattatagacgtgagccaccacgcctggcctttttttgttattcttgtttctaaactggttatgctgctgcaaccaagttactattccctagagaaatagtttccaatccctgggccaagacccttggaggaacccaaggttactgcaggggccccacaaattccatatgcattttcataatggacactgaaaatactaccatctattttatagggactcaaaatttttaaaaaattcagttttctttcaaaaagatctttggccaggcatggtggctcatgcctgtactcccagcactttgggaggccgaggcaggaggattgcttgagtataggagttcgaggctgcagtgagctgtgactgggccactgcactccagcctgggtgacagagcgagaccctgtcttgaaaaacaaaacaaaacaaaagcacaaaaaaacccacaaagggatcttcatacttgaaggctggccattcctgtgtatttctaagtattatctgagtattagcatgggctggtggggcttagggtaatggtagagtttgggtgtccaaaagctctacaggaaagggaggaatccagtgctttgtatgtagtaccacacagtcatgagtctggaaaggacttggtgaggtgagagagaggtagaaagggtcatgtacttatttccctgccctagaaaggcaagcattccaatgactttcccccacaggctggggattgtatttgtttttatggccagaattcaggggatacttcaaaggggtccaaattttattgatttcaaaacattgtgtggccaaaaatccaggtactcacctagagtccaagttggagcacagaaaagagattgtttaagctcaacctggggcctgagctggagacacaagagaaggaaatgagagagagatggccctgggccctggttctgtaacagggcagttatctcatgaaacctctgttctgtcatctgtaaaatggaaataacatttctttgtcttgaatgaaccaagggatgtaaagattcctggagtagcactttgcatcaacagatgcaagttttatacatatgcattttccttcctcccttccttcctccctctttctcctttcccctttcctttcttccccttccccttcccttcgcctcccctccctttcctttccttttctttctctcgcgctgtcacccaggctagagtgcagcagctagagtgcagcagctagagtgcagcggcgtgatctcggctcacctcaacctccacctcccagcttcaactgattttcctgcctcagcctcccgagtagctgggattacaggtgtccatcaccacgtccggctaatttttgtacttttagtagagatgggttttctccatattggtcaggctggtctcgaactcccgacctcaggtgatctgcccgtctcggcctcccaaaatgctgggattacaggcataagccactgagcccggccccagttatatgtttaaatcatgagttcacagccgggtgccgtggctcacacctgtaatggcagcactttgggaggccgaggcaggcggatcacctgaggtcgggagttcgagaccagcctcaccaatatggagaaaccccatctctactaaaaatacaacaattagccggacgtggtgatgggcacctgtaatcccagctactcgggaggctgaggcagcagaatcacttgaacctgggaggcggaggttgcagtgagctgagatggtgccattgcactccagcctgggcaacaagagtgaggctctgtctaaaaacaaaacaaaacaaaaatatacctgggtatgcttgaacacaaacactgccataccgttaaaaatgttatatattaatatataaataaatatttacatatatgtatattagatatatatgtaaagatttctactcatagtacggttcttttaattttttgttctgtttggacattttctttctttttttttttttttttttttaagagggagtatcactttgtcgcccaggctggagtgcagtggcgcgatcttggctcactgcaacctccgcctcccgggttcaagcgattctcctgtttcagcctcccgagtggctgggattacaggcacccgccaccaggtctggcttttttttttttttttttttttttttttttttttttttttttttgagacgaagtctcgctttgttgcccaggctggagtgcagtggtacgctctctgctcactgcaatctccgcctcccaggttcaagcgattcttctgcctcagccacccaagtagctgggattatagcgcccgccgctatgcccggctaatctgtatattttcaagctaaaagctggggtataaaaaaataagggcaagtttacttccatccaactgtgaaggttcacgggggcaccgtgagaaggttgccccctgcgaaggttgcttttccacggttctcgatgcgttccccaaatttctcttccacctcccagtcgatatcggaggccacatcaggtgtcaccgagtcccgggcagctccctcaggcagcggcaggggaagatcctgaggggcacttgggacgggccccgcccctccgtgtccccatctggggctgtcaggggtgtggctagtgctggcagaaaccaatgggagctgaggaggtcgcgtgtttgcgcggacggggcggggcggcgcggggctgcgtgcaggctcgtgggtctgccccgcccgcgacggcattttttccttttctccagcggcctcaggttcttgttacaactgagtccgggttggaggaggtgtggggccgctgccgccaggtaagtcctggcccgtgcctcctcctgccggccccgctttctctgcggctcctggaacccgggcctggggtaaggttgggctgcgatttccgaggagcctcctttgcaaccgggcgtgctcggggctgcctgtgctctccacttcgcaggccgggccgggctcggcggggcgcgaggttccggggactggggacagggctctgcttctcgggctgctgcctccttgggtcgggccggtgccgcggggcccccatcgctgttggcgtggggtgattcctgttccagggtcattcagatccgagtgcgaagcccgtcctggcatctccgcgtctgctaacgagccccgggcttgcaaccctgcttgtgcgtccctcccactcgtgcgttcattcaaacggcagcctgagcgcccgcgagcttcgcactgtgggagagggcacaccacattcggaatcgctcgtggcacacaggctgggaggaacttgcctggaaagttaatgtacctctgggttttgaagtctttctaggtgcactttcatgtaaagcagttgcagtgattagcatttttgttctgcgcaagagtagcaaacaatgttggcactgccctgcggattcggcttgcggtgctacttgggtagtgagaaagttgaaaggcatgaatcttgcttttggctttgccgttgcgaagctttgtgaccgcgggctcagttaattaacgtgaaacgagatgataatttcgaagatttcttttaaacccggctttttgtaagtctgtgatgagcttagttttccttctgcacctttaaaaagaataggaaataggaaaagttcatgaaagggcattattgaaagggcagtcggtccagcaaggaacaataaatgtatgagagcacattaaaggctgtgcaattacagttttaagacttaagactaaaaagggaacaggaagtaaaactgaaagaacttaccaa

SEQ ID NO: 6263 - DNA, 6000 bp, Homo sapiens
tggatgaagaggaatgaaataaatataaacaaatttccttactgcaggatctcttacagcttttaatatgcaattatgcactgtatatttctaagaggagactataagatacagtaatgttccagacttaattggtcaaggaacctttttttctcatatacattgacatatgtaagacactacagtttcagaaacccaataactttagcctggaaaaaaattcaaacaaaggctacaaataccactgaagtcattgagaaaatattaacatctaattttaagcaatcactttctagtgaatcttccaaaatgaactagttataaaatgtattcctatatatggtccaattaagaactagagaaattctgcccaagataataaatatagttctggtattgttaaccttaaattccttctggcagtaattagatagcaaagccagatgtatattgaagaattctaagcttatggcaaggaagcatcattcatcatcacatagacaacacttatctgttttgtgtaagacatccaactcacccagagatgttattcaaggcattaatacacagctaaagatgataggtcataggttgagctccccaggaagctgactctgtgactgatgtgtgtgcaagagatttgtgtggggcgagctctcagatcaacaccggcaggggagcaagagaagccagactggacaaggggagatatttaacttggatttgacacaacaaaggcctcagtgaatcccatagaagcactggaaccaaagttcttcagccatcaggcaagagggccagccctttatatcctcacaatggaccagtctttgcatgctggctgccacagagaaggggcatgaccactggcaagctggcttccttggctgaggggagtgttcacagaaagagtggagagccagccaccaatccttccagcagcagggagcccgagtctcagccctgaagcagaagctgggcgaggcatcacggtgcgcactacagcagccaacacacactcgtctcaccaaactcacaggggcatctgcccagcaagaaactattcctacctaatctaaccctcatgctattaacctagaagctctgtttaagaatcaggagcctagattatgcccctactgctttgtccataacaagtattcataaaattgcaataaaaactagaaataatcttagatggtagccaaaaaaatatttcccagtgtaaaccacataataagaaacactgattagttttggcatgactagaagcctagctgttcttcatgagaaataatggactgagatcatcagaattctctaagagctataacaagaacatctataaaatttaacctcagaaaacttttgaataacttcctgacactggagtattttttatattacatttccctctgctatctttaataaaattaaattggtatcccaataaacaaagtaacaagaaaaaatgagaggttctaagtttctccctggttctcctttttaataatcaattcatcttaatttatgctaataacaattcagtcagaacacatctgttgaggaccttccattatgagataccatgcttagataccacatgtgaggtttatgaattgcatctgggtggataatataatagtataagatagatgtaatatagattacatctatattaagggtatggaaatgaagttcaacatctaatagagaagacagacatttacacagatgtcatgcattcattcaacaaacatacttaagcactatgcgcccagctgttaacaagatagacacagttcctgcctttatgaggcttacatgagacatgatgtgttaaaaatagaaggctgcagaaggtgctatagtctttgcctccactgggaaggagggctacagaaagcttaggaacagtaaacttagtaagaataatagcaactaacctttattgagtgcttaaaatgtgccaggcaaatatgtaaatttatttggctttcacgtcaatcctgaggtctttttattattaatgttccctacttgcggatgaggagactaaaacacagagattaggtagcttaatcacgcttacagatgtggtgagtggtaggcctgggatccagagctgctctggaactaagcacgaatttgccagatggacacacacaaaaaaggaatggtaagagcactccgggcacagggaagtacaagtacagagacataaaaatggtcagaaacatgtaagttcagtctgcatacaggctgactgggagagtaaccagagtccaggcctgcaaagtggggcaagcagggtacaggtagatgaagaaaagtgttatgtgccccacaaggaagggactgcaggagtgtaggcatgggagtgatgccaattgtgtcattaatatcagtaagaatatcaataggaatgaaagtggctgacattacttgagaacctcctataagccagacatgggccaaatacttacacacattatctcagtttagcttcactacaatcttatgaggaaggtattatcccattttacaagtgagaagactgagctttaaagggagcaactagatgaggcgaggttctactgtttatgagtgatagagctaggatccaaaaccaaggaactctaaggtctgtgttctccgctgcctgctcgccagcgtgcatatttaacgtggaggggtaggagggtggcaggcatggcagtgaggggggcactaaggcacccacccaggaaataggtggctagatctcgaccacagggtgccagctgcaggctgcaggagaggacatgtgagaaacacgcatacagaggtagcaccggagacgaagtgggatctggcagcgagaatgaaggaagagtcgcggataacagcagctgtctgaagaggtggtgattccatcatgcaagccaatgggtaggaacaagcactgagagccgggcagggggatgcggagtgagggaagatgctgaggtcaaggtctcccaggctaccatggaaggagccaatgggcagctagagatttaggtctggaactgagagaaataatcagctatgaaggtacagacttggccacaaacatattgaaggcatgagagtggttgaatttgtccagggagaatgtgaagaacagaaggtgatagaactgtagcaaaacccaactattgaggaaaatattttcatgcctgcaaaaagagagagatcgaactgcctcctttagaaacctacttgggaaagggctttctttacaagtaaggcaagttgtcattactggtgggggaaaaaaattggtactgcgaaaccaacttatttcctaccacatgtgaggttttgaataatatctgggtggcatatttctgctgaagaaaataagccagttcaatggtgtatctattaaataaaaatagtgctaatagtttatcagagttatcaccacagacgtgcctagccaccctgagcctatgtggccaatgtcagtaattccactctggacacaaacactgttggctttggatggaagtgccggacactcacagcactccgaggacatactgttttctagccttatttatgttctctcttcacccttcagcctaaaaaattaccacagtgccacttacctaccttaatgggaatctgcacaaaaggccatttctccagtttctctcaaaagcaaaggaaaacttcccaatattaatatgtagcaaaaagagggagaagaaaaagcctgtttggtccgccctcctggctgttgctaccttgcagcttatgacatacacatagagggaggtctgatgaaatgaacgagacagtcagagagctactccattcccgtggaaaccaggagtcccttggtgcagacagctcttcctactttcccatgcagttcttttgtgcgactttgaggggctcgtgaatgatttctaaatgtgtgcctgctgaggcgagccgcacagggagggaggaacccagccgagccgtgccagaggaagccaacaggatcctagcagtgcgggagctggctcagctcttgcatgcagtttttgaagtcagcaaaacagaaaccaaattactatcatattatgctggtggaagatcaagaagaggggactctacaccagtttaattactgtgagagatgcagcgagtcacagaataacaaatgtatctcatgtgtggaccctgaagacaaatgtaagttctcatgccgctatattttattgctgtgtaattttctttccggtttgaaatcatgcttggccaacatgtaatcatttcaatgagaatttccagggaggaaagttgtctgctaatctttacttaagacttttttgttttccttttattagctaagcaacattataggagctgaaattcctgacagcagctgtggcaattcagcttaagaatggctgagaactgtaacccaaagtacatccaattactatgggattaacactggatgtatttttaattgactttcttaatgtagaatgtgtacatccccactgtttctgattgcatgctattttaataatactgttgctaaactagtaccatcggcataaccaacaaaatgagatatagttaaacaagagtcccagtagttataaaacttttcttctttgtccaggacatttatcttcccgagcgctcaaaaaaaaccctgcaacctctatgctaaaagttcattctgcttttttgtcctcggtttggtgagaaaataataaaaccaaacagtggactctcctaaaattgtgaatgaagaaaacttacagccaccacagttcagttctttaactatcattgtaataatggaagacaaaaatccagccccgggagaacagcatgtacaccagcctcagtgttacagagtgtgggtacatcaaggtgaatggtgagcagaaactataacctgttagtccttctacacctcatctgctacaagttctggcttagacatggatattctttgtgaagaaaatacttctttgagctcaactacgaactccctaatgcaattaaatgatgacaccaggctctacagtaatgactttaactccggagaagctaacacttctgatgcatttaactggacagtcgactctgaaaatcgaaccaacctttcctgtgaagggtgcctctcaccgtcgtgtctctccttacttcatctccaggaaaaaaactggtctgctttactgacagccgtagtgattattctaactattgctggaaacatactcgtcatcatggcagtgtccctagagaaaaagctgcagaatgccaccaactatttcctgatgtcacttgccatagctgatatgctgctgggtttccttgtcatgcccgtgtccatgttaaccatcctgtatggtgagtggcattagtttcccagctatattcgcactggtaataaagagcatgtgcatgccaccagcagatgagatggggctcagggggcaaacaaactataaatagaagtctttgtttatagactagagcctactatgttacttatattttactcttaaaatgggatttcacataaaaatcagacagtctatgacctgtgatcactggagagttttgtgcttcaaaacgcgtacatcctgtgtaaaaatgatcattggagagttttgtgcttcaaaacatgtacatttaatgtagaaatttttataaattaccccatacagtcataaaccaataacttacccatcattctgaatctacttgatttttgcttctttatattcccaaccaatattccagccttcaggacagaacagttttaatctttgtcacacagttttcagcacttttaatggagtgataaagccttcccaattactttggaacatttgcagagagaacattagtggtgcaataggttttatgttaaaatatgcagaacctcaattagaataaatgaattactccagttttaattgttccctgcccagagaagctaatttggaaatgtgcctt

SEQ ID NO: 6264 - DNA, 6000 bp, Homo sapiens
tttatcctgtggctaaaaaacagggttgtaaaacaatcaaatgtgttaattgcccaaatctcaacaccctatggcagtgtttttcaaacacttgtagttgaaaatctttaagttatctagggaaaactggagttgtactagaaaatcatagcatagtttgaagatcacttgaagcattgttgagagattggcctcatcagaaaacttacaatcatctattaaattattaaaaacagaaactatggccgagccatgccataaagaaagtattctctgcagggaatttcttctacagcatcccccttccctaccctagcaaattgccatacaccttcttgaggaattcccttaaactgtggtacccaaagatgcatggggccttgtgccaaatagtgtgagaaaccataagataaggaacactttcgtgggacagcaactttactaggtggtaagtaaaagttttattggtaatacaagccaaagtgttataaagtatacattttacatattttaaacataaaatctgatttttgaggcagggtattttatggaaacattcctgcaggagtaagttagaagagcttgagaaacaaggtactcattttgagggagcttgtatttattggctagctttgcttgctacaagatcctttcttaacctgggtgcagtggcccacacctgtaatgccagcactttgggaggcccaggtcagtggatcacttgagcccaggagtttgacaccagcctgggcaatatagtgagacctcatctctacaaaaaaaataaataaataaaatagctgggcctggcggtacatgcctgtagtcccagctactttggaggctgaggctgccatacactggacccgagatcgtgccactgcacttcagcctgggccacagagttgagaccctgtctcaaaagagaaagaaacttaaatttccatcattgtaaattaactgtttttgattgggagtagactttgttatttccagatagcagaggagactcatccattttttaaatcagctttcttttactcgaacaccccttgcatttcatccattctcattataaagtcattgctggacctggttcctgtcagcgtgatgtactccaaggattccaacaataaggagtgtggtgtgactggtttctgagtactttggaatgaatgggaacattccattatctggacttttgattctattaatgtggggggagtctttcagttattttaccagcttcatcataattaggtttgtgatcaagtcacaccctctttatcatcagctctctttaacccaaatcgttgggcatctacccttttcaactctaaacataagaataaatttcatatttacttcagcctagtttttctcatgagatcacattctacatatgtatcctttcgatgtcttcagtcttatataaataagaattctgactaagcctttagaaacattcgaatactgaatactctgtcccgtgccaggtactgtgctatggcacaggatacttgtaaaaataacaggaataaaaaaaaagacaagttttgacaaatgttagaaaaaaagaggtatacaatgatacacatactagaggaaattggctactgagaaaggtgataaccaggctaatgttgagcccttaaaaagtgccagccaaaatttcactgatcgtggtgaaaaggcaggagtttattgggcacattgactggaaaagctttccagcagtgggaagagtctgtacaaagccttgtgggaagcaccatggggtatttgaggaagtgaaagaaagcaagtatagctagatgaaagattataatggagaggaggattaataggggaatgggaaagggctaaagagatagggaggggccagaccccacagtctagtaagtcataaaaaggattttggtattctatatgaagatcatcattaagcaagagggataatagattaataaagatcactagttggtaaggctaaggacagaaaacgtcctttggatttagtgatgtagaggtcgctggtcacattagtgagtgaagcacagacgagatggtgaacaggtccatgaaatgcatggaatcaagaaatacttggctgctgaggaggagttggtgatgccttagatgccaagtttggggagagagaagtatcggggatgatttctaggtttccgggttgtagtaactgatgagtggaagtaacatgagataggaaggagaatcagacattggggtggaaagtgatgagctcagtttgggttatattgagacatccaagtgactgtcaagtagggcagttggaaatactggtctggagtccagagaataggaccaggctagagatttgagttctctgcaggttttgctggtcattaaagcagagggtaaggatgagactgcctggatttggggtctggagtgagaacagggccgaggactgggttgtggagctgcagcattcactaggcatttgtagtggaagatgcacttgcaaaggaaacagaatggctaaggaggctgtattctcagaaaaccaaaggaaaaatatttcagtgctgggatgctgctgagaagtaaactacactaagaaaatgaactgttcttggggttcagtgatgtggaggccagtagtcaccttagtgagagctatatcagtgtgataaggcagaaaccagagtagaaaggactgaggagcagggtcaagacatgaagacaggggatctgatcagttttttcattaagtttctattttgctctgaaggggaggtgggccgagtggtccctaaaggatgataagttagttacaggacaggatccagagcataggtggctagattgaccatactcagtcgccagttatttaactgagcagctaatatatgccaaactctgtaataggtgccagggatacagcaataaaaaagctagccacaacccctggccttgaagacttacattatagtggcaggagattagcaataagtgtgtaaacaaggatcattctatctggtgttaactgctataaaaaatggtataggaagtgactaagggaaaaatttcttgtgttcagtgccagcattttttttaataactgtaaaatacacataaaatttgccatcttaaccatttttaagtgtgcagctcagtaaagtatgttcacgttgttgtgcaaccaatctccagaacatcatcttgcaaatcaaactatccgaataaataacactccacttttccccgcgccccccccccactcccgccccgccccacccctggtaaccatcattctattttgtttctgcaaattgattattttagatatttcctgtaagtggaatcataagtatgtttttgtgactggcttatttcaccgacctcatagggttgttgtgatgttaaataatgtaggtttgttcccggaccaaactgggggttgggcagcccaataatgaggtgcagatgaactggggaagaagagtttttatttctgcaaccggttacagggagaaggtctggaaattattgccagaccaactcataattacaaagtttttccagagcgtatataccttctaagctatatgtctacgtgtaagagtgcattcatctaaagacgtaagtgattaacaacttctaatcctgaagaccttcctctggagcctcagtaaatttacttaatctaaataggtctgggtgctgggatgattacccttattttgtctcttgctaaatcatggaggcttgtggaattcctccagactcccaataaacttgtttttggaggcctggggagtttcttcagacccccaataaaacttgtttaatcctaaacgggtcctgttaaaaattccttagttatcttgtcatgcttcaaggcccaagaaaggcctaggcaaaactcttggtgggcttttgttacattccagactttggtatatgggcactgactctttcagcttttaattttttttttgttttttgagacggagtctcgctctgttgcccaggctggagtgcagtggcgcgatctcggctcactgcaagctccgcctcccgggttcacgccattctcctgcctcagcctccggagtagctgggactacaggcgcccgtcaccacgcccggctaattttttgtatttttagtagagacgtggtttcgccgtgttagccaggatggtctcgatttcctgacctcgtgatccgcccgccttggcaaaaagtgctgggattacaggcgtgagccaccgcgcccggcctcagcttttaatatttaatttaaccactcagtgctgaagcagttgtgatggaggcctgcgatagtgaaacctggcctgccacaggttaaacgcatctatcgccaagccaataggacttaccgctcctctcacccacccttctacttttctggatttttaagaaatggaaagattgtcagagtaggccataaaggctttaagccggctggtggctgaaaactcccttggcccccagcctccctggtaaggcttgctgcagcctaattaaaaccttttgcccctaaaattctgccccggtctactggcaaaatttccactacctaggcttcactttgtggcttaaagtttgagccttgttaaaagcgaaacaacatcaaaaggtgtggccctattaccaatcctttgggctcggtttgggaacaggtttggtcgaggcggttgcgcaagttggtgagcacgttccttctacggaacctccatgggcggcacctggcaaaaccaccggactcagcaggctggccagggtgcgaggcgggcacggaatcctcgctctggccccgacccggccggggagccccgtccctccccggaccgccttggccaatcagctccgctcctccttggccatccggctccgccccttcccggccagccccgccccgtcgtttctctccctgctttcctctgccgcatggtcctgggccgttggcgtcggaagcctgaagcatgggcgctgagtgggagctgggggccgaggctggcggttcgctgctgctgtgcgccgcgctgctggcggcgggctgcgccctgggcctgcgcctgggccgcgggcagggggcggcggaccgcggggcgctcatctggctctgctacgacgcgctggtgcacttcgcgctggtaagtgccatcgcctagaccctgcactccccatcccagagagtgggagcgggggcggcaaggcggggtgagggggtcctgcggctttttgcagcgagctggccgcccctccccctgctgcaggaagtctgttagctgagaggcgcctggaggccgcggcggccggagttctgattcccaggtctgtgaacagagcgcagcttaccttgtgctgccgattcctccaccaaactttaaaaaaattctgtacgtgctatgttagtttagaagatacctcagcttcctcggctttgtaacctgcacgtaactgttgaactggacataattgagagtagaattgaggtcatttttaaatgccccagagggggcaaggagagatgcttgctccggaggcagcaaggctattgtcgcaaaacccgaagcctttgccaagacaaacgaaacacccgtgtctaatgtgtgccaggcgcattactgagtttaaaatttcagatctttacagcatccataaattagttattattgttccccattttacagaggtgaaggtaggcgctgcaaaattaggtgactttccagtgccacacagctggcatgattctgaggcagtctagtctggctcccaagtttgcactctgtgtatcagtcgaggtcttaggaaatatgtgtccttagagattcaacccattttataaaatagccaggaaggttgtgtttaaggcatttatattgaaatgccccgccccccaccacacacgcgcacgcacacacacacacacacttttaagttttttttaaactatgcccaagtatcagtttgttttttttttttt

SEQ ID NO: 6265 - DNA, 6000 bp, Homo sapiens
aaaactctactgagaactcctttttgtcaacatctgatctcaactagcaagtaaggtaccaaaaggttttgaaatgacatgagggcacaaaaattggtggaaccctcaggtgaccattgtctctttcctctgggatctatatacctaccacaatacctattatttccagagaggaatgagggaattggggagacagttgtcaccaaagcaaagaagcagacaggaaatgggagagttatttttctttctgaacaaatccctcgcctataaaataagaggtttagattacatagtctttgatgtttcttccctgtgctttaaagggaaataaaaactaacatgtgttcctaagcacctgatattatatcattttacacagtcttcaaaacaactttgcaaagtactattattatacccattttgccgataaaggaactaagatacagacaggccgggcgccgtggctcatgcctgtaatcccagcactttgggaggctgaggcaggatgatcacttgaagtcaggagttcaagaccagccttgccaacatggtgacacggtgaaaccccgtctctaccaaaaaatacaaaaattagctgggtatgtgtgggggtgcaggcctgtaatcccagctacacaggaggctgaggcatgagaatcgcttgagcccacgaggcagagtttgccatgagcggagatcacgccagggcactccagcctgggcaacagagcaagactccatctcaaaaaacaaacagaaaacaaaaacaaaaaacaatacagagagaaaataatttgcacgggtcacacagccaatcagtgtaatgatcagatttgaacccaagcaggatgattccagatcctgcagtcaacagctgcgttctgcttcttatcaggtaaagcaggtctcccagagtgacacacagaacacacaaaatgaagagtggcccaagatctggaaatgatccagggtttgtgagcatctggcactggaatcaatccaaaatcaatgtttaaataacagttaccttcacccccaaattgtctcattgtctgactgctgaatttgaatcagggctatggagaatgctgctttgtggtttactatacagtttaaaagtcaccatgcctatactgacagcccaacaaatacacacacagagagagataactttaaaaaaaaagaaaaaaaaagaatttggagtgtagaaaacagcttggttgcatttctagtgcaccaaccccagaaaacccagaggcttcagaatttgatgagatttttgcaaagtgtgttttcactacaaaaatgaattagatgccccgaagagcttcctctgttctttgcttggccaagcacttgctgcaaacttccctgaggggtttacccaatggtgagcctgtaggaggaaaaaccagggccctgggcttatttttaaaggaaaaaaaaaagtaaaagtttaaaaaataacccctcttcatccatccttagaattacactttccagtgaagtctagtaccctttcctggtagatataatcctaattaaaaataaattacatgctgtatagaacttgaaatggacaagataatcctattacatatgagaatatatcctgattttctttcccgctaaactgtgggagatatcagatcagtctgagccccccattgtcgcctctttgaaaactttcctggagccctaatccatcacgtgacgcccatgtcaatcttggtgtttgcacgcgagtttcacaatgccggcattaggctcggtaacagaaacccagctttgcggagcccgcaacatttgcattccgagaaaacgccggccattgtggagctgtgtttgttctcaagattgcgagacagttgccggcgaagttgctaaaaccgagagaaaggggctcctttgggcctgcccagaccttttggtatgataacaaggcgattcgagcggcttttgtgaggcctgatcagcacccgggcgggcgagctcccctccctttcccctactcctctccagcgccacctccccggacatattttccttcccggggagttgctgcggacgttgatgtgctattttaaatcgtatttccataatcgagtggctgtccgctgccggcccggagctcacggtgttcgcgtgccttcacacctccaccgccggcacggaaagacctgtgcgcgccggtggcggctggaggctcgcggctcccttcccgggctccccggctcccagctctcagcctcccggcgccgccgccgtcgtggctacttccgatcgacgagggcctggccgcggaaaaaacactttagacctgctaccagccaccctacacccctcctcccgcctcctggcttttgcctgcccctactcccctttccttttcccactttcaagcacgccttggtttatttcagccttgagaatgagcatgctgacgcggaagcactttgagtagaaattgcaagtagttccgaatctctggccaagcgaaaaacccaaacttagcgcgtggcggggctcccgagtccagcccagaactgcggggtgcagatgcgcagggggcgctggcgcgaggtccgggtcccagccattcgcggccgggctgtgctcgcggaaaccgctgaaatcccttcctttgggactccggccccatttccacccactttccccaccttccgggtcctccgcccggcagcagcagcgccaggcgggcctgaccttgccctgggtacgccagcggaagcgctgaggccgctgtccaccagccaagttctgaacctgttcccgtctgggtctccgggggaagaggggtgaggagagatgacgttagcctaggggcgctaaaggtcaccagccagccccaggttggggtgggagtgttgcggggctcggaaggaaaatagaaagttccttcgactgcgtgtaccccccaaggaatatctcttgggcggggacggtgggagggctacatactaaatcgcacttgggagatggaagacagcggaagaaagggctgcgatttgggctcctgtagggggcgctcctccttccacgtccccacgcggctgcagatgcctggccttattgcttttagcattcccaagactacaaggtggaagaggtggagaagggaacccagagacacacccctctgaggaagtctccagccactcatcatccccctccccagtcttataagagcttgtatttatggatggctggagctgcatgttccgctctctgacaattccaagcacctctcatccctgccacccagctccctgcttggtctccctactccaaggaaactcctgaccctcttctgaaaaaaaacccaaaacacactccctcgagtttgagggaaaggaaaacatggataggacgctgacagcaggaccaaaatcgggattctgaagaatgtttactgaattcaatctacttaccaaacctatcgcctaaaaagaaaaatttcttccagtgagtggcttttgttttttacctttcctccttcgtgtgtatttgcatagcctgctcaataaagcccttcagtaagaatcattaagaatccgtcttgttgcagatccgagctccatctccctggccgtcagggatgggagggggctatctgtggggcagcgcagcgcccggccagccccaggatccgcccagcccagattttggcagtgccgaagctccacactttcctaagcagatggttaagttccccccacgttcctgccaggtttcaacgtcacgctgtgattttgttcttctggaaccggacgagtgttgcttcccagagtggccctattagaacagaaagaaaatcctctaaataggcggaacaaggcatcaggaggaaaaagttctctaaatgcactttaatacgagccgggtattgtgtggaattcagcgcccatcaccgtttagccggagagttatggcagtgattggggatgaatagaggaacataatggatacatgtggcgtttgctcattatattcaagttagtccaactccgctgtggaaactgttcaactttctctccccttagcttgtcacagtgaaataatacagacattggggcctccaatgggatcgcctgccacaccattctatttccactgctaacgagggcttcataagcctttgatacagtctgatctttgaaacctttccaaatctcctcaagcttatgctaaatcctatttggaacttttttttccttgcctgctagctcccagggcttaagaaggccacttggacagtgacgtgcatactaacatatcgcggggctcttttctgaaagggaagtggcagctctgatcactggggctcacacgagcaaaacacaattgagtacacaaatttgaataaaatcaattttcccttatccttcaggcttcttaatcgagaggctattccaggcaccgtagctaggagagaaggaaagcagagcctcattcagcagagcaagtctgtgggtagggggctgcaagggtttggaagcgtcagaggtgcaaaatgcagagtgtgtgtgttggcaggggctgggggaaggcggaatcaggagccactggggtgaaaccccagcgtgttcgcacttagttctagccgcggcacggagggaggcaggcgacaattaacaaaaccatccgctccttttactcctggagccctgtgccaactcctctacatgcagggtgctgacaagaaaagggggaaaaagcaaaaggagttaaacaaaagaaagattccctaattttcctttcttgttttcccctctaagcctttccacattaaagggattgtcagaggcaggcggaggggcgacgcgagggggaggcggccattggctacccggctcgggtgattagcatatcggcggctataaaggcaaaggcggcgcgaggcggcgcagcttctgtaagagacggagaggcgcagagtgagggcgggtccgcgcgtcctcagagcccgctggaggctcggagctgctacccgcagacttctcccgcacagggctcgcaaagagcgtgattccgagagcctgagactgacgcccgacctggaaaccagagaagacttccttagcctttcggatcgcacttgaggctggaggcatgagtcctgtgaggcgttggggcagcccctgccttttccccttgcagctcttcagcctctgctgggtgctctcagtggcccagagcaaaacagtccgatacagcaccttcgaggaggatgcccccggcacggtcatcgggaccctggccgaggacctgcatatgaaagtatcgggtgacacaagcttccgcctgatgaagcaattcaacagctctctgctccgggtgcgcgaaggcgacgggcagctgaccgtcggggacgccggcctggaccgcgagcggctgtgtggccaggccccgcagtgcgtgctggccttcgatgtggtcagcttctcgcaggagcagttccggctggtgcacgtggaggtagaggtgagggacgtcaacgaccacgcgccgcgcttccccagggcccagatcccggtagaggtgtccgagggtgcggcagtgggcacgcgcatccccttggaggtgccggtggacgaggacgtgggcgccaacgggctgcagaccgtgcgcctggccgagccgcacagcccctttcgcgtggagctgcagacgcgagcggacggcgctcagtgcgcagacctggtgctgctgcaggagctggaccgcgagagccaggccgcctacagcctggagctggtggcccaggacggcggccgcccgccgcgctccgccacggctgccctcagcgtgcgcgtcctggatgcgaatgaccacagcccggccttcccgcagggcgccgtggccgaagtggagctggcggaagacgcgcccgtgggctccctgcttctcgacctggacgcagccgaccccgacgagggacctaacggcgacgtggtgttcgcatttggcgcccgcacc

SEQ ID NO: 6266 - DNA, 6000 bp, Homo sapiens
ttttacatgtatacattgggagatttaagttagccacacagcttagacaagttatatccatgtgtatgtatctatttacgaagtagtaatggactaaagaatcctttccttcgaaaaggcatcatataacacatctatgcctccaattttttttattttaaatgagtgataaatgtttgttgaatagaaatacatttaaatgtgtgtgggccctttattttcccattctgatgagaaaggcataccagagtagaaagatcacatattttgaaggtcacagatcaggctctggactagcatgttatgtatggctataaagctggtataataataactatattataaaactgctgtgaggattaactaaattacatatgtcaaccacctagtagcatgtttgaaacataattgacactaggtaaccaatctatcatttctcaggtattttattggtttttcaaatgtaatcatccttttaaccttgatgattgaatcaaaaaagaatacagatataatatttcattgtatatatatttattatatgttatatttatatgtggtatattttacacttttacatatgtacctatatattaataatatattttgtgtacacatgtacatatattttaattcatcaaaagggacttctaattttaaaaattctattaagacaaagagaaatggccttaaaataaggtaatattctaaacttatatttatttgcaattatgaattaaccagaacatgtacacggttatggttcaagatagttttaaatatctgtgtatatagtgattacatgaaactttgtgtataccacaatattattaaactaatctaaatagtggaaatagatttaattgagaaatacaaataaaactacctgtaaagcatagtgcttcaaaaattttttttaaagatttaaaacgtaaaaagtttacagatggtatcttttttcctcatcttttttttttttgagatggagtctcgctcgctcagtagcccaggctggagtgcagtggtgcgatctcggctcactgcaagctctgcctcccgggttcacaccattctcgtgcctcagcctccagagtagctgggactacaggcgcacgctgccacgccccggctagtttgtttgtttgttttttgtatttttagtagagatggggtttcaccatgttgcccaggctggtcttgaactcctgagctcagaccatccgcccacctcagcctcccaaagtgctaggatttcaggcgtgagccaccgcgcccaggcaaagatggtatcttgatatatacttataatcttgctcacatctttgtagtggagataataaaattacaaaaagaaggcttgcagtaaatgaaaaatagtatgttttagtgatagaatgcaataagtaataatcaagttaacccgtgtatcagcatgcagtgtctgttaatgccagatatgaggtaagcaatttcatgcatatacgtgcatgaagtgtgtaggggtctttttttatgaaattgaaacagagaagtttgatgacttgtctaaagtcacacagaacttagcaacaacccagagaatgtaatccactcctctggctcagctcagtgcaccgtctattgtatcctgctgttttccttgtctataggaaaaataggcttgggaggcatataatctaactattcttctagatcgatttttacaaaacatgtgggaagcaggcccagagcaattgagacgtctaagaagttcataagtattattttcaagggactaatagcatagaagctttctgagtcatcgttagaaatatgtgacaccagaaggtaggtcgcaggctggcatcataaggaataagagtttgggaatgctttcacaaggcccagagaagggatacatgggaagaaagatgtctatttagtcctttttattttatttaagcccaattagggtataaacattgtgtaaaacctttggattttcagagaggaaagataataacaagtagttcagtgaatggtttgaaatgcgacgtggaaggtattgttcaatattatgccaagatctcccaatcttgatgacaaacttccatgcagggactttgcaatcaccgtagtcacttaaagcaaatgtggttgttagtgtcgttccaaacattattttcaagatgtgttcaatactagtgtttcaacttacatgaagaacttttgctataattcatgtttatggtttttagaaacactctagagaataattatggccaaatgggtatatttaatttcttttcaacttaataaagggaggtgtggtaataaccctttccacagagaccagctgggtgatagggtcagaagacgaagattctgctggtgtaggctgggggaaacactttaaaaaggaagtgcatctgtactacaagcaaccactgcaaagtagggaaagggagagtaaggggccagggaaaagtaaaaacttgagatataattacaaagagaaaatgtcacttcacctggactatcatcataaacaacagctcctgtacaatgtccttataacaaaggaaaaatgaagaaaatagctccctacgtttccaccaaaaaggtggatgatcttaacttgttgcagagggcatgagctgtgagcggataaacagcccactctgctgctctgtctctgggggagaattgttgcagactgcaggttctctgactgctgacagattgcctaactctggccgtgggcctccaacttcgggaagctgtgggtattgtataaagatgtaagttaaacacgtttcagaagcagcttggtactgatttggggagtcaagtatgtttcaactacagacctcaaagtaaatatttactaatatggcaaaagttcagctgtagggcagaaccagcagctaaaaagcacaaggagggagatcatgcttccctggctgcagcttgtttaccaaccttcaactcagatgtgcatgttcctttgagtgtgtgtgtggggtggggaggaggtggagtgggagaggggtaggggggtgaggggtggggtgatggtgattgggggctgaggtttaccacttcatcagtgctccattttcactgtaaagggtttgaaggaactgattttaccagccaggttcaaattgtatgccaaatttgtattatagagagacttgtgaactccatgtacagccccatttgcacaataacaagctgttaccctccaggtgttttgatgtagtgtgttgtccatatttaggactctgtgtttaggattattagaaatgaggagaaaataggaaggataggaagcaaaacagttagctcagccaagcaatttatattctagttagcatttggtggaaggggaaaattgaagtagttcctacagaaagcatatggaaatcaggtatcaaagaccttttttcactctaggctcagtcactggtcattcagcatgtgaggttttatgttcaggaccctgcagaggatatctggaagcctagcgatgaagagaaatgtcttctcaaggaaaggccgaatcatgggcttttccattacttacatggcaacctgcagatcaaaaagtgtttcagaggcttaatgcactggagtatcccactagccttgattttataaatgaggaaacagaaggccaggagttaggtgactccaggttacatagctattcagtgtcaaagccatagaagataggcaatcatttggcaccacactcttccacaattcctttatgaaggaccagttttccagtaggcaatccaggagaaagaaagagagagagaaagggagagaggcagggaaagagggagagagtgagggagcgagggagctagggagtaagggagggagggaggaaggaaggaagaaaggaaggggggaaggggaagaggggaaggggaaggaaggaaaggaaggaaggaggaaagggggagggaaagaagggggaaggaaagaaggaagcagggaagaggaaagaagggaagggggaaggggaaagaggggagggggggagagaaggaaggaaggaaacaaggaaggaaggactaatttgaaaaataaccaatgttttacctaggcttcagtgaatacctccccctccccacaccaatttaccgcttagataaatatgtttaagattacttgcaggcagaactacttgtgttacagcacaattgtttctactttccccttggctcttccccgcatccagaagccactactgcctctaaaataagaccacaaggcaaacacccagagacatttgagcctccaactaggaaactagcagaagctctaccactgcccacagcaaagattcaaaattggggtatgtcgaaaccttcactgaattcatatatttacttttccggttcaccctacgttacacagaagttgagattccttccctccgctgagaaaagtgcattttctttctctgtgccaacactgctggatccgaggctccaggaggaactgttggcaaagcaggcgttttgggaccgcgcctgtgattgctctgtggcgccgacttcctctctctgttacatccatatacaaatgcaagcttatttatttattttaattctccctctcttgctagcaacctgtggacttggcatctgactggtgcggcaaggaaggaggctggtaggtaagcgctactgtgcccaaccccgagctgcctcttcgcagtcttcaggagcaagtcccccattccagctcctctggcagagtatggagttacctgcgtccggggcaggaaaccatgaatgtgcccttctgccctcttgcctttctgccactctttgagttcccgtccttaattgaagagccagtgactattggctgaagttcccccagcgatttgcatgaaccgagagggagtgtcttctgccgccctcccttcaagagcgctctgactgcagcctcccagggaatgcgcggccgagggaatgcgcgcagctcacaggccctgggagtgagctggtgcccggcgacctggcacccgcgcctggatatggggcgtctacatcgtcccaggagcagcaccagctacaggaacctgccggtaagggttagggtcaaggaaccccgcgaccccgacaagttgcagtattgtgaagcaattcccactcggatggtttttcaaaccttctacctttatctaaacttcacgggaaggatggcgccgggagggaaagggagtttgggataatgtgtcttccttttaacaaggaatagggaagtccgtgggtcatgagaggaagtttctgaagcaagaaatgtatccagataaggtcgagggcatcgggggtgcgctcaatccgctttagctacaggggttcgggatcgtttcctgctgctggcgtctggctatgaatgcctactgcaattgacaaattgtttttgcatagccattttccgcgtttactttgcttccccctaagggagggggattagtgactgcttggtaaggggtggaaatccagatcctttcggtttgatttcagatgtgtgctaaaataaaaatcactctttccgacctaagacctaaagtgttggaggtggaggaggaagtgttggtattttttctatattattattattattgcgattgtggttgtttttatggttctcttagtaagggatgtaacacactgcgtgttccagcactctaatggcagaatcacttcaaggagaaataaattgcccacctttcagtgctctctactaccagccccctccctccccatcacctaccctgggtttccgtgtcgctttgcgcagtctctgagtcggaatcctctccactccggtgtgtgtttccagggatgttttacggtttgggattctgaatgttagctggatgagggtggtgatggggaaacgaggggggaaggcgggggcggaggggatagaaagtgaacagcaaaattaagttttggagacgatattgccccacagatctctccttcg

SEQ ID NO: 6267 - DNA, 6000 bp, Homo sapiens
aaattggacttctagaagaatatcatgtgagtttattaaaaaaaaaaagacaaaaaacattataagaatgaagaagggaggactgaagaaatagggaatgaaagttcccaaaataatgttatttcaggtaacacaaagttctgttttagggaacatactattttgaataagaaagtaatgaaagagaatttttaaaacactgtaatatgtttattaattcttaaaacttctcatacctttttaaaaaactgtttcctgaattatttttgggcaaatgctattgtgcttgaaatgcgttcttgcctcaacattttcttgtctctatttttaagtttaaacagaggtgcttccaaaaaatatgcaaggttttcttacgtcttcaggcatttatcattttataaatgtaatctgaatagctaatagtccatatttcaatctaacagttcttaccttacagattacagaaataaatgtcataaagacccaagaaataaaaagattttcacattatatttcactggaaattacatgactttaaagtaatcaacttatttaagattaaacatgatgtacgtttattgtttactatcttaaaacttttttctatgttttcctacatgattgcttaagccctacatgtgatgcagaaaaaatctgttatgaaagctatgcctataaataatctgaaattttaaagaataataaaacttaagaattcaatattttctttatttaaatagtaatcatgataaaatagtggcactggaaaatgtcagtttatattgtgataactgttagagctacaaacctgacatttataatccttgtcagtcataaaaatatagcaaattgggataaatttagttcagtcattcaaaaagaatgaaggttgtcacctgctttcctttgtgatttgattatcatggtctaggtttttctagaaaagaaaaggtaaaaagatttttaaaaaggggttcaaaatgaaagagctaataataaatagtgaagcaacagaattattcaaggagcttactatactttgccagtttgcatagccttaaaaggtgttaattttctttttgtggtgttaaaattctgcattgtcattttctaaacagtgataatataaataaccctgagcatttttagcacaattttccccagaagtactgtagaatagtctagtcttttttgtgaaatggggacaataatgcctgctgtgacatgagagcccctgtgattgattgattaatgtccgttagacataataagacacctggattaaaggagccttagaagtacaggccacaaaagtattttttatattatttttaactatgattggaatatagaactagtatattagagttaaaaatattagtcttgaagtccttgtggaggtcatttcatcattctgaatattacagtctgtcttttctctaaatgtaacttacagaaacagcctttacaatctccgtgtgaaatgtagttttaaaatgctgaatggtaactagaaaatcctagatgaaaatccaattaacaaactgaactgcttaataatttaggttattaaatgccattacatggaaatcattgtttaaatatataaatagaacaatattaaacttgtggaacacaaaataattttattaactccacatctgtttgtgtttaaatctgcaaaagcattttagtcttcagttagctggctgaaggtgacttagcttcacaagtatcccatgacctatataaccagcagaaaacactaaagcaattttactatagctcaaatggcgtaattcccattagtatcctgatgctactaatcaggtacaacacaggtgaaaacatcataattccttgcagtagaaaatacgctttgacaaagatgaataagggttaactaaagagatctaattaaaagtctaatatatatactggaagatcgatattagaaatctaacattttattaaattcactaaggaaaaacaatgataaaacacagcataaaaacaaataggtgttcccttacaaaaactgaaattaagaatattttcctgattcataattacacagacctaacttaaaaaattaatattggagaggtagattatgaacagctctcattatgaaaatgatttatatagtgttttgggaagaaaccttaagttgtgataacacagggttaggaatatgaccctttatatttaattttcctctaggaatattaataagatctctaataatagttctcattttagagtttagaagtcggattattatagggcaaaccagcctcaactattctagatttaagaggtaaaactgagaacattaaggaatctcagtcgttcagataatgccaaataaacacctaaaggatataatgccctgagtccatagctctatttgtctctgaaactccatctcctttgaaaagaatctagacatatttcattctggggctttgacctgtggttttctttaattgaagtctcatagtcattaattgaatcatgtgatgattttttttttctcttctctaaccttcatcttgtgttcaaactaagatttcatttatgagcaggaggtaataatgggttctgccaacacgtgaagctatccttagcaaagagaaacaactccgtttaataatgatgttaaataattattgctaagctatgtgttgcgactacaacatgactttgaaatgactacggtatgattagaataagaatatgatataactgtggtgcttatgaaatgaactggaaagtggctgtgctgctatgtttattgtaaatgtatcacaatgatggttcatttatttaaaaacagtgcagtgcataaaataggtgacaattggaacaatgtactagctttaattgtagattttgtgaatggcaaaatgatcgtttactgtggtaagataaaagaatcatcctttcattcactgacattattctgtgaggcaatatttttcttttcactttgggatacttgtaagtcctttctattcttgaattttatatattctaatcatacaaaatattactataataaaagttgctttgctatttaaaaaatatcagtctattatctgcaaggaaagtattttatattttacatataagggattaatggattttacagtgggcttttagacactgcagttgaactgtgaatattaactcagaaaagtttgaattaaaaagagcttacaatttcatgttggaaaattgtgatgtcaaattagttggttaaatcatgtcattatttattcaatatatggcttagtaagcttgattggtgtttttttttttttttacttttcatttaaacgtctaaaaacaaatgttacttaaaaaagaaaaaaagcaaacaaaactattgtactcaaaaacaaggggtaatctccaacacgccctcagtcaagagcttaagtatgtcaagagcctttaatgcctaggcagcccattatagaatggggaacacacaggtttaaaataaatgccctttattcttcctgtaagttagaccaagttattcaatcatgtactaagaccttctctgacaacctttataggtcattcagaaaataaatttttgttccaagtgaactgttcctatgttaatgcttcaaactttactcaggtatcaggcgttaagtacaagccattacacaaacctttgtggtttactgactttgaaagatcaatcaaatatattactagatagtgctttgggggtcagtatttgagaaataaagctgtattttttggggagtcattccatccagttcccgtatgaaaacgagaaacttgtgaggatttagtacagagctggagtcggagaaatgaaatgcacgggaaaagacgaaaatcacaggaaagaaagttggaatcagcagaaagtgcctaggggaaaggaagtgttccacagcttgggaaacagctgcctgggactccttccagcccctcggaagcaaagttcgcagtgaggtgggctggaagcgggttttgcagcagccgcgagtccgggctcaggtttccaggcgcggctggagcagaagtgcagggaccgccacgatccaccgccgcggccggtcccgctccgctagaggagacttcgcacgcgcagccgactggcccgggctgaccgaggggacccagacgctgccactttctctttccaaggcagtttccgtggctctgcatgtaggaagtgctccgattaattttctttccggtctccgcagagattccaaattctgcggtccccacctttcgctgtactccctctccgcccttctttccaatgtccctgccagcaaaagcctctatttgcagcaccgggcatgttgtccgtttaacgcgctccggggatctgctggctcgtgctcccaacccaggggtggctatacgtctcgcgcctctgttcctgggtagactcccccatctgtgcattttggccccttcacttagcaaagagatgtgcgaagtgtgcgcctggagacgagccgcctcggtgacccccatccgcccgcagcggtggccctggttccccggatccgcgcccgcgccctgcgggtctcccgcgccgcccttgcccgccggaccacccgggctcagagggtcgctcgctttcagcgcctgcgagcgccgcttccgcccgggcctggggagcgccagcgcgtccctcccacgccggaccctgcagagcatgctcagtgcacctcatggaacccggctctcctggggccaggatcagatttccgggttttcgctgctgccgagggggcgcggaggaggggaggctgggagacagtcagcgccttgttccgcgctccctccctcgcgccgggctgcggccgcccgcgccgcaagatgcaggccaatcagagcccgggggcggggcctgggcagtcacgccctccctctgggcttattgagagttatatcaagaaattcagttcagagagaggagagggagaaggagagaggggcagaggggaagggagagagggagagcacgcgagacggaaaggagcgcctcagagtctctgaagcacgcaagagataaccgattaggaatttttcgggcaactgtcacccggatagctgtcagagaatcatcatcaccgcaactctgacgtttcctacaagaagttagagacttaagcagtattggcatcggatggaaatggtatgcatgctgctgtggaaaatatccctgagctgaagaagtgcaactatgtgttgtgtgtgctaaatgcccagaagaacccagacccagtgggtaagagagacgaaatgtggagagaatgactaacgacaaatccgtgaatttgttctctggagttgctaatttgccagcccgaagcaacacattttacaaggaggaaacattttgctgcttctgatttctccccaaactggtgctaccagatgcatggctttctatgtgttggaacaaatcattcctaactgcagcatactgggaaaggggaaaggttgaggcaactaacgtaagtgtaaagtttcgcatgcacaattgtaaattctgtgtttagatgtgtcctcagtgtaggcgaaagatgcttgtaattgggtagacggttggggcagagctcacctactcggctgtatctgcatccctacctgcatcactctgccggaactaatcgcgggcatcagctactgtgcagcctaatgcagataagattagagcctgagaactgaccagtcctactcaagtaggtagctgcctggagccttgcacccatttaaactgcagttatctaagcagaagcctttttacctgcatgattgggttgcagtatttatgtgtggcaaatgttactaatattctaaccagagatcaggattaagaaattgcattttttttctcttttatgttcagtagaaaatattgtgatgttacatgggaatgttagctgcgtttcacttatatctcggcactctcttccacctctagga

SEQ ID NO: 6268 - DNA, 6000 bp, Homo sapiens
gtcacatcttttaccaaatctttattaagatcattttgcctccggattcacttaatgttattcaattaatctctccttctaaatgcaaaaagtcaatgacttctaaagcctgcatggagaaaagattcacacatattaggaggatgacaaatggaataaatatttattcaggataatttctgattctgcctctcttcccctttccccatagtgttcattttaatgtttctgccattcatttgttcattcagtatttattgggaagacttgtcaagcaccatgataagtggtggaaaataatgattctgacacttgaatggtgttttacaatgtacagatcattttcacatatattaaattcattcaattctcaaaggcactcacttcatttcaccagttcttcctcccctttaactttatatttctcttcatgttcctcattcctttccttaaatctttggtatgcagaatacagtagtctcctttcatacaaagggtatacattccaagaccctcagtgggtgactgaaaccgtaggtagtactgaacctgattgctgtccattggaacatgtttctcttcatgtcttcaatccacaagtttaatgccttttccattttcactacacacttatcatgcactctgtgccatacgttttgtgtttggaggtgtgacagcaaaactagcacaaatttttccttcataatttcacagaaatttcacaatgtctacattcttatcatagatcttagcaaccttgggatgtaactttttttttcttattaaattgagaactttcaccttttcacttaaaggcagcattttatggcttctctttggcatatctgaattgccagcatcactactcttgtaatttgtggccatttattaagtaaactgagtgttacttgaacacaagcactgtgatagggtgatactaagacagttgatctgacagctgagatggctactaagtgactcatgggttgggagtgtagaggtgtggatattcatgtccagggcaagacgaagcaggacagtgggagatttcatcacactactctgaatggtgtgcaattttgaatttatgaattagttatatttctggaatttccatgtaatattttcaaaccacagctgaccatgggtaactgaaaccatggtaatggaaactttggataagaaggattactgtggggagtgggaggggaagctggtttgaagagaaggcagtaggtgggggagaagatgcaaatgagatgagaatgtaggtccagagatgtttccagtatcctccactttaggatcaaaggacaggttacttgcaggcacactgtatcttattcaggaaaatacaaagagttacttgaaaaggagcaatgaccatcaattagcaatgaccatcattagaaactggtttgagactaaacacagggctagtgggtttccaaatcctccccaatcccttgcaatcaagcatatttaacatactggagatgctaaagagttatgactctcttcttataaacactcaggccctcaagtcccagcatcagagttccccagtagtatttccttttgaattctgtgataccaaccaataggcaagaaacagaacacacaaaattaactagaaaaacattccttgtgtttcaaatcacctgtttcattcattattatatctctcatgcattacctggcttccataaggaaataccaatggcttttctgcagtagactagctggtggttgatgactaccttatgtcaagatgtagagaatgatgatagtaggctgcaggtagtgaataagcacacggtatcactcacatttgactctgtactgatcatctcaagggtactttggagattcacaggatacaagtagatgacacaatacataaactttcaatgtgagctcactcataactcaggcccctttaacttgtttgaccctgtgcctggaatgctcttcctccaaaacttcccatggctgtctctttcttattattcagctcaaatgtcacattcacagagatgccttccccaggcactctgtataaagtagtattccacactcagtccctctatcacatcttataattttattttctttgtggcatttatcaccacctgaaataggcttacttatctttatactatatttatttgtctccctcgcaagactataagctcctagtgggcagtgattattttttaacatgcagcctggaatatagtagtaggccctgaataaatagtggttgaatgcttgcgtgagcaacagatatttatcaaatgcctgtaatataccagctctgttctaggcagtgggggtgtggcagtgaaccaagcagacaaaaactgctgaagtcttggagtttatattctgatgtaggaaaagagtcaacaaataaggcaaggaagaggaagctgcagtgaggctgtgctgcattaagaagtggaatcaaggaaaggtcttgctgggcagacctgaagaaggtgagaagggagggacctgaacaaggtgaggaacacgggagggaggagaaatgagacttttacaaggatgtgcaaaggccctgagaaaacaagaaaggggctatgtggctaaagccagccagctcctgggggcagggcaggagatgtgtcagagaggtgctggtgggataactccaaacatgtagagtcttgtaagccactgagaggactttggattttgctctttctgagataggaagccactggcaggctctgagcagagtgacataccagccttggattataagcagggtccctgtttttgttctggtgatacaagactgtaggagcagaagtagaagcagttaggagaccagtgcaataatccaggcaagagatgatggtggcttggtccagggtgatgatagggagatggtgaaatacgttaatagtctagaaagatttttaacacagagctggcaggatttgctgatgcaatgagcaatggtaattatacaaaaatatgtgcagaactgatacaaagaaggcttttcttggatttgtagaaaagaggctggttttgtcaggtctctgacactaatataacgcctagtagcacaaccacctcgaaatcctgcactgggacttggaagttttgtgttatctattatttatcccaaagaacagaacaacaacaaaaaaagaatgttgaaatacattcagtatcaaaatctgtacttgcaattaagataactggtttgggggttgatctcatttcagcacactgacatgagcgcggtaattgttgagcagatataaacatttcaaaataaaaatgacatttatctgtgaggagactgtgaagctcactgggtagttacacagaaggataaattttatcaagaacaaagatcttgcctgatttatcctgatgtgtggtctatacttcaaactgatgtgataactgcgcagacccctgaccctttgcttattgggctacactgaaagcgctttggagattattcgcctttgcattcctcactccctggtgccctgcaaataatagcaggtacacaagaaacattcagtgacccaatcatttcttgacaccctcctctgcactcttctctttttgcagcattcaggagctcttacttattttcatacccaaatcagtgatcagataatcactcataaatatgacatttcagaacgtgctgggagcagcgcagacagtgtgtagggagccatccagaggccccacccacctgggaagccagggaaagcttccagggggagggggcggttctgtgggctgcagtccgagggggaaaagcaaacgtgtaggcagcaggagttgagagatgggatccagacaagggccttcagatatataaatatccctttctgagactgacgggaacttggacagggccgaagagtgaccgaggcatgcgggagagaaggggcgcctggacttttggaaggataaacatgcaggcgccaaaggtggctttaaaaattacgttagatctgcaactgttgtgagtctaagggcgcgattcaacgaaggctgaatgggacccggagaccgaacgttccggagtcttaccccttcacttcgaagtgaagtgcctcgaaggccctgcgggaagagggaattgcaattaagagcagatttgaagcttcatctcattttgtctctgcagccagaaaataaactatcgtaaagcatcctactgcgggacactgaggtttgctttttgtttctaggtttatttatttattttccaggctggctgcaaggcaacttgaacaaaatctggctgcgctcggactggggcggctctttcgtctctccaggtttttcgcgtctctctactttcagtgacacgacaaccaacgatggcaggccgcagctgcactgctggaagcgcccagttccgcaggcgggagggccggaggcggccacgcatttccactcccggggcgacaggcttccgaaagttcacgtcctccttccagagtccttgggtgcgggctggggcgagaggggagggggcgcggtgactgtccctccaaggagctgtcttccgaagccgccaagtctcgggcgggtcctcttcggaagagggagaaagttgggcgggaccacggggcggggctggtgggtggggagcgggtgggagtccgggcgcccccagcgctcgcgagccggggtggagccagcagccccgcgtggcgtccgcgtttaagatgcaaatcgagtccccgctccccacctcccctcgcccggtaagcgaggctccgccgccgcccacgcctcctgcgcgccacggcaccagagcaggcggctctacttaagcagcgcgcgggccgcgacccggcactcgcctggagcgcgcgggcaaggcgggcggagcgcactggaactcaagggggcgcacagcggcgcgctcgcaccgctcggctccgcgcggctctaggaggtggcggcggtggcggtggcggcggtggcggcggcggcggcggcggggcgcagggctgagcgagcgtccgggttccggggctccggggaaggcggttgcagctcctgagtgcagcgcggcttcctgccactgtcccggcccggccacctctctgtcatggctctggcggacagcacacgtggattacccaacgggggcggcggcgggggcggcagtggctcctcgtcgtcctccgcggagccaccgctcttccccgacatcgtggagctgaacgtggggggccaggtgtacgtgacccggcgctgcacggtggtgtcggtgcccgactcgctgctctggcgcatgttcacgcagcagcagccgcaggagctggcccgggacagcaaaggccgcttctttctggaccgggacggcttcctcttccgctacatcctggattacctgcgggacttgcagctcgtgctgcccgactacttccccgagcgcagccggctgcagcgcgaggccgagtacttcgagctgccagagctcgtgcgccgcctcggggcgccccagcagcccggcccggggccgccgccctcgcggcgcggggtgcacaaggagggctcgctgggtgacgagctgctgccgcttggctactcggagcccgaacagcaggagggcgcctctgccggggcgccgtcgcccacgctggagctggctagccgcagtccgtccgggggcgcggcgggcccgctgctcacgccgtcccagtcgctggacggcagccggcgctcgggctacatcaccatcggctaccgcggctcctacaccatcgggcgggacgcgcaggcggacgccaagttccggcgagtggcgcgcatcaccgtttgcggaaagacgtcgctggccaaggaggtgtttggggacaccctgaacgaaagccgggaccccgaccgtcccccggagcgctacacctcgcgctattacctcaagttcaacttcctggagcaggccttcgacaagctgtccgagtcgggcttccacatggt

SEQ ID NO: 6269 - DNA, 6000 bp, Homo sapiens
tttcacatctctttggacacttcattcaggtatcaaaagaatggaaacaaggaaaggtaaaaattaaagaaaacaattagagtcacagaaaatacataaactcattataaattatattccatatgaaataacaactccccaaagagtgcattacacatgataagactgtgctgacatacagtaatgatagtgttttctccattactgagtggcctaagaataatttaataaatacagtgtgcattgacaaaccaagacggcacaggtccgactgccttcttagactggaatttctaatatcttttcaaagttgttacaaaagttctgtgaacagttttaagaagtttgtagaccaggttacactcattttttgttttactgagattggtgaaaaaaaatatgtcaaagaaaggaatataaaaattacttaagttataagtaggaaagcaaattattgtctaattttaattaaagtagaccatagcctaaaatagctgaactatgttgcttttctcagaaaaaaagaatgtatcctgtctgtttctcatattttctataggcagaaaagaattaatgaagtcttatttctagttacattaaacctatcaaattttaattacatcagggaatgaagtgtaatttggtaccatcaagcaatcattgataacgtttcaaatgtcagattctctcatttaatcacacctctaatttatgagtgacattttagttatagaagctgataagatgtatcagataagttgataaagcagaaatagtgtcttaatgagcgttttaacaggaatagcgtccaaatctaaaatattcaaattttaccacttttaaagaataaatgaattttcaaagagccccttaggtatgggtcacaggattgcaaacatttggcaaaactcttcaagctgcagttaagccctgtccatttcactgtacatacattatacttaattaaaaaagattctttatcatggatccagatagctacagtcacttaatagaaaagaaaactcaagaaatagaaattctcatgctgtttgctattgacttttgcagtcactttaaaacttttttattctcttacttcaaccactatttgatcattgaatctggtcccagaggaatatgtggagaaccagttgaaccaactctttctgtgtttttcgcacaccttgtctctcagcattcatgatttagagagttcaacataggttttgagggcacattcatttcaagaggattacatgaaagtactaacttttttgtgtggctaaaagggcttttctttgttctgtcaccaggcgaaaaggtttattttgggaatgctccccatggcaaacctctttgagaaatgaattccgaattgcattaaaccctgtcttcaggaacttctagataaagcatttaaaggaaatactgggacattgtctatcttcaactttctaactttgagaagtgatcttagccaatctggaattttgatagatttcctagacacttcataaacgtttaaaataagcaactttgtaaaagactccacatttacctagccaaaaaaaaaaaatcctctcataaatgcaaaattagttcacaagtttgcaggtaggaattcttaaaatttgatacaactttttgctcatatatagaagtgaaatttacatagtagttagttgctagtgaattcataaataaaatttatcgataacagattttaagtaataagatgaaaaaaaaactatatccatagcagtactgctcaaggcatgagtaatgaaagtaacattaaaaaaaaatattggcctagaatctgtttccacttttctgcactttaagacactcctacagaggcagtttgtcagtcggactgatttattggagcaagaagtaactttaatccttttcttccattttacaaaaggggaaactgacacccagtcattcatgaagatcaatgaacaattctttacatttcacatggttgtctttacatgttaaggtgaaatatttaaggttaaacttcaattgcatattactgatgtctagaacactgtttccccaaaataagaaaaaaatttgcttaggctttctgcaattacaataataaaaagcatagtctgtgtaaccatttagacatgcattcaaatcctagctccaaatcctggtcccacaactaactagccacatgaccttaagtgaattactgagactcagtttcactgcctataacatcatagaaaataatacagagctggaagacaaacatcagagaatcaatgaggtactgtgaaaaggtgtctaatgcaggtggtagaccctgtaaggagtagctgatactgtgttttaaattccaaatgaggaatgtgtatatttaccttaaaattgtttggccttattcttgagcccaatgaccagttaataaagtataactgaatactttaaaatatcattatcaatttataaaaaatatttcttaagctcattttgtggcaggtagtgggatggtgcagaaagaacatataactcattcaagtccctgtcctgtaaaagaaattaagtcacacgaaatcaatagtgacccatagatgtctcttatgtgatcaagtgcttgctaagttgtggttaacagtccaaaagtgctccaagaaaagtaaagagatagacctcagtgaggattagagcagacttccaggactcagtggaggaaatttgaatggagatggagatgatgagaaggccagtggggagagagaaaagtcaccccacaggagccataggcatgaacccaacaaagcttgtataggaagggcagatccaacactgggtggagtcaactaagcaaaatattcatattccaaagcttccatataattccttattcagacaacattgtatattgttacttggctcagcaattgaatgttgacctcgttcttacgagacagggaggataaggactgcaattcaaaatagccagatttggaattagcactcacaaccctagaccatatttctcattcctttagccttactccgtaaccatgttcctaaccacatttcacacttaaagttcacctttttaaatagaaattgattttctacttccactgtcccagaaagcattgcctaagagccaaaaatccaaggttcttgtcccatctattccattaactaacatgaagcaaaaaacgagcctcctgtctctgggtgaaactgctacatggaatgggtgcttctgggtttgaagttccacagatccagtagggattttgctgattggaggacggcacagtactctccagtgcatctccaagcctgacttcctgacctcttttatacaatctctgggcaaaactaccagtcgctgttattttcctctctgcggtaaacatggagctcaagaatggatagaaagaccttattgtattgctctacctggtaaataaatatcatgttgaatttgcatggcagctttctgattattttcatgtctccgataagcatcaagtctgtcataggtacagtataaaaatgcctgagattgcctaacaccgatactgtggcaggaagagaggagaagagctgtactggggaaaatgaggagtacttgtaatcctctctcggggcagtgagagggcctgggaagaaaagatcgagctgttccgtgttggggttaatgttggcttgaaatgaaacttcagggcaaaatgaagcagagcaaagagcagcgcccacaaaccaaccttaaatatcacagcggcggaacatttacctgaaagaaaagtgacacttggcattaaaagttcaattatcacgttcagtgcagagccttgttctagtctggagctgccgggtgtcacatggtgcgtgataacttgcccttgatttgggttcatttgaagagcgtagaactctaacaaataaacagccttttgggacctgtccccggacgaggactgcccccctccctcgggcaactactactgatgctgtccaggcatcgcccaaggggaaaggttgcagcggggtcggaaggcgcgggaggagtctggcggtgattgatgggaagggatgaatgaataaaagtacttgtctgatggcagcagagaccccgagcaaacggtggaggctacactgtctggcattctcgcagcgtttcgtcagagccggacccgcctgcagctcaagggaggcgtgctcctctcccagagcaggctggaacccagctgggttccgcctcccgggaaggtggtctccattcgtcgctctgcatctggtttgtcagatccgagaggtaaacattcgggcttggtgttgaattaaaatcattgattgaaccttattctggggcttcggtttggcttactagtttgggattttaaaaaaataaaaattaagcctatagagagggcaaattaaaattaggttgggtaaaggaaggagcgcgagtgtttgaagccgtttggagggaacagcggtttccaagttcctgctgacttgagaagtctctgcgggtttccgaatctccggcgcactcctgggcgcgctgcgggagctgtagctcagccagccagggagtagcggctttcatccgccgggaggagtctttcgagttcaatcgcggggtatagaggttcccctgcggggcaaaatgcagagcttgacacaagcccttggcctctaggtgccttaattccgcggttcccacgcacgcttaactaagacgtgtctgtattcctcccgttacgtgaaagagttcggagctttgcctgggacccccatcattccctccctggcacaccccttccagaacgccccgccccactgcatattatttacccctcctggccacgcgggggaagaaaaacagctgagagggcatcaggaaggagtttcgacccgcgctggcgagtcatgagcgccaagtttcccactggcgcgcaaacttgagttacttttgagcgtggatactggcgaagaggctgcgggcggtattagcgtttgcagcgacttggctcgggcagctgacccaagtgtcctgtcttccttcctctgcttgtctctaggctctgaaactgcggagcggccaccggacgccttctggagcaggtagcagcatgcagccgcctccaagtctgtgcggacgcgccctggttgcgctggttcttgcctgcggcctgtcgcggatctggggagaggagagaggcttcccgcctgacagggccactccgcttttgcaaaccgcagagataatgacgccacccactaagaccttatggcccaagggttccaacgccagtctggcgcggtcgttggcacctgcggaggtgcctaaaggagacaggacggcaggatctccgccacgcaccatctcccctcccccgtgccaaggacccatcgagatcaaggagactttcaaatacatcaacacggttgtgtcctgccttgtgttcgtgctggggatcatcgggaactccacacttctgagaattatctacaagaacaagtgcatgcgaaacggtcccaatatcttgatcgccagcttggctctgggagacctgctgcacatcgtcattgacatccctatcaatgtctacaaggtaaagggcgcctgctgaaatcatggtgggcttgaggaagggggcctggttggagacggggagatgagaaagcttgtagagggagcttccctttagctccctcttaaggttctgcccctcctaaaagtcagtaatctttggaaccaaattccatttggttctgtccactcataaaagtcagtaaccattggaataaaattccattcaggtcttcagtagacctctgctaagcttaggacaagcgtagtccccagtctagcaatgttagtatcactttgggaacttggtgcacatgaagatttttctggcctcaccccagacctactgaatcagaaactctggagtggagcacagtaatttgtattttaacaagccctttatgtgattatga

SEQ ID NO: 6270 - DNA, 6000 bp, Homo sapiens
gcttatatgatccagaacataggggatcaaatgttaaaaacaaacaaaaacaaataaacccagggctattcagggaaatgcagtgaaagaatgcaatgtcctcactgattaggttttctctgcacatatcagtcctacaaagaagtttaatcttcaaaccaaaggatagataaattgaaaaaaataatgagaaaaatcgtgttggccagcagagaaattctgtttctgccttgttatagaacttcagttcacatcagaccttgcataaactgtagtcataatgtgcatgcatctcacaggagtattcattaattaaccagtaaaaatcaccaggtggatcccagttgaatacaaggcctccggaaaaaaccagacccgcaggagcctggagctcaaggtcgactctgcaacaccacccctcttaccctgagagaaccccagagctttcccccagtttagttagggataaagaatatatctccaaagaaggttagatccagagataactgtttccagtccttcaagcaatctagataagaactcaagtggtctattttgaattcctttgcatcttttgttacagccactcccaattcccttctagaggcattatcaacagaatttgggaaattcaaaagtgaaatgactagagtcacagttgtcaaaacaaaaggtccatcattacaaaaccctttgtctcaggaaggtccctgaagaggccatgcatagactaattttactattgcaactgggctgttaggagagataatggttgaaagccccaaattgttagtcgtggaagcagcacacactgttacattctgtgccatcttcaaatagattgccttggtaatagaactaacaaactaaccaaatagctattcattcttctttttctcaagaatgtgtgatatcattgcaagatatcagtactaggactaaacctattaaggccaagtggtttgtgcaatcccggaaaaacgagctacggttgctaaaagatgcactctcccgttactacaacataaattcaaagcttacaccagccagcaagtgcaatcttacaaatatctcacttcaactcactcaacacacctactagcaaagaagcatgtctattgatgccttcaaccaaagattggaaaaaacaaaatgcacatattttatgtactgtctcattgaaaaaagttgagattatagttgtaaaatgaagtaattataaataaatgaatacagaatataaaatgaagccagagatgacagatcccaagtgtgtgaccagagtcctatttaacgacaagtactaggaaggtatgttacttggtgagtattagaaacttggggccaagcgtggtggctcatgcctgtaatctcagcactttgggaggccaaggtgggtggaccgcttgaggtcaggagttcgagaccagcctagccaacatggtgaaaccccatctctactaaaaaaattacaaaaaatcagccgggcttggtggcggatacttgtaatccccgctacttgggagactgaggtaggagaatcgcttgaacccgggaggcggaggctgcagtgagccaagatcgcaccattgcactccaccctgggtaataagagggaaactccgtctcaaaaaagaaagaaagaaagaaacttagcagtgagttattggtgcagcatggatttccatagattctgtattttccagcattaggcaaatggcaacacctgttcatgtgtcagagttgtctctctagaacgttccacaacacagttgaaaacaggtttgtgtgtgtgtgtgtgtgtgtgtgtagtgttaagttttgccttacattctatcatacttctgaaagtatcttccaaaattagtctcagttataattttggaatgtaacatgagaatcagtttggggacacattacaatagctgcactagacatttcattgtgcatgcatcatacatacacaaaaacatagttcctcttttggattataattctctaaactttggaggcacaatatagtagcttgatactcttcagtctctgaaaaagagtaacagttgcagtaattaatataaagactaaggagtaaatcagaaagaatccaaagggttcttgtgtttatcttgaacttaagttacaggttaaatgttttcccagtcagcaaactggagattgtgaggaaagggggtgggaggaagagctagatgacatgagattctttatagctcatggaagataagatataaatttctagattttcccctattaactccataaaaatataaggttctctaaacagctggaagtttctgatctaaattccattgcatgctttgatccctaacgatgtatcttcgcaaagttcctgcagcgctgggagaccagcaaggcacagatgtctcctaaaaagccgccatcgagtgcaggagtttgaagaggcgaagcgacggcgttgctttcacctgctctgctcgagagacttgctggccgcacaccggcagcacgttcctgcctagccttgcacacccaggctttgaccctcccaagcagacaggagggcaagctatcttctgtgtcgtttatattaatatctttgtattcattttaaaccagccggcctaatgcacacacgttttggaaggtaacccagcctgtccgcgtcgtgtcccggagaagaaagcagccttagccccgcgccgggcgggcgccccctggtggccagaggggccgcgagcgcagcggcgcctgcgttcaccgtcggctcaatggattcgggcgtccggcgagcggctgtggccagagaggcccagctgttttgcgcccgcagtcccgggacgctcgggagcaggccgttgtagcctcgtccaccctcaccttaggggtcgggggacgtaggccagcgcccggaaataacgcatgccacttcccttgccatctctggttccaaatccctagagaaagaggagagccctagagaaacatggagaagtcagggtgagaccgcagcgaggcagagagcgcgctggggacattctagagcaggagctcagaagaaggcagctagttccagggtagctgcaaatggattgggttaaagctggacgagtgaagcaccatgttttcctaacactgctttcaagaacaccccgcatggggcaagatcgcaggtgctattcgggaattttgaccgtacaagcaggtacttccctgtaaagtaaaagcattctgtaagtcgctcgacagaatgcaatattaggcgtgtgtatgcgcaagttttaattttccactggtgctcccacgtgaaggcacatttcttagtaaatgaacggcagctaggacagtgcatatgtatgcattttctatctttattttttttttgtaaatgggaaagaatagtgcaccttcaacatggacaacagaatcttgagaaatgttctaggtggcaagaaaagtgggaaatgaaggatgacttttagttaagggaagaaggaaatctgcagtgagccaacccttccctcccccccgcccccccatttcggaagcccatgctgtcgccctgagtaatcttgttcctgtctattaatgaattaagttaaaaggcttagactgtagactttagctactgcatgaagcaaaatagtaaggaagctcttcaaaaagcctccattcatagataaccccccttaaaaatgaaattctaataaacggaaaaactacaagtcgacacaatcaaaagcaaatcccagcaagagcagaaggtacttgaaactcgaatctgcattccgttcctcccgtacaaggctcggaggtgggggaggcggtttgtgctggtgcctggtgtataatcgggttaatccagtagacaaagaataaaccaatagccctcccacctcacttcccgctccccttcccctcccccttcttctccccccgccccagcccccgtcacccgctccgcaaaggggaacagaaaaggggagaggtagacttgaaatggattctggataaagtcttaaaacctgcaacttgtttttcatgctaacactgcgtggcccagattagtcttaaatgttcattcccctttcctggtggcaaggagaaagttccctaagtcagctcgagcctctggctcgtcctcattgcctctgggcaaaccttaaggtcagtgtttccttgaaactagataaactgaccctgcagtgcccagcccggccccgcgggcgccccgcgtgacggcgctcgggcggcaggaccggcctggggacgcgcggggcggcgcggttgcccttttgaatgcctcctgcggctcggagcgctggcgggcgctggagtgtgagtgaatgtagccccgcggagccaatgagctgggaccggatgcgatatatcctctgggacaacaactgctctgttccgcctcggatccacatgacgccatttactgctgccgcggccgccgcagagctccctgcctcctccggaaaggcgagggcgcaggccaacggcgagccccccccgggcgggccccagaccctcctcctcctcctcctcctcctcttcctcctcctccgcacccaccgcccccgcctcggcctcgctgcctcgcctccacaacgcccagtctgcaccgccgagagctgcgcgccgcagcgctagcggaggagaggggccggcggagcgcgcagcgcccaggcccccgcgcccgcccggcccggcccggcccgcgcccccgcgccgcctccgctacgacgcggccccggccgcaccacttggcgatctggctttaggttctccgtaaggccgttttcttttcccattcgctcatctgccaggaaaagggacttgccgttggcgcttcggcctcttgttcattgagaaaaaagaggaaatactccgcgtgcgcttgtagaaggggagtcgtctccagctccgaaccccggagtgttcatcagcggggaatctggctccgaattctctttttttctcccgccgattgctcggaagttggtctaaagcagaggttggaaagaaaggaaaaaagtttgcatcgagactggatttatttgcacatcgcagaaagaagagaatccaagggagaggggttggtgcaaagccgcgatcacggtgaggcacgtttggctcttcccctcctggcgccgcggccggcgcgttgtgggcaacatggagtaggtgcagccggaccaggagttgggtccgtctctccccgagcctccctttctcaaatcccgcagggtcttcgcgaggatccggggcgctccccgcggacctgcctcgcccggggcttgggctcggcctgcctctgcggggacttctgtatgcaccccgtgcagtgtccccgacaggcgaccccgcgcgcccgcgctctagggggttgggacggaggacagctagcctgaagtctgctcccagccgtgcactggccgcgaattcggcgctgagagcgggagagggagagaaaaacactttgtattttccaggttgcctttgcaggcgcccgcatttctaacctgttcttcctcttggtggaaggcaaagtccagggagaggctgtccctaggcggggcgctggtggggctgggggacacaggttgcccgcctcgggggcaggagacttccagggtgagaaaaaggcagggtgccgggtggagggagtgcccgcctctgctccgtgtggacagtctagcccggagcgggtgggagcgtcgccctgcctggcgccgggtctctgcggttcggaagtgcagctctctctcttccgttcttcgtggtcagcctgggtcacacttattttatttttggaagctcgggctgacccagcgcaggaagaaagtcatcaagcggtcgcgatcattttccattacctgaaagtaggtggcaaaataggcaattttttatttccttttgttgttgttgttgctgtgttttaatttggattcttgtgtgttttttacaaagcagtttctgtgtccgtttgcccca

SEQ ID NO: 6271 - DNA, 6000 bp, Homo sapiens
tcatacaaggaattaagtctctgatagtagaagatgtttaataacattaaaatttttcacaaataaatgttaagtacaaaaagcatgttaaaaagtatatgtatatttttacagcactaatctctgtggatttcaactttcttttttgttgttttctgtgtttcctaaaacctatgtaagtaatatgtatttcattatcttacaatataatacatactttgtaggaaacacagactttttcttctgtgtgtgagtatctgcaaggtcttgtgaacatatagaaaatactaaaacaagtgctcaaaaagtatatacttaagcatcaattaatataataaacaattgtggaaatatagatccttctcatatacttgtagtgtgtgtagtatagtgtgatatatagctaagagtattacccttactgggcaaaactttggttgccttattcatgtgaaataacaaaaataataaattagaatttctgaatatataaaattatattttgatcagtattctttccaataagcccaatatgagatttgttacaaaaatgagactatatgagaaactcatagccaaacctatggcccaaagtaataaaaaatataaaatgatataaacataggacagtgatactttaagccacaaagtaaaactgtacattcattttgatgtgttttactgagattgctatttctttgatgagaaataaaagttgctaagttttaaaaagcaatatactataaaagaaatactataaaaatattgtattaacttcaccttcagaaattgtgtaatatcttcattatcgtagcacccaattcctagaatattacaatctacaaaaataagatatgaaaatatgtgtgagaatcttacattctaagcatatttgtttataggtacaattcatttataaccctgtcttgtagtttacaattattatctcaagatgaaaaaaatcacaatgacccctttatcttatgacagtagtagattaaacttaggactaatgaattctctcctacagtggttatactgtttattactggtttcaaatcatagtaaatattaaatgtggtaacaattatcctgagttcaaatgtgaaaagtctaaggaaggcaagagacactaggtctgttgtaaaatcatttttaaagtgttttggattcagaaaaaagcaacgtgaagggaccaaaaaaatcataaactataatatatactagtatgtgttaaatatactagtaaggaaactgatccacagaaagcttaaccagggtcataaatggcattgtatattaagaacaaagagagacttagtagaataaaagcttagttcaggagtctgtagctttgttaccataacaaagtcaaatgatattttttaatcttggtaaattagtcaatgttacttagcctcagtttccacatccataaaataggatcaaattcactattaaccaaccagttatctttagttctctgcaataaaaagtattgtggatgagggaagagtaaagatagacttcctatatgtaattttgtatttgttaaatcaaagtattacttttacagttaaaaattagaacagtaatttttaaagttattgtgaagattaaataaactggataaaaaaagttagttataaattctactttttcattttaaaaatgtagtgcacatatggaaatatctagaaacttgatgccatttgggaaaaaatggataattaactggcaaatttcttcttagtctgaaaaattctttattgaacaatcaacatacaccttttcttgtttgagaggagaacttgtttgatgaagaatagaaatgtgtgaacatttaatgacacaattgaaatctttctggtcacagccaggaaattaaactatagccctgagcaaatattatcaatcatcatcatcatctggaatatcctttatctccagctactgagattatctgttgagaggcaaggcaactgaaggagttcacttgagctcaaatagacagcgtggaacccttttaagaaaaattcatgcctaagaaatattcccctaaggtattagaaatgtttagatcacatataaatcccttatatttttattctccaccaataaatttattgtttaacttgaatagttaggctttgaagttgtaggtgtggttttctagaccgttttatgtctctaaaatatatttattatgaaaatattatgatagctattatagagggtccatttcaatagacttacatgtgtacctctatattttgcttgcaagtttgtattggagatcttcatataggcggtataatcttaatcttttcttctcaggtttagttgctcatctgagaactaccacacttttttcttagagtgcagagataagaaattatttgaagaggatataatttaaaaaattttgtaagatacctaaataggagaatcctaactgtaaattttctattgtgattggtgtgttaagaggaaagaagaaataagggatgagagaaagatacagaatttaaagggtgaagaggagaatgaaatctgaatacaaactgtaggttatctaaattcatttaaatcaacttaaatatgttcttggagtctcttcacataaagataatattctgtaagttgaaaaaaaatgtaaccttttaaggttaaaaatgtgggttttagatgattgtcctttctaaacagccagcatttttctgttttccttgagtcttgcctaaccctattaatcacagacaccataaggctgatttcctttctcagagtggtttcttgggccaagatattttagacctgagtcctatttaagaagaaacagaaaaatgatttccttcagttgaactcctccacatctgcagttctcaactgcatagcatttctttagcataatggtttcaaattgattaaggtctttttttttcactctctacatgtggtaatgggtcaaattaaatgagaacagagttatttcagaagtgtatcaggatgtctaaaaaagatctctctagtgtacacacgtgcacacacacaaacacacacatgcatgcacatacacacacacactgaaatgtcttcatccccacctcccttcactgaatttcaccagaggaatacaacaaaaatattttgtcatatgaaaacattgtatatagatatgaaattttctccacccacctagaaattagattctgacccagaaaaaaaaatcttgtaaacatctttaagaccttccctagccttgggaattttcccaaccccagtcctttcccccaaatttttactccccatctttctcaaaatacacacttccttgaacatttgctcttttgcacaaaatattagcaagctcgttgcagctgtccaacttgcaaaagacctaattaaaaaggcaagtggtgtaaacatatcctctctgcatagagtgaagaaagggccaaacagtaactctatttaaaagacctaaaaatttcaaatcctaaaatgatctataaatattttaggacgtattgatgtgaaaaggtgtcgactctgaaaggaaaagtcagcaaaagaggcttcacggaagcagcatgttcacgttttcttccatcccagaaggtgatattactggatttttataagctcagagtttggaatctgttgtttccttaactggaaaaagcctgagcttcgtgtttccccagcatcagtgacccaacaagcatctgcgcgaagaggagctgccggctacctgcagagagcgttctcgctgagctttagagtccagagatttctatctcctcctctcaaaatgcaactggttatttacttgtaaacatttaaattagttcaaactgatgtgaaaactttgtcagtggggtgtgtgtgtgtgtgtgcgtgcgtgtagtgtgcgcgcgcctgcctgccagtgggtttttaacagcactcacaaatcatcttgggatttttccctgccccctctcccttcttttccggttctcagttaaagctttcgggactggaatcaaggacttcagcatgcattgtgtttcaccctccagagttaaataacattcaagaaatatcaaagaacctaactctcaatgaccaaattgactaaatttctgcaagttttaaaaagtatatgcctaatttatataccttgcaaaaaaattcatactcaattatgatattatgtaacatatatgttccgaaagccactttgaacataccaaaagaaatgtttcaaagacatcaaatagcgtaaaacactgtgccgcagagaaggaagaaatgcatttaaagaaccgatgaaaatggcgtgcagtataattacctcaaattgctgttcgcttgacaccctgacactaattttattcaagccattgggaaataaatgttttaaaagcactcctttccgaatggtggagctggtgggggctgtgaactcgttaaggaaaggaaagggtaaagtttccagcacgcaaaaataatcaaataatccatttaaaataagcatctatgtagatcgtcagccttttatgcccacatttttaacgcttgccctgtacgtggattgatttttttttctttcagcattccctagccagatggatttttgctactgcagatcagcagagggtgtcagatctttcagagtgcaccaggctggaacgagcagagcttcttagcaactctcttctccgcccccctcccctcattctcgcgctctcttcctccctcagacaactcgccccccgccctccgcccccctccacgtaattccgaaagagcagaagaaagagaaggagaacaggaaaagaagagctagtaagcgagagcgagagcacagaaaagaaaaaaaaaagccttaagaggaccgaaggggaggaaaggaaaaggatggacaaccacaaaacgcagcgattgcggaaattttccagcgccattggctgggcagcgtgagtccttcggtcgggcgtgatttcagcaccgggggaactggacagcacctcggggggacttctgggcaacccgcaaccacagcaagaactccaccagcagcctcaacaacagaagccgcggaaaaccctgctttgtatcagagaggcaaggtcagtccgacgcacagccatgcacaggcagtgcgcctgtactacgctgcaaaccctctgcttgtttctctaacatgcacttgcttctaattactagcattgtttcatttctgatcagtgaagatcagtagatgagattctgtaagggtgtacttttaatttatatgtatatatttaacttctttttctgttatttttaaagtgttgtgggggagtggggtttttttcctacttttttttttttttttttttctttgcttgccttgcactacgtgcctggatagtttgtggatataattattgactggcgtctgggctattgcagtgcgggggggttagggaggaaggaatccacccccacccccccaaacccttttcttctcctttcctggcttcggacattggagcactaaatgaacttgaattgtgtctgtggcgagcaggatggtcgctgttactttgtgatgagatcggggatgaattgctcgctttaaaaatgctgctttggattctgttgctggagacgtctctttgttttgccgctggaaacgttacaggggacgtttgcaaagagaagatctgttcctgcaatgagatagaaggggacctacacgtagactgtgaaaaaaagggcttcacaagtctgcagcgtttcactgccccgacttcccagttttaccatttatttctgcatggcaattccctcactcgacttttccctaatgagttcgctaacttttataatgcggttagtttgcacatggaaaacaatggcttgcatgaaatcgttccgggggcttttctggggctgcagctggtgaaaaggctgcacatcaacaacaacaagatcaagtcttttcgaaagcagacttttctggggctg

SEQ ID NO: 6272 - DNA, 6000 bp, Homo sapiens
taagctttcagaggaaagttattgtttcgttttcttttagattttgccaggttaaacaagggtattagagaattcctttgtgttcactgaattaaaaccaccaagaggaagtttttattacaaaacttctcttagaataaagcactccctgtatcagttttatacctttgctattagatcaaattaagtatggaggaaacataagacttacataacaaattaaacttttagttaaaggtacaatgcaaaaggcaagtttcctaaacatacatccagttcaatgttatcttcatggtgaggccttcctccaattccccaaagtgacttacttaatcgcttcttcctctgtatttccatagtgttttttctagtctttttatccattatatatccataaaatattatatctatcttatacgtgtcctctaagacacatgacctttcattgagataagtcatacatgatgaacattgtgccaatgacctacttatctacagatgtgtgtatattgcaaaagttaggaacattttctattcttcatcatctaaaagttagtctcttagtttaattgtatgttgttatcagaagtcaagatatccataataattaaactcttattcttaggcaacagaaaaagtaatgtttagaaagtgtttttgtcctcttccagtgaaacatgaaagaacaccctgggttcacaatctgaaaattgtgtagcatacaatttcaaaagatgaaaggcaacattcttctattattatattctatgaattggatttatgtaaataagtcaattgtgtatttaagtagactttactcattgttctttttaaatattattttctcattttataaaagttattacttgtgtacacaataaagagaatgaaaatataaaataaacatttgagttaaatttaagctatggaattgctagtgaattttattttttcttatttattttgcatttttaaagtttcttagtgaaacaaagacacttttcaaaaggtatattcaaacttaaagaaaacttttggtgcaaaataaaataattttttaaatatttataaaattagtgtatcagggtctctagagactgtgtatttatgcattatttgtaagtatttgttatattttattttagtagcattatcatgagtttcagtgtaatttcctgacagtacaaagaaagcagagcccacaatactatgtttcccaataatgtgtttaatattccttttaaaacaatcaaataagtatgtaaaaagtgaaactgagtaagattatttaattttttttcaaagagtgaaatgactagctaatatttaaaattccctagagtattatcatcccccccaaatcaccaagtttcatactttctaacttcagagtatttaaatatgcctttgtctacaccacagatggtacagagttctctccctgcaaggctttcagatttttgaattaaactcaatctcacacatcttcactttacctcttaaatgtgacactaaaaaaggtggaaagccactctaaggtggaactggtcctatttagaatgaataaatctcattgttttacttttttcttttctttttccagtgctcattcttggtcttttcattctatttgtaccgtacacactatcagttcaacaaatttcataaaacattctaccacatagtctttgaggtcatcggctattaagatgatctccccacatccatgaaagcagggagggaaggacttcacttcctatgtcctcatgcacaataaaatatgctgatggtaggctgccgctctaaaattaataacagagatgggtttatttcttctgactgcttggtataattcaatgcaattgtaatacttttatgttggccctttagaaatatacactctgaaagcagagatattgttaaatgtcacaataacacataatttacaggttgtgattaaaaataattaataaaaaaaatttagccaggcatggtggtgggcacctgttatcccagctacttgggaggctgaggcaggagaattgcttgaagccaggagactgaggttgcagtgagccaacactccagcctgggcaacagagtgagactccatctcaaaaaatattattattattaataattagcctgtaatcctagcactttgggaggccaagatgggagggtcacttgaggccaggagtttgagaacagcctgggaaacctggtaagacccccatctctataaaaaaaataaaagaatcaactgggcatggtagtgcatgccccaagtcccaggtacttattatgaggctgagatgggaggatctcttgagcctaggagttggaggttactgtgagctgcgattgcaccactgtactccagcctggataacagagtgagaccctgtctctatatataataacaataataataatacataataataatttgaagttacgggggagcaggcatagattaggtgggaagataaataaaattcattgtttattataatcatgtgatgaatttattattaaaactacactaagaaagtactttcccattgattacttggaaattaaaaatattgttaaaataaatgttgttcaataatcattagcacatatcctgccataataaacattttggaaaaaatggctacagtactgatttgatataatgactgaagaattacagtgaaaaaaacctagagaacagcagacttgtctacgatcttttcagatgtgctagtgtatattttaactaagtttgagataatgctgagtaattcattatcaacattaccactttaaattaaaagttatagattgctcctcaaataatttttttttagttttttattcccaatgaaagcttatagaacaactgaataatttttttttaaaaaagtgtgtttagtcaatatttctctcccttaccatcatggggaattgaccagtaattactgcaattgcccagtaatttatgcactaaaaagacaagattcattatgtaggaaaggaattcatgataaaaatcttcaaatttctgctatgtgtatatgactgataaaatagatacatgatcaaattgaaggacatgagagaaacatgtgtcaatctacaaagaaattactttcatttgtccatatgtaggcttgaaaaattttgctccacatactatgctactagaatatttctcctatgcacttgactgcaaaacctaaaggaatgcatgtgaaaaattaggactacagggttgggagggaaattattcttgccccttctttttttattgattaaaattctaatttctaactatctatctaaataattaccttgatttaattaatttggctagcagctagcaggaaattgtgccaaacactaattatttatatttaacttcacttatactcttcattctctcatttttttatttttattgtattttcgaaccccctcctctgtatcatcatctcttttccatgttaaagcacaaaatgtcattaaaataaacgagaaacttaattactgggaaatataaagtaaagtgagaatactgaaaattcccacagagcccttatgtgtttagagccaatataccaccctgagacgataaaactatatcaatctgagtgtatgtcattaaataataatgtgatattcttctattttgatgatttaaactatatcaactctcctttttaaaaacagcactttctgaaatgacacctactattacatagaaggcctctagaatctgtatttattctaaacagaataaacaaataaaagacagcatctagtatatgcactttggatgtgaaaaagttcaggaaggtaggtaagaagaataactttttaaaccacaggctttttgagaaataaggaatctgacaagagtaataatggtgatgattcagaaacttttaagagctgaagaaacacgcaacttttaagatataacctattaagaataaattctctctgagctagcactatacaaatcaggttattgtaatatctacatatttcacttgtttcattttatctgtaaagatataatgttatatttttgaaagtgataaacagaactttatcaatgataattattttgtgtttaaagatttttaaatatattttaaaataattatgcttttcttctaaataaatatattaaaataactgaaagatcttcatttctaagtttaattattgaatattagctctagggaaagaaataatgaagtaaaaacttagagtccctaacataaggctttaaaaaagttaaatggtgaatacaaaaatacaaatattgcagggaagcagttcgtgttaacattttacaatctagttagtgcacaatttcaactataaataccagatttaaaaaaaaaaagaaaaaaaagaggcaactactctataggcagcattcttgtgtttcctgcacacatgtgtgcaaacactacagaacagtgttagttgagaatttaacataacgtattatttagcttgctataacacaatgtactattaagcatttaaaatgacgtgttattatttccatcaaaattcacttgcactatatttggtattgaaaggagtggaaagaccatttgcagaaagaggaggagttgagcagtcccaaggtggagctgtctcttgtgttatatgacactggcagattaaaacgctctgatggggaagggcttaaaggctgagtcaaaagccaagaagtctctttatttacgcctacctcccagcccttggcaatctgactaataacaaactgagctaacaagaaatactagaaaaggaggaaggagaacattgctgtagcttggatctacaacctaagaaagcaagagtgatcaatctcagctctgttaaacatcttgtttacttactgcattcagcagcttgcaaatggttaactatatgcaaaaaagtcagcatagctgtgaagtatgccgtgaattttaattgagggaaaaagggacaattgcttcaggatgctctagtatgcactctgcttgaaatattttcaatgaaatgctcagtattctatctttgaccagaggttttaactttatgaagctatgggacttgacaaaaagtgatatttgagaagaaagtacgcagtggttggtgttttcttttttttaataaaggaattgaattactttgaacacctcttccagctgtgcattacagataacgtcaggaagagtctctgctttacaggtaagatgaatgtttccaggcttttcttatacttatttttgcattatagtaaagtgattgaatttgtatgttcgcttcctttaaataaacaactttgcattaaaggatactcaatttcattcttgcttactggcacaactaacactggagcagatgcctgtattctctgagaagcagacatttagtctaacagctggctacagagaagaacaaatataatattccactatttcttttgcaacatgcagtttgttgttagaaactaaatatgtgtgctttctgaaggaaggatcacttccaaatgcgaatgttgaattgcaaatataagcagaatattgaataattctttgcattttgtatgctacttattttctgatttgaaaatacgtattctcagaaaacatgtcaatgagtatcttttgacctctttaccactgtatcagatattgtcagtagagaaccacttttcacatctgtgtgtgtttctgaaaagattagaaactgtttcctagcacgttttgaagagcataaaattcatacaggatttacaaaataacaagagtttatcactgaaaaattatttactattttctctgatgctatacctggtgaaataaatcttattctttcttggtaatttatgaataagtacttttagtgattgtggaagctaatccacaagttgaagactccaactacaagctgcttgtttataaactcagcacacaaagctgtttaaaatcaaattattta

SEQ ID NO: 6273 - DNA, 6000 bp, Homo sapiens
atctttaggctgggtgctgtggctctcacctgtaatcccagcactttaggaggctgaggctggcagatcacttgagctcaggagtttgagaccagcctgggcaacacagcaaaaccccctctctaccaaaaaaatacaaaagttagctgggcatggtggtgcgtgcctgtagttccagctacttgggatgctgagatgggaggatgggcttgagcccgggaggttgtagtgagccaagattgcaccactgcactccagcctgggtgagagctagaccctgtttcaaaaacaaacaaacaaacaaacaaacaaacaaaaaagaagacatcttcctcgtctttgcaggctcattccctggcctagctgtcatgtatccagaaggcgttcactaacgatttattgaatgaatgggaaaaaacccccatcctttaatttgtatattgccttcagagtgtattcacaagttgtgagactcacaataatcctgtgaagaaggaagagtggggattctgatccctattttgtttttacatgtatttttatgtttttagagacagggtctctcactctgtctcccaggttggagtgcagtcgtgcaatcagagctcactgcagcctcaaactcctaggctcaagtgatcctcccatcttaccctcccgagtagctaggactacaggtgtgtgccaccatgcctggctaatttaaaaaacattattattactattattattattattttttatttttattttttgtagagacggcatctcatcacattgcccaggctgctctcgaactcctggcttcaagtgatgctcctgccttgggctcccaaaatgttgaaattataggtgtgagctaccatgccctgcctgaccccattttattgttgttgtttttttttgagatggagtctagctctgtcacctaggctggagtgcagcagcgagctcttggctcatggctcactgcaacctctgcagcccaggttcaagtaattctcctgccttagcgtctcaagtaggtgggactacaggcgcatgccaccaagcctggctaatttttatctttttttttttttttttgagacagaatctcgctctgtcgccaggctggagtgcagtggcatgatctcggctcactgcaacctctgactccctggttcaagcaattctcctgcctcagtctcgcaggtagctgggattacaggcacatgccaccacgcccagatcatttttgtatttttagtagagagggggttttgccatgttggcgaggctggtttctaactcctgacctcaggtgatctgtctgcctccgcctcccaaagtgctgggataacaggcatgagcccctgcgcccgccccgaccccattttagacctgagaaaaataagggtcagaaaggttaggtaacaagtgaaaagatataaagccctggccccctggttccatatccactcctctctgcagtcagacactgctctatagtatctcttccaaacaccacattgttaatgttcagaaaagaatgttaagaagttccaaaagatcttaattaagaaaaaaataagcctctgcaggagccgaagggactgagcactttggcaatttggagatggctaatgacggttcttacacagttgttgggggtagggagagcattctgggacagtctgacagaggaagtcactagacttctaactttagtaaacaggttctctagcttggaagtagaactggtagctcagcatttactgggctagaaaacttaggaagtttcaaagggcactgtaaatcaggtgaaggctgactattttggtttatagcttatattatctgagaaagagctatcagaaaggtaggttattgaatgatcatagctttcccacagtagtcaacttaaaatattgtgttcctttttgtgacagaaattctgaaacatgagctggtatgctggcgagtgcctacaatcccaggtacttggaggggttgaggcaggaggatcccttgggcccagcagcttgagtccagcctgggcaacatactgagagcccatctccaaaaagaaaaccattctcaaacatgcatgaaatgtaagaaaataaacccctatgacacatcatttggcttcaaaaattatcaatattttgccattcttatgtgcttgactttttttttttttgagacagagtctcactctttagcccaggctggagggcagtggtgtgatcatagcctactgtagcctccaactcctgggcttaagcaatcctcccacctgaacctccagctgggactacagactcacgccaccacacccatcatatttttacatttttagtagagatgaggtctccctttgttgcccaggctggtctagaactcctgggctcaagcaatcctcccacctgagcctccaggttacatgggactacagacttactccaccatgcccatctaattttcacatttttagtggagatgaggtctccctatgttgcccaggctggtctagaactcccgggctaaagcaatcctcctgtctccacctctcaaagtgctgggattatgggcttgtacagcctggagtgcagtggcaccttctttttttttttgagacggagtttcactcttgttgccaagctggagtgcagtgggatgatctcggctcactgcaacctccgcctcctgggttcaagtgattcttctgcctgaggttcctgagtagctgggattacaggcatccaccaccacacccagataattttttgtatttttagtagagatggggtttcaccatgttggccaggctggtctcgaactcctgacgtcaggtgattcacctgcctcagcctcccagagtgctaggattataggcgtgagccattgtgcccagcccagtgggcaccttcttaactccttgtagcctggaactcctgggctaaagccatcctcctgtctcagcctctcgagtagctgggactacaagggtacgccaccacacctgggctaatttttaaaacttttggtagagacagagcctcactatgctggctagcctgtgcttgacttttaaatatgtgtttgtgtaaggctttctttaaaagctattaactatactattttagcaaatatacatgggaaattatcaaggaacaataaaatgatcttgttccaagcaccatgaacttggagcctttcattttttttcattcagggtggatatgaagagcagctgctgaccttgttaaggtagccacagaaatgactgaagacttagaggtgggagtacacaagcttggaacaagattttgttcattcattcctacagccattcaaccagcatattctgggcacttctcatgcacactggccatccaccagggagacaggccatgcttagacataggcttattgcaaatcatgttttatcctttcttggctctaagactggacaagttctgcctttcagcttcaccttcctcatctataaagtaaggataaccttgaatggggcactgatagaattaaaagtgagataattggtcgggcgtggtggtacatgcctgtaatcctagcactttgggaggccacggtgggaggatcacttgagcctaggagtttgagaccagcctgggcaacaaagtgagaaattatcaaggaacaataaaatgatcttattacaaagaaaaccaaattctcaaacatgcatgaaatatgaagaaaataaacctccatgacaatcatttggcttcaaaaattatcagtatttgaacttggagcctttgattttgatttttgcatctctacaaaaattacaaaatatgagccgggtgtggtggcgggtgcctgtagtcctagctacttaaactgagttgggaggattgcttgagccctgggaggtcgagggtgcaatgagccataatcgtgacactgtgtgtgagactgccacacacacacacacacacacacactagtgaggctacgcactcagaaatgcacatgaacatcactggtattctggaacccacgtgtcgtttgccactgttatctgttaggctttagggcttgacgacagaaatcatcaggcagtctctctttcctcttatattcctttcccaatctaagggggcagcaaaaagctcagaggtccaccgtagcatgcaacatgtgagatgcctaaagcccgcccccatcgacgacagcattcatccatctcccgaattcatctgggtcatactctcgagttacccggctttcttgaggtcttgcagctctacaaggataatctgtggctaaactttgctgtcgtccaaggtcaaatgtttggctcacaggttgaagagcctcccatggcaccgtcgtttggtcctgagaagggaaaggcgcccagggggcgggctgctagagcacgaggcagctgtctcccagtcttcccaaacccgtagccgagggggcgtttctgcggcgcaggggcgggcacagccgacgcctccctgctccaccttctgtgtcggcgcctagactcggatagtgaatttcggaaagtttcactcgggttcgtgcacgtgggcacctccggacccggcctccttgccgcgcgctctgctaccctctccatccagcggcgcaggcggccctcgcctcacccctgggcgtagctctgggctccctttggcgtcgccagcttcgcctcctcccgccgcgtctcctcccgccgcgtcacccgtcggtcccggccgcgctcgcacgcggtgcgcagctcccgggctccaggcggcggcgcgtagcgggcgcccccgaggcggcgggcctgagaggcggggacggggcgtgccgccggcgcccggctcccggaagcggctgcttcacaggctccagccgagcggacaggcgtggcggccggagccccagcatccctgcttgaggtccaggagcggagcccgcggccaccgccgcctgatcagcgcgaccccggcccgcgcccgccccgcccggcaagatgctgcccgtgtaccaggaggtgaagcccaacccgctgcaggacgcgaacctctgctcacgcgtgttcttctggtgagtgtccccgcccgaaacaggtcaccctgcagccgctggcgccgcggacgcactctcccggggccgcgcccgatgctgcccaagccctctgcggctgggggcgaggggagcgctttcctacgccacgcggtccacgccggggctttctgctgcgggtggcgccgcccccacgccggccgcgtggtccctgcctgcgccccggggcgcggcgcagggggacgcggggacgcggggccagtggctttgctactggaggccctgcgggcccttagggctcgggggaggaggagcaggaggtggggaggcggggaacccaggctgccgaaagggggagtctcttgcccagcgggagaagcgactgcaccccttacacgcccacccttcgctggctcccgcctcctgctctgggactcgcagtctcctgaactcaaacgcaccttttcctttctttttaagtaagcagcttacgaacagtttcctttatctgatctcagccaaagcctaattagtgtcctggacctatgccatctcccagtagtgtccccaccccttccgatattccttacgagacagctcgatccaactccacgtcccgttgtacctctctgtgtcccggtgtctctgtatcttttgtctcagtgaccagggctctccttttgcctctttgtgggaatctcactgtgtgtccatgtgggtcgtggtacctagttatggcaagtttcatgtgggtaaaataacactattattatttttcatttatgaatggggaccctgttcttgaacaagattttccaggatttgcttttaactgggacatgcaccgccacgactggagtctgtctttgaccagcttctttcccctgtttccaatactttcacttccacgtaggaggacagctcggaggtggggtccctgga

SEQ ID NO: 6274 - DNA, 6000 bp, Homo sapiens
aaggaaaattctcggaagccaagcaacacttctgtgtctccaggaccagcctgccaattctgtacactccaattccagacttgggtccctttggggagtatagtgggctcatggtgcctgcctggaacccgggcctcttttggaaaaagggtctttgcatatggaagcaagtgaaggatatggagatgaactcatcctggactagggtgggccccagctccaatgacaagttcccttacaagggaggagaaggagacaggacacagggcagaagccatgtagagacaggggctgagatggaagtgatgctgccacgaaccccaggtcacatggagccaccagaagctggaagagacaagaaagggtcccccccagagcctctggagggagcatgctgctgataccttgattttggatttctgacctccagaactgtgaaagaacacacttgtgttttcataagcctccaagtctgtggcagtttgttacggcagccacaggaaacgaatagaatacatagactgtgttgcccatatggagggtataaaaaccgagtctactgctgacgaaaagagtcaaactccgtaaaatatttgaagagatttattatgagccaaatgtgagtgaccaaggcccctgacacagcccttgggagatcctgagaacatgtgtcccaggtaatcccggtgtagcttggtgttacacattttagagacatgagacatcaatcaaatacatttaagaggtacattggttcagtccagaaaggcaggacaaacttgaagcagtaggggatggggggaggtgtgcttttggattataggtagatttaaaattttctggttgacaattggctgaatttatctaaagagctgagatcaatggacagaaaatgtccgggttgcaataagaggtgatggagaccaaagttttatcatgcaggtgaagcctccaggtagcaggcttcagagagaatatattgtaaatgttttttattagacttaaggtctgcgttgatgttagtgccatgcccaagaggtacaaggaggcacgtccaatccccacttcccatcatggcctggagcagtctctcaggttaaattttaagagtgcccgggcagaggaggaagtccattcagatggtcggggggccttagaaatttacttttggtttacactattaccccctacacagcctgccagggagcagcacagcaagacacaggtctccagggattggctgagctattcaggatctgcagagcctgtctccttgacccccttggtttttgttcttcatttaggcttctccatcttgagtaccttgcctcttctggccgtgctgtaacggataagaatgtgagctctgtgggcgcaggcctgtctctgcgctggccacccactctgcccaatgccgtcactagcatggtagttggcactgggaggtgataaataaataatgcctgaatgaaggattaaataagcctgtggaagaaacagcatttgtctcgcaactactgagaagttgctgcacccactgcagacgttctgattcagtagctctggggcggggcctgagaatctgcatttctctcaagttcctaggtgatgctgatgctgctggtccagggatcacagtttaagaaccgctggcctagaccaagagtgtgtttacagaagtccggattccagggttcatgagctcagccacagaaataccaccctgcagagaaaactttgacctaaacaaaccatcacaagctccacctttctacgcccgggatatctcgcagggtagcaactgtgagtgtgcttccaaaccttccagagaaagttttcctttccttcagccgaggctgcatttttctacctaatgaggtcctgtgacttgcagcccccatttctggaggtaacattgaccgctaccttgtgtgtatcaatgctgcaactaattgaagagtttcttactcttcagcggcagtgaagaaagccggggaagggcaggctcagtcacctccatggaatagcagtctctgtttctccctaggcaccacagtcttccagaaaggctggctgggagaatgctaagactcaagagataatagagtcaggtgagtggataaaccaagtgtgttgtagacacacaacagaatattcctcaacttcagaaggaaggaaggctgatgtacttcataccatggatgagcctggagggcattacccaaagtgaaagaagccagacacaaaaggacaaacactggagatttcttccctggacgacagagttgtcagatttatggagacaaaaagaagaacggtgggtgtcagggcctgggggcaagggtggatggggagtattgcttaatgggtccagtgtttccatttgggaagatgaagaagttctggagctggatggtgggaatggtgggacaacaatgagaatgtacttcatgccactgaactgtgcacttcagatagttttacattgtatttcagcatgattaaaacaaaaaggctgtggaaactcaccttcattcccctttttaatgttcctttctgtgtttgcaaaacctcctgagatcaggcaagaaaacagaacaataatctggagacaatcactgtgttattatttttgttttgtgattcttttttgtaaattatactttaagttctagggtacatgtgcagaacgagcaggtttgctacataggtatacacatgccatgttggcctgctgcacccatcaactcatcatttatattaggtatttctcccaatgctatccctcccccagccccccaccccctgacaggccctggtgtgttatgttgctcgccctgtgtccatgtgttcttattgttcaactcctacccatgagtgagaacatgcagtatttggttttctgtccctgtgatagtttgctgagaatgatggtttctagcttcatccatgtccctgcaaagcacgtgaactcatccttttttatggctgcatagtattccatggtgtatatgtgccacaatttcttaatccgatctatcactgatggacatttgagctggtttccaagacattgctattgtgaatagtgcctcagtaaacatatgtgtgcacgtgtctttatagtagcatgatttataatcctttgggtgtatacccagtaatgggatcgctgagtcaaatggtatttctagttctagatccttgaggaattgccacactgtcttccacaatggttgaactaatttccactcccaccaacagtgtaaaagtgttcctattcctccatatcctctccagcatttgttgtttcctgactttttaatgatcgccattctaactggcatgagatggtatctgattgtggttttgatttgcatttctctgatgaccagtgatgatgagcattttttcgtgtgtctgttggctgcataaatgtcttcttttgagaagggtctgttcatatcctttgcccactttttgatggggttgtttgatttttttcttgtaaatttgtttaagttctttgtagattctagatattagtcctttgtcagatgggtagattgcaaacattttctcccattctgtaggttgcctgttcactctgatggtagtttcttttgctgtgcagaagctttttagtttaattaggtcccatttgtctattttggcttttgttgccattgctcttggtgttttagacatgaagtccttgcccatgcctatgtcctgaatggtattgcctaggttttcttctagggtttttatgattttaggtcttacatttaagtctttaatccatcttgaattaatttttgtataaggtgtaaggaagggattcagtttcagctttctacatatggctagccagttttcccagcaccatttattaaatagggaatccatttcccatggcttgtttttgtcaggtttgtcaaagatcagatagttgtagatgtgtggtgttatttctgaggcctctgttctgttccattggtctatatatctgttttggtaccagtgccatgctgttttgcttactgtagccttgtagtatagtttgaagtcaggtagcatgatgcctccagctttgttctttttgcttaggattgtcttggctatgggggctcttttttggttccgtatgaactttaaagtagttttttccaattctgcgaagaaaggcattggtagcttgatgggcatagcattgaatctataaattaccttgagcagtatgactattttcacgatattgattcctcctatccatgagcatagaatattcttccatttggttgtgtcctcttaaagaaaggatgattcttaaagaaaggaaatgtagaatcccccagaaatgctttcaaaggttgaatctcaaaataaagccacacacacactctcacacacactctcacacacacatcacacatacattctcacatgcaaactatatacatattctcacacatgctcacactcaatcctcattcacacacacacactcacacacaatcctcactcacacccacacacacattctctctcacacacacacacacacacacagctgaccactgtcccaccgtgttttgcctccccacccagaagcgtgcgttcctcccacagtggtttccaaagtgtcgttctggatccagcagcatcaacctccccttagacttcttagaaatgcacattctggggccccagccccgacctcctgagtcagctggccggggggtggggcctgggaatccgcgtttagactggctctcccccggcctgccacgcgctcccgtcggggcccacccgcacctgggccggggctggtgtccacgcgcgacggctcgggagcacggacctctgctccccgcagcaccgccccccgggtggagccggcggccccgcctcgcagagctggggctgtacctggggcaacggggccgggcctggacgtcaggtcggaggagtagcacctgccaggagcacgtcccgccggcaggtcgcaggagccctgggagccgccgccatgggtacgctcggcgggtggggggccggccgggctaaagactcggagctacgcggggcgggggccggcaccgagggccgggaggcgcgaagggtacgcggcggcgggaagcggggcgacccgaaggcccacgggggccgggaggttgcggggcgcccgggatcccctcccgggtggtcaccgtgcggccggggcgcggaagccagaggtgcccagaggcgccgactccgccgaggttgcgatcctggcccgcccgcccgtggggcactgtaatcctcgtattcccaccctgcgggccgggagtgcgcttggagcgggacgggacccagcgggtgacggcaggggcggcagaaacaccgtctaactggcggaagccttgtggctgcctttgcacttgtcttgcctctggctggcgaggtgaccctggagttccgcagggaaccctggcccaagaggagatggggcctctctttgtggccccctcttaaccctctgcactgtcccctggcttaatttgaggcaccttctgtgccttacagaaggtgaggagctggctcttgatggggctggagcgtcagcaaaacagctaggaggcaacttgactcctgccccgcttccgaattaatcaccctggaactaaggcagacccagagagaatgaacggaagcagagccagagctgctgggagcagcccagcccgctgctttcttaaagatgaggaagcccagtcagcttcccaaagttgtgccatggatgcccccggccagcattttgcagaagatgtggccacgttgttgagggggatctgagcctgtagacaggaatgtcggtcggtggctgcctcagtggtcctggtggagtgatgtgtgtcagtgcccagccccagggtgcagccgtcctctggctctcagaatgcctgccggacacagcatgtggtggttcctaaggagaagcagtgagtggttcac

SEQ ID NO: 6275 - DNA, 6000 bp, Homo sapiens
ttggctattccttcaacagggaagcactgcaagtcaatttcaacagctgtggctatagaatcccattacagagaagtaggaagcaattaactgacagcaataatataatcagccaccgcaaggtcatggatttacaggaatttgctattcatccacgttataaaagcaaagacaaaaaatgtgagtaacaaaatgtttgccatgcttgcaagagacaacaggagctattagcaaaatacatcgattaattttctactttaagattacttgttactagtgaaccagaaagcatgcaatagttgctgtctacgaagaggatttgcttgaaggtttatctaggactgattcaccaaaaagtatttaattataggttcagaaaacttaatgttttcagatacttagaaaatgtttgactgacaacaacacaaaatgagtaagatacaggataattaacagagccaacccttgctaaaacgatgaaagtgaactagccatccacctacccacctcctagccctaccccccaacttctcctcccatctctactcccagcctttattctctcctgacttcttctcaagtttagtgtcatttcctgccttctctaggcatgggcacagaccactccccaatctcttcttatcaaatgtgtcaggttgatttttgtttttgtttttgtttactttatattgaagtattggtacttgtgacccctcctagtctctgatcttccatactgccaaggtaacgactatcctaacttctaacaccatagatttgctttgcctgtttttgtatgtgttctttagtttctggtttctttcactcaacattagatttgtggtagtagattactcatccagctgatgtatagaagtccatcgtgtgaatataccacaatatatttacctattctacccttgatggacatttggatagattccagtttgacgctattatgaatggagtcactgtgaacattctagttcatgtctcttggggaacttaatttatagatttctttagattgaaacctaggactggaatggctgggtcggagggcatatggacatttagctataatcattttccaaagtggtgggaccatcctacagatgtttaataaggattcacattcattcataaaaacctgaatagtctgcacagtattttcaaaagaagcagatctagaacccagttctgattccaagcctagtgcattttccatccagtagattccaggttcttctatcctactttcttctcctcaatactatgctgccttttccctctaaagactcaagaatgaatagctagtcattcacggggcattctccccaaggtacttgttgccttaaagagggtcagtggtaactccaaagagctctaattgtgggactttcaggtttcataaaagatcaatctgtagaaaggaactagagaggagagagagggagataacttcagtcacaggaaagtacttaacagagtcaatcaaatccaagagggccattgatctgaatagagccatttgtgatgaaacacaatagaagataggaagctcatcttttatcatgtgaacctcagggcaaacatgctagaaagctattgaaccctggcctcctcaaattgatacacaggaacaaaagggaagcctcagatgtcaaattctcatgtctgcgcccaggcggccagaagcaggaaccggctcctggtttcttgagggtggcctgcatgtgagcccagggtgtgacaaaatgtagcagaaaagactgagaaggatgacgacgaaaatgaagctccagcctcctgactacccctctcaggtgtgcatctgtttccaattccgtattacaattaaagagaatgattttttattttttttaattttattattattttactttaagttttagggtacatgtgcacaatgtgcaggttagttacatatgtatacatgtgccatgctggtgtgctgcacccattaactcgtcatttagcattaggtatatctcctaaagctatccctcccccctccccccaccccacaacagtccccagagtgtgatgttccccttcctgtgtccatgtgatctcattgttcaattcccacctatgagtgagaatatgcggtgtttggttttttgttcttgcgatagtttactgagaatgatgatttccaatttcatccacgtccctacaaaggacatgaactcatcattttgtatggctgcatagtattccatggtgtatatgtgccacattttcttaatccagtctatcattgttggacatttgggctggttccaagtctttgctattgtgaatagtgctgccataaacttacgtgtgtatgtgtctttatagcagcatgatttatagtcctttgggtatatacccagtaaaatgggatggctgggtcaaatggtatttctagttctagatccctgaggaatcgccacactgacttccacaatggttgaactagtttacagtcccaccaacagtgtaaaagtgttcctatttctccacatcctctccagcacctgttgtttcctgagaatgatttttatatatttagatactttcagtgtctggatttgaatatagctgaagttaagggtactaattaattgtgaatcattccgatacttgaatataaaacctctcaagcctaatgtgcaaatttatgtaaaaacaatgtgaaattagaaatgcattggcacttttttttaagcagaactgtagcactctgtctagtcaaacagactgctcatttgcaagttgtctatatgcaaagcattctgcccctgggagcctaaaatctccttagaaagtcatctgaaatttgagaagagctttgttctgaacctgctttctgctcccttcacttttcttccctgcttccagcactgtgagcaaaaagcctaagtatggatcacacctggccaacccagaagcagccatggcccaaaacaggaggcctgccctgggaaacccatttgagttcaaaggagggtgtctaaatatgcttgtcttgagccctgtgcattgggccttgcactgcagccttccaactttaagagaaatttcagaatccaaatccttcccgcctgcagggctcaaattttcctttgcagatcagacctggtgaagaggctatttgccgttcaatcctaggctagctttctgcctttcacctaatgtttgaggttaagagaaatcagaaaagagagaccgtaaactgatcaccactgcatgggcatctgcctcacccacctttgggagttgggggaagagccagccacaggtgctcaggtgcaggtgcccaggtgtgagcggctaggtgcagatgctcaggtgtggcagcagggagtgcacttggctcatctgccctggggagggccagctcccgacagaagtaggccagaggtcagtcccaggaaatgcttggagcagccagcagggtagggccaagtcatgatacacctaggagtgggaggggaggcctctttggatattacctggtttatcatttagctgttggggtggggaaggaggtgggaaagacagaaggctctcccaggaattggcaggcagccaggtcagggacaatggcagcccccacttgtgctagaaaggcaggcaggacgtgaccactcagatagccacatcaacaagtacaaatcacggttgccctggaaggaaatggctcaggtttttcccagtagctcaatgcctaggcacccccacctgtggtttgggcatttcactctattagctcttctgctcagtggcccattctgctagccacagctcacatttactccagttatgaaaaaggttaattttcccatattgagtttctctgcaaaagctgctttcagttgtgaccggtaagttccgttgtcaccaatatgggtacaactgttgtcactctgctattctgaagccatgatactaaaagtgtgaccccagatcagtgtcatcgccatcaactacaagcttgctagaaagaaaactctccctagacttccagaatcagaatttgcattttaacaaggcccccaggggaatcctgttcacactgagttttgagaagctctgttctaagatattactccaatccccagcaagccaaaccgaccactttcttcacataatcagaacgctcggttccagtatttccagataccagccataggaaaacacgttgttctctcatttccctttaaccttatctaaagcactcaatttcctcaacccttaagtcgtcatctgtaaaatgggagtgctaatcctacttaatttaagatgattaagttgaataataaattagaatttgtcctacaaattgtgaatcatgatcggaatattcaattttattattactctgtgtcctaactcaataactgggttataaactcctgaaaacaggacaatctcttctctacctctttctttatcttccctgtatactgaaatacagcgttctgcccagcatgaggtcgactatttgacatttacaaaaatctctcttggaatccccctgccaaaaaaaaaaaaatcgaatttcaatttatgactccaagcacaaagagatcctgtcactttgacctaattctctgaggttcatccctctaaataattgtattgtctccatctataaagtactctgttactatgacaacgcacacataattgcatgtgtaagtagttgagggtggctgtgcaagtcagactcctttccaccaggaaacacagaaaacattctatcttcccaaatgttactctctcagatttgcaccaagaccctagaagtttcttaaatttccatatactttatggacactacaaagcaattccaggaaacactgatacagtagcaaaactactgggagtggaaattggatggagatctgggtcccagttcagagtctgacacctgatttgcaacataattaggcacagggcactcaactattcagggccctaaacccttctattgaaagggaaatgggagaacaatatgtgttcctatggctcagtccctataagattctgtactattcagagttgattttaagtgtcacttaactgaaattatccaacaaaccttcatggcatgaaacattaacacagctctttttatatggcatggttcctatggctcaatccctataagattctgtactattcagagttgattttaaaagtcacttaactgaaattatccaacaaaccctcgaggacattaaacattaacgtggctctttttatatggcatggttcattatcatgccaataaatgattaatcgtaactctctgtcttgaccaataattttgctggacttttgtgattcacaacgtgctctgtgttgtaatgctacctcttgaaactgacatcctagctttattgttttttattacttccctaaggtggctttcaaaagagacaccaagtgacatatttttaggaggggtttaaaagtttgatggggtagaagtaaacgttgcttaactcaaccagcagcagagccagggcccagggaccagcgcttctgtggacttggcctttccagcagcagacccagcaatgaatgatccgaacagctgtgtggacaatgcaacagtttgctctggtgcatcctgtgtggtacctgagagcaatttcaataacatcctaagtgtggtcctaagtacggtgctgaccatcctgttggccttggtgatgttctccatgggatgcaacgtggaaatcaagaaatttctagggcacataaagcggccgtggggcatttgtgttggcttcctctgtcagtttggaatcatgcccctcacaggattcatcctgtcggtggcctttgacatcctcccgctccaggccgtagtggtgctcattataggatgctgccctggaggaactgcctccaatatcttggcctattgggtcgatggcgacatggacctgaggtaagattatctatacctctaactac

SEQ ID NO: 6276 - DNA, 6000 bp, Homo sapiens
caaagtgttgggattacaggcgtgagccaccgcgcccggccaaaggcgtatgtttttaatagtgtatgttttgtgattgctgcaactgttgattaccaaacctaggcttattagggttagaataaaatgggtttgtttaccatttggatgattctcattttctaggttttcactttggattaaagaagtgacaagtagaataaggagttaacaaaataatacattattgcagctggttttaagtgctgttgaagctgttaagtagtataaagaggatgcaaaaaatgattttatggacccaaaagaggagatccgttacgattgttgtcagaagttttccttatgtttattaagagtagtatttaacttttaaattttcatgtatgtctgtatcaaatcagtctgaaaaaacatcctgttgatagaggttaaatattagaattaatcatgcaatcaagagagcgcacagctagctagccattatctgctcctttgtatccatcacacctcttaatccagcttggaatgatgagtggagtttggtcctccacacttggtttgcaaataaagagatgaagtttcatgccaggtgtgcatgcttgttggagccattcgtatttccatgtgtgctgtttttacattaataatgctgtcaacgaaatgagaggttgagcttcagattaaaatggatactagtggaaaatacggtaattttcttccataaggaatatgtgacagtctataaggtatgagtttcctctaaacttcccagagagaagaatgattctcttttgaccaagagcctaatgtagtatttttcctgccaaacaaatagactctaatataaaatgtttcagtgttttaacaatctgaatttcagaagcagatgggagaagggtgtttagcaaagttgattttaagaaagggttttattttctcctgtcagatctttccctcaaggataaatgggggaaaatgtgatttgctagagagtgctgaaagcatcagtgacttgtatgaaataaacagcatacaatgccaggaaacaaagggtatgattttgcgagaggcttacaagctacatagagaatgtatggcttggacaacacttagtcaacacataccaaatttatttttctgtaatgttatttagataaccttttgtttttgtagaagttctgttacatatatcttttgaaatatgtcctagaaatgatggaatactatataaggaatatataagaaacaaccataagttctaaagcccaaaacatgcctaggaattcaaaggggtaggaacataattacttgcattttttttgttggaggtggggaattgcacttttttaaagctgcgattatctatttgtcatctcattttacatttattcagctttgtgttaacttttataactatggtatcctttgaaattcccaaatccttatttatttgacttatcagaacttttttttttttttttttttttgagactgagtctcactctgccgcccaggctggagtgcagtggcgtgaactcggcttcactgcaagctccgccacctgggttcacgccattctcctgtctcagcctcccgagtagctgggactacaggcgcccgacacacgcccggataattttttatatttttagtagagactgggtttcaccgtgttagtgaggatggtctcaatctccttacctcgtgacccgcccacctcggcctcccaaagtgatgggattacaggcgtgagccactgcgcccggccttcaaaacttaagtctagaacacagtgaagtaacttcctctgctgaaataaaatctcatttgatgagggtttaaatacatctgctaaaagtatagatttctcgaaatacattgatcatgattcaaagtgtggtaaagaaaaaaattaaccaagttttcccaataattgtaaaatgaagtccaaataccaagagatacgacactgatgtgattggttcttggtttggcatgctttggaaattctactttgccttgtgcatgccagtatgacctacttttttgctggcatgttatacaatagtagatacaaatggctttgaggtgatgcttttaattaccaaaattaccattaaatagtagaatgttgacatcttcgaagtgagtactgctgatgcttttcacattgtctacattgaatctctgttgactgaaactaagctgtatattctctcacactatagatgttttgtgtgtgtgtaggattccttttcagtcaaatacgcactttgttttgaaaaggaagcgattttaaagtgtatatttacatttgtcccaaggtaaaacgctttggatgtgagactttctgatttactgaaaatgttatttttggaagctggcttattttcagacaatgcaaatttcctgtatttcctctagtttacttggagaggaggatgtagtgagctaagaggtcacaatttaaatttcacaatataagtttgtcaaaaggtactgagtacccagtgttcttttaaaagatcattaagctaactttatattcaatttcaatgagttccttaaatggtattttagcatactaaaaactagccctttctcacccttgtcaaggtaggagtcatagtgcctgctgcttcctgggttgttggtgcttcctgggaatccgctgttcaaatcgtcataccgtggtggagcctttttaaaataaattttatatatatatgtgtgtgtgtgcatatatatatgtgtatatatatacgtatatatgtgtgtgtatatatatacgtacatatgtgtatatatgtataaatatgtgtatatgtgtgtatacgtatatgtgtgtatatatatatttagtttgaaggcttatttaaaatgaaaataaattatgaaacttttctgctctcaaagatctgtttggaagagtaagtgtattcagtactttgtatgccttaatgtgttttctatcttaaactagtcttcacaagcttttaccactccaactgagatgtatacgttaagttagactaatgtttcaaaaacggatacttaaaagcaacgtaccataaaaatcttcagaaattgttacaaagaagagtgaaagaaaacaaggtgttttaccatatgcatttttaaatttagcgtagtggatactttgttttaaaaatacataatttgtagaattactgcccagtttgtgtttgaaacataaatcctggggtggacggcattaaattgaaaaaaaacgtgggcatacagtatattttaatttttcatactgaatcgtacatttgcactgtgccttatttctaccgtgttcttcctactgttggacatataaaaagattttccttggaactgtgacttgattagatgctgcagtatgctggatccgggtcggtggaccgcagagcgctcgagatgcggagaagcaaagctggccgctagtgggcgctgtggctccgtggaagtcacggacgagcgtcagcaccggcgctcgaccgggaaagtagcgaggagttcctgccagctctgctctggggtcttgcagacgccgagtgagaagcacatgccttgacttttccatctcacaccctctaaatctctggtcactttgggaagcgcgcgtgtctcctagaggctagtgagacggtccccgcgtcgtgcctgtgccggcgacacgcggggaaagctccaggggcgccaccttcccggggggccaggagggaagggagacgcccgcagagaaggcgggaggcgacgatgctcaggccctgattagagctgcaaattccggcgccgcgtcgcaggaatcgtcttgcaattcccggccccactgactgaaactgagccgtaggcgattggtaccaaaatcaagtgagaagccctcgccgagaggcgtcgggagaagcgcgcagaagccgggagctctaagggtgcgcgcggagtgcaagtcttgcacgcggggcagcgccgcatctgcggagaagggacgccgagcggagcctgctgccttccgcactgctcgagggaaagccgcgccctctgattccgccgagggggaaggcgcccccgggcgcggagacaggtggcccgctactcggccgtcgctgtttccacgtctgcaccgcgcccagaaggcctctcgccgccccgggggcgccctgtgcacgcgctgagcgcttctcctgcccggcttctgctccgctcccgccgcccgcgggagccaggggcggggctcacctgtcagcccgagccccgcctcgcggcacccaatgtcgggaggggatggcggacggacggaccggccgtccaaccagcgcgcggccgcggagccgcgggccaatgggcttcgcgcggcggggcggggccccgcgtttatagcgctctgacagcgcggcggccgcgctgactctcctcggcggggaccgcggcgccggccggagcgaggagctgcgcacgcagcgggtcccggcgccctccccgcacacaaaggcccgcgcgcgtccggagcccgcggcggggaccgagctccctctttcctgccctgggggccgggagccgcgcggactgagaaggctcctgcgcgcccggaggcgccctactccgctccgtgctccgggacatggaaccgcgccgacgcggcgcccgcgcgctcgggccgctgcccgctgcactggatctatagtcacaggcggccccgctcggggcgcagcgcccgccgcccgcgccggtcgtctccgctccgggtctttgtgtcccagcccgcacccgccccgcgcccacccgccagccgcggccggcccggcaccctggagccgcacgggagtcggccgtccgagctgcgtccggcgcggcgccccggaaccccgagtccgccgcgccgccgcgccccgcgcgtgcgctcccgccccgcgccctgagggccccggagagcgagcgcacctggcccggcgaccgctggagctgcgcagcgcgcctcggagctgcctgcgggcgcacgccgtcttccccgccagtctgccccggaggattgggggtcccagcctgcgtcccgtcagtcccttcttggcccggagtgcgcggagctgggagtggcttcgccatggctgtgagaagggactccgtgtggaagtactgctggggtgttttgatggttttatgcagaactgcgatttccaaatcgatagttttagagcctatctattggaattcctcgaactccaagtaagtggcgtccgcgatccccctatgtccccgccccggggtccgccgcgccgtccgggcgggaggaggggtcagtccgcggggcctcggagcctgtttctggaacctcggttccccgtcccccacccccaacccccgccccatttcactaggtggagactcctcgctcggctttccaacccgagccccgctggaacggacggtctctccgcctttcctcccccgaacgctcccaggcgctaaaagctactatcggctcgggtgtcaagtccgggaaggtgtccgatggcgatacctgaccctctcctgttttcgaggacgaaggacatggccacaatctaggctggccggcacgcggggactggtgggctctggagagaggcggagatgctgcattcgcggggagcgcgggcggcgtggtccggggcccgcgggcgggcgaccggggtggcaggacgctggcagcgaagcgcgttctggagaggggagcctggagtcgctacgctgcccgcagagccctggagccggggcgccttggcaccgcgccgccagcccgagggtgcgcggggagctcgcctgcttcgcaggagaactcgggcgtcgagccctttcctccgcgccggggagacgggccttaggcttctccctgagggcccgccgcacctcggcctcccgcttcgttcataagccggtagccccggagtatgcggtctcgatggccgacctgattgtaatgcacttcctataaaagcttagggccctgcccag

SEQ ID NO: 6277 - DNA, 6000 bp, Homo sapiens
atacaatcttgatcaccacagctacataataagctttgaaattgggtagactgagtcctcccattttattcttgtttttcaaaaaaaatttcaaaaaatgtttaaaaaaccctatgttcaaaatatgcaagaaaatatttacttattctagttcctttgcttttctatataaattttagaataatcttgtatatatctaccaaaaacattgtgtctggattttgataggaattatgttgcaccctatatcaatttggggagattgatctctttgttatgttgagtcttccacactacaaacatagtgtgtgtctccatttattcaaactctaatttctttcatcaatattacatgggtttcagcatgcaagtcctgtacatgttttgttattaacacctaaatattcctcttggtgttgagcaatcataaatggtattgtgtttttaattttggtatccatatgcctattgctagtatatagatgtacagtggatttttgcaccttcatctcatatcctgagaccttgctaaactcacttaacagctgtaggagttttgttatggattctttgagattttctacataagcattcatgttatctgcaaataaggacagttttatttcttcctttctgatattcatgctttttatttcctcttcttgttcattgctctagctagaacttccagtacaatgttggataaaaatgaggggcttgttcccggtcttggggtaaaaaacgtttcatctttcaccattgggcatactgttagctgtgggttttttgtcaatgcttttaatcaagttgaacaggcttccttctactcttggtttgctgagagcttttgtcacatggaagctgaatttcatcaaatgctttttctttgctgattgatatgattgtgtggtttttcttcagcctgttaatgtggtggatcacactgattgggttttgaatactgaaccagccttgcattcctggaatacatcccgcttggtcatggcatttgctttttatactttgttggattcaacttaccaaattttatttatggtttttgcatctatattcatgagggatattgatctgtagttctcttttttgaactatccttgtctgattttgttataaaggtaacactggtcttataagatgagttggaaaatatttcctcttcttctattttccaaaagatggtgaagaattggtgttctctattaagtgtttggtagaattgtcccatgaaatcatctgggcctagaggtttctttattgggagattttaaattattaattcagtttccttaatagttataggctatttacattatctatttgaagtcgggtgagttgtgatttttgatgaagcagcccattatctaagttgtaaagtttatgtatgtagaattgcgcaagtatttccttccttatctttttgatgtttgcagggtctgtagtgatagctcctattttattcctgctatcagttatctcagccttctctctagctacaggtttattaattttatttacattttcaaagaactagtcctttctattgcttttgcattttcaagttcattggtttctgctcttatcttttaatttcttccttctgcttgtttttgttgctgctgttgtttgcttgcttgcttttgctttgttttacttgcttttctttttctacatttgtgagatgagagcttagggtttttgagacttgtcctcttttctaaaatatgcatttttagtgctataaattttcctcttaatactgctttagctatgtcccttgagttcttatatggtgtattttttcttcattcagttccatgtatttttaaatttcccttgaaacttcctttttgactcatgagtattagaagtatgttgttcaggtttcatatttggaggtttttctgttatctttgttattaatatctaatttgattccattgtgattggagaacatactctgtatgatttgaattctttaaatttgctaagacttcctttatggcccaagatacagcttatcttgatatatatttcatggggacttaaagagaatgtgtattctctgttgagtattctgcgaatgtcaatgacatcctgttggttgatgatgttgagttcttccgtatccatgctaattttctatttggttgttctatcaattgttaagagaggagtgttgagatctccaactataattgtggatgtgtttatgtctacttttagttctatcagtttgctttccatattttgcagctttctagtttttcatttgtttcaggcttgtttgtaattgctattcaagcatttttatcatggctgctttaaaatttttggcagctaatcctaacatctctgtcaccttggtgttggcatatattgtctttttaaattcatttttagaattttttaattttttagcagagatgcccaggctggtctggaactcctggtctaaaacgatcctctcagtccagcctcccaaagctctgggataacaggcatgagccaaaacacccagctttgtattaattcatcttaaaatcgtcctcgttctttgtgtgatgagtggttatctactgaaacccagacgttttcatattatttaatccttctctttttactggctttctctgaccccacttcagcagcaaaagggagaggcttcaccttgttaacaccatgtggggccagaagtctaggtttcccactgggaacctttgggtgggctcctgaggactgttgggtgggtgggtagcagtcctggctttccatatggtctccactgacaccacagtgggaggtggccttgtcactgtgtggtggtcacagtcctaactttctactacgttgtgtctgacaccactcagatggggggagagaggggtgaccggtggctgccagatgtgggtgggattctgggcccccctcattgtctggcacccaatttgtatagagcacctagttctatgttttcagagcatgctgtggggaaactgccctctaccaaggtctctggccctcctccccacacgtatgtgtccagaagaaggtcattctgataacatgtgtacagctcagcacatgtacctgcttctggaaattcagagactacattaggaagactaaattcaaagatgtttagaaataattcatactttgttcatttcaagagcatctatacccttcacagacaacagttgctgcatccaggtgttgtcagacccctggcactctggggtcccagggccacagtctgtgaacaatcagactgtggcctttactgccagaccctgtgttcttatcgccctaacattccaaagtcagaaatgggtacaatgttaaaggaaggataggtccattaagaaattatggctgggcgcaggggctcacgcttgtaatcctaacactttgggaggccgaggtgggaggatcccttgaactcaggagttctaaaccagtctgggcaacatagggagaccccatctctacaaaaaaataaaagaaataaaaattagaaattaaaaaaaagaaaagaaatgataggaatccaggctaaaatgacatcattccatttgaattttagggcaattattttgcaaactctaaattatcctaaaaaattaaagcagcgtaatgcctagaggaattttgtttcttctaagaaatgaatttggttacacgggtccctgagagggacggcctagagttgacagtatgggaaactctgcatgtaattctggacacacagggctagtcgacttcgaatcatatttgtcagaaggcccctgagcacatttcatttgccctgcattcccatcaacctcctgcagagatgggcactgcagccagcaggcagcaatggcatctgccatccaggacccctgtctccaacagcaaagcgtctgagccggggttctgaagtgcgccgcccaacaagactgcctgggagccctccacgtcctggtgctcggacccatgggcgagaggctcaggcagaatctccgggcggaagtgggcagtgatgacttcatggtccctgccccggccctgtgaccccagtgcactgcccggacccccggtgaccccgaggtactgcccaggctgagcatcccccacctggaccctgccttactccctcccaccagcactgttagaaatgcagtctggggcccccacaggactcgctgggctgaatctgcattcaacagatgctcagggctcctgtgcacttcattttgaggaccactagatttaggggtttgtgtttatgaattcctccatggacacaaaaaaatcctaaagggccctcggtgccactgccctctggggatctaagaggctattgctgctctgggtgaatctgggaggcagaggagtccccggggacccctgtgttccctgccaacccagctccagctgccaggctcacccttccactgggtgacccagaatcggggcggccgcagcggggggcccagggagccggtcgcccctcactcgcctgcctcacgccctcccaggccagggatgcggccccagctggctcagcccaaggtcgtggacacagtgggtccaggccggctctgctctgacctcaatctccctcctgaaggagaggagggaaggggaagggcctgtgagtgctgctcaccccggaacgtgccctcaccgcaatcagagcagacaaagctgcagccaagggcgtcccaagagcagcagggtgaggaaagcgggcctggcccgccccaggggcaacagccgggctgcacccagcccctggtgtttggtgaggcgatggccggcgctgataaacggccctggcctctccctgggatccttcgcctgcgatgcctttgacctctggcagaggaaactataaagcccagaggtgggcatctggcctcagtctgggcgtagagggtgcagggagcagacgggaggatctcaggccagggacgatggcggctctgcaggagaagaagacgtgtggccagcgcatggaggagttccagcgttactgctggaacccggacacggggcagatgctgggccgcaccctgtccaggtggggtacgtgcggggggcgggccggctgggtgcatggagggggccgctctgaggacgcagcctccaggtgagctcaggaggaggggagcagagggcccctgacagtgagaccccgatgctgcctggatggcgtggacgggcttcggccagggcctcacttgcctcccagggaaagcgagggtccccagagcatcctgaaggctgagttgacctggagccccagctgcagaacgccggtggagggcgtccacagactggccccaaatgtcagccgtatgtctgagaacagcattttaaaagtatgtttctaaagtgaatcattttgaaaataacgtgaaaggtggcaacggtgattccttggtcacacagattcacgcaatgacctgaataaggggctctgccgagacgcggctgccagcccctttccgggacacccgctggcgtccagatgcggaggtggggagtaaaccaggcctgcctcagcctgcagcacctgcgccttgtgcgaggtctgccctgcagggtcctgtccccgtggctgcacagaggcgcgggcagcctggccctcctgggaggaaagcagatgcctgggcctccaaggccacacaggtggtggaagcgtctgcgtctacatcagggctgccacacccgttccgggaaacgccctcaccccttatgagagagtctggaggaagcacctgtgcgcccccacctccccctgcgacccctgggcgtcgggatgcggctgaactggctggcctggtgccgtccccggctcccagggaaggtcaggccctcctcaattcccacggtgcccggctctgggggtcccagagccgaggtgggaatgcaaagccccaggcccgccccacctgtgtgtgtagctgagacgtgctgggaatgcccgtgaca

SEQ ID NO: 6278 - DNA, 6000 bp, Homo sapiens
tttcccttttcaccttggctatccggaagctcagtgtgtagctttacgttcagctgttctcaccttacatgtgtcaacaaatccactaaaaaaatttcttttaaaaggaaagagacaggccgggcgcggtggctcacgcctgtaaccccagtactttgggaggctgaggcgggcggatcacctgaagtcaggagttcgagaccatcctcaacatggagaaaccctgtctctactaaaaatacaaaattagccaggcatagtggtgcatgcctgtaatcccagctactcgggaggctgaggcaggagaattgcttgaacctgggatgcggaggttgtggtgagcgccgagattgcgccattgcactccagcctgggcaacaagagcgaaactccatctcaaaaaaaaaaaaaaaaaggggaaagagacattattccagcaagcagtttgcaaactgggagatgctgcctttggaacaaaacaaaggtgcattccagagaagaaacatgcgattgtcttccacaagggaattcctgcccaggatctcattctggcctttatgcagataagggaggcagacttgcttcattctgtttggtagagcctggtagcagtctattggtttggtccagagggcaaattgggattttctggccttggttgattccagcagcatgaacagacagctgtgaaatttccagcacttccgggaacgcagagctggcgtgtgacctctagtgagcaaaaggtcgcgtgcctccattttgaattcaggcccagtgagccccttgggatgcacctggcaggatgggctctttcaggttcagatacctgattccaccgttcttccttcagttcttactttgaaccctccaaaaattattccgttgtgtactggtcatttatgtggcttcaaatcctttgaaagtagattgttcagacatgatctaataatgctgttttggaaatgaatgaatgtccacttgtcaatgggttgatatgtgaacagaagagtatatccaaagagagcaaagtgtaacaccaaggtcattgaaagaagaaattatagagattttctattgggtcatcatctgatcctttcttctctcagtattttatttcccagctcatattatcacagctctaagagacaactttctaatttagaaaacgaatgaccaaatccttcatttagaacacaaatgtgagaaggccggtgcttgggcagctctgcggggctgtgttttgttgcgggagccctggatgtatgctcagcccctgtgcctctcagagggctgggggccccacatacagataccttgctccgatgtgcctggataagcactgagggtgggttttagggaccgactggggagagatgcacgtggggtctgagtcgaccgtctgtggggcactctggtcatgcccagcatccatttgtgcagcacaaactttttctctgggactgtccgccccccaggttcttgtggtatcgtaaagacgaccacagtttcgagatgtaggagtgaaatggaccgaggctaacccagtgaagtttgcggctgggttaaggagtgagtcagggagatgcgtgttttctccatcatgactgggagaggagtgctcatttgccgggaggtgagggtgactgtgcacctcagccgccagcaggagcaccagagaagccctgctccagccctgctgacgtctgggcctgggccaccagccggtgcagtgagcctggaccccaggagtgccttttccaatcctgacagacagctgcttaatgtgggacattgctttactttacgagttgaaaacgccaccctagcagcacggagcacctcccaggggctaaaccctgtatcatgactgaatgcgcccatgtcaatgaattctaacatctaactctacattctgcctcccctgaatccaacgttctttggatctagttctgcatttacccctggctcatgctggtgcatgcattttggtcctgaagctccttggccgactgtctcttcctcagtttttagcctcagcacttctccagcttgatgatgctgacctggaggagctgagctggaggtgggtggcaggcgtgtcgccttgcagaggtctctgcagtgtcttcaagcacagaaacagcatttgtccttaacagacagaaatgtgacacctcttcaggcccagcagatttagaggaatctgggattcaagatttttgagtgcattcattcagatggccccatcgcaagcctctcttcttcccagtcagggcctctcttcttcccagtcagggtccagagcttggaacagcaccttccgaggccgagcacccgaacctggaacaacaccttctgaggccaagcacctggccttctctggagctctgccttctacacggttaagtcctggccctgatccagtgttttggttttcctctggtcacaggagatgagtgtcttatgtggcactgaggaggcccgttagcgtgccacccttttgtttcaggtggtgatcttttcattatcttgccctcaacacgagccacctgattccatagtccatgtatctgtgactttcccgaactctccagcacccgagatcctgccgctgccagtgcatttccttccaaggggctcccgtcctggctgccactgctgcagtctggagattcactcctgaccccagctgtcgcctggaaacaaacaccaaagcgagatccgcgttgagtttatcagcaggcctgtgagggtggagggatggcagagaagcagctttgtggctgggctgccacagaggactccactggtcctcggagaaacacaggagccggcttgcttccagtggctccaaacggaagcatagtctccgtcgtaaagcaggggtgtggatggcgtccacagcacccactgcagacgccacccagggccagcgctagacgcagaggctctgggttggaaccaggggtgccgccttaacctcctgttctgccccagtgagcaccaggcttgcaagggctgaggatgagagaggcccctgtggctgcaggctcccagcagtcaggggaagaaaggccattcattctttcaacgcatggaactgctttttaggaagtgaaggtaagcagtggaaaaaaataggcctctatcttcatgaagctcctgttcctctccatgcagtgtgtgtgtgtttgtgtatgttcacgtaggtgtgtgtatgtatgtttagtgtgtatgtctgtgcatgtgtatgggtagtatatgtgtgtgctgtctgtgttgtgtgtatatgaacatatgtgttcatgtgtatatgtggtgtgtgtatgtagggtgtgtgtatatgtgtgtatatgtatgtgtgtacacgtgtgtagtatgtgtgtggtgtctgtgtgtggtgtctatgtgtatgtatatgtatatgtagtgtatgtgtggtatatgtatgtgtgtatatatgtgtagggtgtgtgtgtggcactgggtgcaatgaagttttgcaacatagaggagggagtgtagtctcagttcatatacacacctacagttcatacacacacacaaacatactcctcagagaggaggtcagggaggaggagacctcgagacagaagaaagggaggtaagggtggtacctgcccatgctggggtctgcagggggactggggggggacctgcccatgccggggtctgcagggggacttggggggggacctgcccatgctggggtctgcaaggggacttggggggggacctgcccatgccggggtctgcagggggacttgggggggggacctgctcatgccggggtctgcagggggactggggggggacctgctcatgccggggtctgcagggggactggggggggacctgcccatgccggggtctgcaggggaactggggggggacctgcccatgccggggtctgcagggggacttgggggggggacctgcccatgccggggtctgcagggggactggggggggacctgcccatgccggggtctgcaggggactggggggggacctgcccatgctggggtctgcagggggacttgggggggggacctgctcatgctggggtctgcagggggactggggggggacctgctcatgctggggtctgcagggggactgggtgggggagacctgccggtgccggggtctgcagggggactggggggggacctgcccgtgccggggtctgcagggggactggggggggacctgcccatgccggggtctgcagggggactgggggggacctgcccatgccggggtctgcagggggactggggggggagacctgcccatgccggggtctgcagggggactgggggggggagacctgcccatgccggggtctgcagggggactggggggggggagacctgcccatgctggggtctgcagggggacttgggggggggacctgcccatgccggaggtctggggtggggggctgtgtgtgcgtgtatgtgtccccgcccccctcgtgcgtctgcagcaggtgccttcggatcgcatctcaggagctggggctgggcgcgggattcctcccctgccagatcgttgtacgtgaacttctcttggcaaagttcgtccgcgagtcaatcgctcagcctcgctcagcgggcccgggccgcgccggcgaccttccttcgtctcttccgccaggcagcccgctggggtcccttccgctcagcggccaatccgcggggcgggggcgggggccgaggcctcgggggaagccgatccctgcgccccccgggtctccgccacccgccagcgccgtccctgccaaccccgcccctgcagggcccgggccagttgggagcaggggccgggccgcgggcggagcctcccggtccccgccctcgccctcggccaactggcggtcttgcaggcgggcggaccctcggccgcgctcggggctccggcgccgccgctcctcctgctcggcctgagctgcccgggctcggcgcgcgcttggggcgaggctcggcgggcgcggacgcgcagcatggcggtggaggacgaggggctccgggtcttccagagcgtgaagatcaagatcggtgagtgtccgccggcagccacgcgtccgaccccccggcccgaccctgtcctctcccgcgcccgcctcccctccgcagatccttgctggggaccccggcggagacgccctccaggcgcggcgcgctccccggagaacggctggtccggctccgcggcccctccccacctccccgcctccccgggcctcgggctgggtcgagtcggctccggggtaacgcggctccctgcgcctcctctgcgcccggagcggccccggtccctggtagcggcggaggaggtggggtccctgcgccgagggacgtctgtccgcgtgtgcgcccgagcgtgtgccccgcgtgtttgcaggagtgcgcgcgcctgaggctgtctgggcgcctgcacttcaggtgtcaaatccactgacgtcggggtctcggcatctccctttctccgctgcgcccagaaacttcctttccggggaatgtggaggctccttcacgcttctccccaggggcgtgaggccccggcgcgctgctgctgctgtgcgcgcgcgtctgtgcctgcgtgcgcgcgtgtttgtgtgtgcttgtgtttgtgtgtccatgtgtgggcggtgtgtgtgcgcgtgcgtttgtgggtgcatgtgtgggtgcgtatttgtgtgtggatgcatgtgtgcgcgcgtgtgtatttgtgtgtgggcgcgtgtgtgtgcgcgcgtttgtgtgtgtgcatgtgtgcgtgtgtgctggtggggcgttctggctgagggctcccgcggggcggggagaccccggacccatcggcaccacgtccctttccactgagaagtggcgggcgagctggtggcgaccagggcctgcgaggctgcggtttttctctgggcttcagcagcttctgaagtgggctcccggaggcgtttccggagaggag

SEQ ID NO: 6279 - DNA, 6000 bp, Homo sapiens; identical to SEQ ID NO: 3640

SEQ ID NO: 6280 - DNA, 6000 bp, Homo sapiens
aagccgcagatatgtggggtgagaagtctagagatccgaggcccagcatgagccctatagtggcaacattgtattagatccaggaaatgtgcacagagtagattttccatgctcctatcacacaggccctctccccgccaccccacacacagagggtaactgtgggaggggatggatatgagaatttgcttgataatcataactatctcactgtgcataagtatatcaaaatatcatgttgtacactttaaatataataaaaagcatcttattacacaacataagtcacagggaatgaaaactgtgggaacctaaagtaccccagccattgtgacatttcgggggagctgtacccacagaaggagaaggtgtgcctgtctgagcccctcacaggcccgcacctgcttctggaaacgccactgctgattcccatcagtcatggtgtttacagctccaggcaggatcatcactggagctgacttgctaatttctgaaaagccagtatttcttttctggaggatgttcatatgccaatctcaggatttcctgtgcatgaagaaatgaggacacagtgtggaagcgtgcttgcctgaagctttgttttgttttttcatcctggctccaaccccaggcggccctcctctcgtcgggagaggaacactggccgagtcacagccagtcgtgctgactggatacaggtgcgtagggagggctccaggtggggactgtcccatgtgtaggagaggaatccagggacagggagaggccgagtgggcagcagagggacaggccagtcggacgcaaagcaggaagtggagcttcctcttcccattgtcatctggatcctcccgctccgtgtggggatcctcacagtcacacctctttgagccagctggtggccagcctgcgcacaggagggacctcctggggtccccaagggaagccacacacacaaggccccaactcagctgctctcccagactctctccccactttcttggcgggtgcaaagggatggaaaaaaatctgaataactaatcctaagtagtacaagttatgccatttcccccagagaaacctctttcctctaaactctgaaggcacttagagcccataccagttagtgctaaattattttcccttttggcccgtttactattggttcttcactaatttggtctctccaactcaagtccaacttcctagagggcagaggatggcatgattttagtaccatatctccccaccacccctatatctagtacagcttaaatacatgaagtatataatttaattaaaacaggctgaaaatacatatatcatgacatcctatcccaaatatataatgttcgtcaatatgagcaggtataatagagaaccttggcgtggataggcttgttttgaaaagcagcaaaacctcaagcagaagctgctactagcacatgtgggctgaggaagtctcccggctgcagcctggcctctatggccaaccctctaggagccatttgcactgggtgggatcagggtacattgctcagaacattgtgggtgatggccctgggaccgaacgtgtctcaggagaaatccaattcctgattctacaggtaagtgcctccagatgcctgcatcacagttacccagggcctacccacctcaaggcagagtcgggtatccagatgactagaggcagcaaaggacacgattctggagttagggttggggaatggccccattttccttctttggtagaagtcaacactccaggacacctgaatggcaccagaggctgccacaagggccatagcagtgacagctgagactagtccctggcagaagccaagaactctgcaggatcagagaggtgccagagaacctgaccatggaaatgtttttgtcctgcttgtagtaataaaccgtcttccacccttgataccaaaaggaataagcagcaatcttgggctcaatggctcacacctgtaatcccagtatttctggggcagaggtgagcggatcgcttgagcccaggagttggaggcccgcctgggcaacatggtgaaatcccttctgtaccaaaaaaaaccacaaaaattagctgtgcctgtagtcccagctactcaggaggctgaggtgggagaatggcttgagcccaggaggcggaagttgcagtgagctgtaatcacactgcactccatcctgggcaacagagcaagaccgtcttaagaaaaaaaaaaaagcggcaatcttctccaaggatcaagggagggtgccatcagttagtactttctaaagctgtgtcaccatctctttttagcccacttcccctccccgctccccatccctcagtcaagtccctaggatctgagtttgcttttggagcttgaactggccttgagctcagagacatctctctgcggaccctgcttctctattctacatctgtcccaatagttggagcaggggctggaacagcttaaggtgagcagcagccacctgttcccaaaaaacccttagcttggattatcagcagacagtggaacatcagtttcgtacacattttgtatttctcaccccatctgcaaacctttcctttgaagagtattccaagaatggaacccagagctccccagaagcacactgttgcttgggtttggactagaatttaatgttccctccaactctagagaatccatgatgtgtatctttacaccagatgccactaggagtcttcctgtcccttatcattttagttaagaagtgactcattgctgtcatccttgcttcacagagggaggaacccaggcttcagattctgcccttttggaacggaagaaggagggagagcggggaaagacctatgtgtgcagcactatggagacagttcactatgtcgggtacaacacattcccttagtctcatttgaaagccatgatgaacagagaggtgtggaaaatctaagatcacaaatatgccatgagaaagtatctttgtctctactgctactttacaaaaccacgtctctaactgctaacacttcaaattccctcaaaataagcttcttttcccaattgtccctcaccaccaactatagtcatgctctgaaattattatggaaatttagcatctgaaaggaacaggaagttataattaattcctaattagaattgggcacaagcttttttttcttattttttttttaatttttttattgtgacagagtctcgctctgtcgcccaggctggagtgcagtggcgcgatctccactcactgaaagctccaccgtctcccgggttcatgccattctcctgcctcagcctcccgagcagctgggactacaggcgcccaccaccatgcccggctaattgttttgtatttttagtagagatggggtttcaccgtgttagccaggatggtctcgatctcctgacttcgtgatccgcccgcctcggcctcccaaagcgttgggattacaggcgtgagccaccgcgcccggccgggcacaagcttattgtttttcttctaccttttctaaatgtacccaatgctcttcatgttttctgccagatgttctagtcactgcatgatgggattgttacttttgctgcttctctggactcctcactcttagtcattttaaatatggtcaaaatgacaatctttcttaccatatttgatatataactttcaaaaagaataaaacttagcaccctcctattagtccttatctaaatggaaacttattagcagagcatcaagggcccaataaagtgccccctcttttgaaacttatctctactccctttcatatatttcaatcatgtcaatttcttattgttcttctaaataggtgctgattactaaactctattcgtgggttttattttttatgttcctctccattaattaatattcttcactgactttaagacttcacgattcattcttttaaaagaacgtgtttgatttcctccactgttaactgctaaatatctctctgatatattgttttcaggctatctttctcatctggagtaattatgtttcaagtgtcagggggaaaataccttttctatcctgtgcaaaaactcatgctgggcactaagagcatggagcatgtcccagttatctattgctgcataacaaaccaacccaaacttagcagtataaaacaaccactgctttagtatgcacatcaactttcagggtcagaaattcttttctccttcatgtatagagtctcagctgggagtgacataaataggtggagacagacctctccagcccagtccagccaacagcctccgctcctgcgcacccgcagcctggggccccaggttcctgtggtctcaccgaccctaatcctctcatctctcctccccattccctctccaaattgtttcagaattccaaattcttatctggatccggcaaattaattcagctactcttcagagtctctcagttattcccaaattctctcggaagcttgaatttacctatctaaatccattctcaaaaacacattggccttttctagccgggacatctccaacagtagttgctgttagaaactgcaatttccccttctctgcatacacatttttataaattgatttattggtaggcaaattacatttttaaaaaaaggcatgtgtgggttttcagggaagcctggacaggacgtgggcgtgccgggagctcgccggagcagctggtccggctctgggcgcccagcggaaccagggctgtactcacctggatgccggacccgccccctagagaccccgccccctggcgttcggctactaaagggaaggggattcccagggggtcctcaatcctggactctcccgacccctagctgtcggtccccctccctgcgcgcgcgccggcgggtttcctaccctccgaggcgtccgctggcctgcgccctggcggggacgtgggcggggcgggcggcatttaaggctggtgccacctccccggtgcagcggctggcgatcggccgcggaggtgcgtgcagggcccgcgccgccgccggtatctccaccgccaacacctcagccactgccactgccacagccacacgaggccccccaccgtgcgctccgccgctgcggtcccggatccgcgctccacgcccgcagcccgcggcgccaccagcccagcatgcaccaggtgcgtgcagcccccgcgccggccgaggatgcgagacgctgggccaaggccccggggaccggagcaggctgacgggaagcgaggaaaaggcgaagaggagaaacgccccgtcccggggcaaggggaggccgcctttcctctgagcgccccccggcctgggcaccgcttctctgactccccgccacggctccgtgcggccgccggggctggctggggaaagaagccagtccagaggagcgagaaggggccaaggggtcctaggccagctccatggcacctgcgggctccgactcggaggatggggtgacatggattcgttgcggtctgaaaagacttccggttagggccccctgatcaggactgagggtcgtaagcttagtgggtgcctcctccccaagaaacaggacgcacagctgttgtgtcccctgggaaggacacctcagaggaaacctcgaggtgcctaaggaacctcgaggttctaaggaaacctcacagctccttggaggcatcagtcaggagttgggggggtaacttcccacctgctccacccagagaagggtcaccctgaggagctgctggctggcctgtgcccaccccgcctcccctctacacggacggagaggaagccaaggtcggcgggaggtgggggagagactccactgtccgactccctccggcctccccagaggagggaaggaaagggagaaggggctcctgactcctgcaggtcctgaccccgcagaggggcgctcagcacctcttcggaaaccccatttggggccaatattgcacctgggcttctctttcagaaaaccccagaaattt

SEQ ID NO: 6281 - DNA, 6000 bp, Homo sapiens
ctacagtataccatcacgacctaagctcatactatttttttgtgataccctcctttgcatatgacttccattcttaaagtcactcatggaccaagatggctattggagatccagccattgtgtctaagttccaggtagtaggaagaaaggagaagaaagtcaaaacagatgtatgccagctatctgtccccaagaaaatgagtgattctggaagtctcatctcatgtttcctacccacctctacctatagaggaagctggagacatatagttgtttatctggttagtttgccactttggagaaaactgaggttttaaggaagaaggaaggaaagaataaatattggtggccagaagacagcgtccatcatttatcttatgttgacattgcttagtttctcttctcagccttccttatccactaaagttgtcaagtcataaaagcaactttttcaggtcccatctctgccaataggaagggtgtatttcaaaataaatgactatagtttgaattacatacatttagctttatggataactccttacatttatttttctcatttattgggtgatgagtgaaaaaattcatcaggaaatagacaattactgttctgacctgtgattgggaacttttgttttaactttaagcttttcccccttaactttgtagtttgaaaatttcaaacctacagaaaagttgtaaaattattacaatgaacacccatataccttgttttgacagtcatcctataatttgcattattgatttatctctctatatacatttggttgttgctgttgttcaatcacttgagaacttaatgaatttttaaagtggaaggacactactcaaatatttaaaaccctaaaatatttaagaccttttctgagaataattttcaagataaagactgtgattgaaggcaaatggttacatgtaatttctaaaagataacctcttttctggatatttcagaggaccagaactggagatattacagactcctttcaatagacttcagattcccacttcttttctgtcttagaaccgctgctgagagaggttctcaaatggttatcctgatctgaacacccccaccaaagcaaacctattttagatatgttaatgcaaacacaaattagaagttttagcctgggcaacacggtgaaaacccatctttacaaataaacaaattagccgggcatggtggtggacacctttatgtagtccgagctactcgggtggctgaggtgggaggatcgcttgagccagacaggcagaggttgcagtgagccaagatggtgccactgcactccagcctgggcacagagccagaccctgtctcaaaaaggaagaaaaaaaaaaagtaaattttttacagtgctatttctgtttggataattcagtttgattatgacattaacaatgtcatcatcctgctggcaaatcagcaaaagatgcagttctctaacagaatgcttacaatataagaagcaaggaaagacaagatggcctactctagaatttagaatctgaagcacttgcttcatccctggaagcagcaattcacatagaactgacacataggttcaagtcctctaatgttaaaaagcgtaatatttagaagatcctttgggataggatttgttactctacctagactaggtcaggaaggttaagccagattccagtgctccatggttctgctcagttgcagataggattcagacttatgtatgcgtaatgctcagttactgctattttactgttttccattcactaaccaaaccattgagcttattgaaagctgctttctttggagtttcatttctgtagaatgtaaggatgtaatttctttcttcactaataggacaagcggcacaaggtatatgagatgagaaggggtctccaagatttagtcttatacttagtgcatctagtggtagattgcaatactgctcatcagatattccagattttgtctctgcagtgctcctccttgagtgatttggggatttattatgtagtataacttaaaatattctgccagatacaaggcaagaaatgctacactaaaattttgataaagttgaaaggatagtttgcttgttaattggaatggcttcccccaaaacccaaactttaatctaagtcagacttcctttatttcttttataaacgttcagcttcaaaacagttatagatgtggctgggcgcggtggcttacgcctgtaatcccagtactttgggaggccgaggcaggcagatcacaaggtcaggagattgagatcatcctggccaacatggtgaaactccagctctactaaaaatacaaaaattagctgggcatggtggcgcatgcctgtcatctcagctacttaggaggctgaggcaggagactcgcttgaaccagggagtcggaggttgcagtgagccaggatctagccagtgcactccagcctggtgtcagagtgagactccatccaaaaaaaaaaaaagttacagatttacagaattattacatagtgtgctcatattcctcacacccagtttcccctattaggaaattagtccctatgatatttttacatgttctttctttcctgtgaatattacaagtcttgttcattattatatatttaagtgccagccattttgctattactaattgtaggttggtattcttcaatagttttggaaagaatacacgagaaaatcaaaagacatagggagtgcctttctatcttcccataaaaatcatcaggatctttttttttttcagtcaaaaggaagtctcctagactttatgtgaacaatcctcttactgaccaccctatagccatcactgaaaatagctttctctatatcaccgaagctttaaaactcacaacaatcttttatttttgcctcctgttcgataactatgaagtttttatttatatcttaatccaaatatatcccttttttcttttttatcattcccattatgacttctatgacgtttaaaatgttatggccgggcacagtggcttacgcctgtaatcccagcactttgggaggccgaggtgggcagatcgcttgaggccaggagttcaagaccagcctggccaacatggtgaaaacccatctctactgaaaaatacagaaattaaccgggcgtggtggcgtgcgcctgtgatcccagttacttgggaggctgaggcaggagaatcgcttgaactcaggagacggaggttgcagtgagccgagatggcaccactgtattccagcctgggcaacagagcgagactctgtctcaaaataaagtaaaatataaattaaatttaaaaaacaaaataaaatgtacgtttctttttaattatacaaacacagaggtggtgtattagtctgcttggctgatacaacaaaataccatagactgaggtggctataacaacagacatttacttctctcaattctggaggctaagtcccagataaagatggggcagtttgggttccaggtgaaagccccttcttgctctgtcctcacatggcacacagaggagaacaagctcttcgttgttttttctcataagggcactaatctcgccatgggcgacccaccaaggtgacctcatctaaattgaattacctcccaaaggctccatctccaaataccaacatattggggtggggtagggctttaacatatggattgggggaggagggaaatagttcagtccacagctggtggcaatgcccaagctcaacggaagattaaagtactgaattagggagaactgtgagatgaggttagaaagactaatcatacggaggtcatcaagtgccaaactaaagagccactgggctttttagatcataaatccgggggttgcttatgggatggattttgttagagatcacgagtaggaaaaccatttgggggagtaatgtaacaatccctgagggaaaaataaaaactaacactatgatgacaaccctcgaatgcaccaccaccaggaagcctttcctgatgcttcgccagagaggttctctttaaacgcgaatttttcttgagttatcctagaaatgtaagttacacctcacatttcgccttctttcgtacatgttcctgtgcgtttcctaatccttccactttgtagttcctccagcaccggttgtgtccgagggcccttctggcggagccacactcgctcggcccaaggtcccgccctccagcatcaggatgcacggacagtatttgtggacttgaccgcatcccaggaaatccagcgggcctggccacttctgggcgccaggaccacagccggccaccccacggacgcctgggacgctcttctgggcccccttcggggctgggcgtcgggctcgcaacaactgcgaccaactggctccgcgaggcctggggcgcaggggtggggctcacgtcgtgggacggttgcatggattattttcgattgatttccgaaccttcaggaagcagacacgctccccttccttcttagggatggggcggcagccaacgaaagcccgaagccgcctccttttctgagtggggagcttagagatgctcaggagggacctccccgattctgcgattctgagcatcaattttggcaggaggctagatagaagtagcaattgacattcatcaccctaaagtgcggattatgtcagtacagatgctacgatagaagaactaaaaaatgacagaaatggttttactgtttttaaactctgggagcctactcctttaagagattaggcagtacgcctattctcgcctggtcccagcgtaccttgcgcggctcgccgtcccccactcacgtaccagggctcattgcgtgacggttacacttccggcgggctacgtgcgcgcggcgagcgccgggcgtacttttgcgtggttgctccaccccctcagccttgccttcgccgccgttggggctggaagttcccgccaggtccgtgccgggcgagagagatgctgcccggcccgcctcggctttgaggcgagagaagtgtcccagacccatttcgccttgctgacggcgtcgagccctggccagacatgtccacagggttctccttcgggtccgggactctgggctccaccaccgtggccgccggcgggaccagcacaggcggcgttttctccttcggaacgggagcgtctaggtaaccgcactttctcgccttcctgggccggattcacccccacccccacccccgcaaagctcccttggtgtccccatcctgtctcttccctctggcttccttcccagtggggctggagagaagcacttaatctagccgcccggcgtcgtaggcctctcgccgcggtacccgggcccagcgcggcctggtgaagtggagggcgggatgggttctgtgctgtgaggtttccagaatccacgtatagttcaggcattatttggacctagtggggtcttgactgcgtggaagggccttggggtctaccccggagctttagcgatgtgtcagtcttaggcatagaatgaacattgaatgaatgaatgaaattatagcatactgtggagttttatgatagataattccgatttcattgcagcatttgcggttttggatatgacggtgttttaataactttgtggtttttaaccagcttttcaagcttttgtgccacatgggaccttatctgtttttgttaaaaaaaacaaaaacacttttttacagtgtttattagtggtaattttctgcagtatgtgcagattagtatatctgatgcgagaatgttgtgttgtaataactcaatttgtcttttacttaaattacaaaacgtaggtagcatgttccttgtttttgtgcaacccattagttcaggtggcgacaaaaacataactatccagaaagaaacaaagtggtgagacattttaatgagagatttaagctttagaactcaattttttttaagataaaggtggaggggttcataaagttaaggagtgtgcacac

SEQ ID NO: 6282 - DNA, 6000 bp, Homo sapiens
cctaatgaacagggagggcaaccctgaatggggagtggagggaagagatgtcatgagatggcaacgtgcaccctgaagtgaggatgaaggctatgtgaatgttgtaggctgacagccgggcatagtggccccgttgccatggcgatggaggcatgttgatgcgaagtgtctgcacagctcctaggatttttaacagcagctgggcagagcctcggcgtccctgaattgttgcccccctgagtcactgcttggccccagctgtcctgatctctgttgacaaatggttgtccttcacagtcaaactactaacagtactctaattaatgaatgtgctaattattcttgcctactcccagcatatttgtctaactaacctgtcacacacagatcagtgcagcatatgcataattacggagagcgctgggagcaggggatgggtgggagaggggtgggctcgcagccctgtcgctgtgggatatttcttgtaaagttacctttgctaacggtcagatgtcgtggggatatgttatttcccgtgaagtgtatatgtcttcctttctttcctttctaagaatctctcttcagggctgaggggccattgctcagtgctttagcctgtgaggggattgccaggtacaaatgcagaaggaccagggagcccaggttctgaagacgattccggtagcagcacgtagggtgattaaaactccagactttaaagccagaccggcctgggcttgaacccttgttctgctccttgctatgtgggtctttgccttgaccacattttttttttttttttaagacaggatctccctctcttgcccaggctgtaatgcagtgttgcgatcacagctcactgaagcctccatctctacagcctcaagcgatcctcctgcctcagccccgagtagctgggactacaggtctgtgccaccacgtccagctaatttacttttgtagagttgggggtcttgctatgttgcccaggctgttctccaactcctggactcaagccatcctctagcctcggccttccaaagtgctgggactataggcgtgagccacggtgccaggcccttgaccacatttttaacccctctgaacctcagtttcactttctgggcaatgggaggggggtaatttgtccctcagagggttgcactgaggggcaaatgtgaggctctgggtacaatgcccagtacagactaggtccccacgacacagccgctcagcggctccggattctgggctgctctggactgcggccaggcggtcttctgcgggaatccgggcaggcagggcgggctgcgctcccctccccggctctcccggtgccccttgtctttttgttctgtctcagcagctctctattaagatgaatggcatttccaaaggcttcacctctgataagtgttcctctgcagctgcagccagaatcttaatgtgcgcgctgtaatttaatggccgtctcggctattaacacgctcttctcgggtgaagtggactccctccatccccgggcctctgcacgtgctctgcgcgctggctgggggtgactccaaggagctcagagcggggtgcccggcacctctcgccaggcgcctttcgaccttctaaagcgcgaatggctggacttttctcccatgtgtggggccccagaaggtgtggggccccagaaggtgtggggtccctgcgttccacggagcccggaaggtttccagtgatggtgggggctgaccacgttggtccccgtgggtgctgttttcatgtgccggcagattgggatgagtttaaaagacagaagcgtgtaggatagagaaacttctttaaaaactggaaattttaatctggggattataactattggacagtcaagtgcaagagtgaatacacttctcactccctcctcccaatttttatttgcgggattagtcagtccccctctgccacatgataattgtgagaactaccagggtcttcattctcctgccatctggttgacctctccaagaatggacacccgggcagcctgggccaatgaggctgtcctaagagtttagatgagagaagtcagtctttgacaggtgatggaagctgtaaaatgtaaaactccacagttggtgaagatgtctccaggaaacaggtctgcagagagaatacgtttgacatgctaagagaagctgagagagagcgagaggagagattggaagaaagacagagacagaggtagagagaagggaaagagagagagaaagggacagaagagagagaaaaaagagggggccgggcgcggtggctcacgcctgtaatctcagcactttgggaggccgaggcgggcagatcacgaggtcaggagatcgagaccatcccggctaacacggtgaaacccccgtctctactaaaaaatataaaaaaaattagccaggcgtggtggtgggtgcctgtagtcccagctactgaggaggctgagacaggagaatggcgtgaacccgggaggcagagcttgcagtgagctgagatcgcgccactgcactccagcctgggcaacagagcaagactccgtctcaaaaaaaaaaaaaaaaaagagaggaagggcgggagagagagagagagaaagctctctagctccaaggcctaaccacatctctgttcttttcaacttcagctgtcagatttttagactctttgagtgaataaattctcctttttgcttaaactagtttgagctaagtttctattgcttgcaactggaatactttgtaagaggactggccttcatttctgatgcattgtcactaagatgtaagtgttagaagagctaacgctttatggggttcaaactccttggctaccaaaacctaaacatcccctgaaacttaccaaactgcaggtatgaattggatctcactaaggtgaatatacaaatcttgcaagtgctgagccctaaccaatcttgtaataactctgtggtagttaattttatgtcaaattgattgagctaaaaaatgcccaggtagctggtaaaatgtttttttctgggtgtgttagggagggtgtttctgaaagagatcagcactggaatcagcggactaagtaaagaattcccaccctcaccaatatggtgggtgtcatcaatccactgagggcctgaatagaacaaaaagcgggcagaagggcaaattccctcttcttcttgagctgggccatccatcttctcctgcccttggacactggagccccttgttctccagcttttggattcagactgggtcttgcaccattgccctccatcttctcctgcccttggacactggagccccttgttctccagcttttggattcagactgggtcttgcaccattgccctccttgatgctcaggcctttgaatgcagactggtctccaccagcagcttttctgagtctccagcttgcagatggcaaaccatgaaacttcatggtgtccatgagcatgtgaaccaatttctattataaatctgcaatatatatatatgaggagacttatttatatattggttcagtttctctggagagccttggctaatataaagtctatactctacaaagtgccctaggtactcagggagtacccaagtgtgtcatgaccagcccgacagccctggctgctggcttccccgcacacaactctgcacgctgccttcatcagcctttctctctcagctgaaccgagggcattgaagcgggcctctggcactgtacctatgagggagcaatatcttcccctacactgacctcttccgtgccgagatgcagccctccctgctgccactagttacagtggtccatgttccctttcaaagtgaagttttgataaaagcacctcttaaccaatgccaaatagctaagtctgggacaaagattgcaggtattttgcattttccatgtaacctcagagggattgccattcacactgatctgagctgcagaataccaggcagccacctcacccacccagcaggtccactcttatactttctcagaaagcacagccactctactcttattcagttgaaaagaatttccaggaaggtgtttctgcgattgcctcagaaaagtcagttccctttgggaatttcccttagggatcatctgtaactccatttctgccttttacctgaattctttggtttggtttgaattctttggtttaatttatgaattccctttattacttttctctgaagaaatggagatatcagctgtccctccccactgccatttattccttccttcattcaaaccttatgtggctgctacttaccgtgtgttaagtgttcactttttttcttggaattcaaaaaaagaaggacagtatttggggcacagatcttttggtgttctatacatttttttaaagtttcattttacatttgtgtgtgcgtgtgtgtgtgtgtgtgagacagtcttgctctgttgcccaggctggagtgcagtggcataatcattggctcactgtagcctcaaagtcctgggcccaagcaatcttcccacctcagccacccaaaatgctggggttacaggtttatgccactctgtctgacctgaaagttttgggtttactttcccttctttctctttgctgaagtcagagatgatggcagcttccagattctctggtgcctgtgctgggctcgtgctggtcatggtcttgggtccaggattcattctggagactctcagggaagtttcccatgacaaggaaatgtaggagagtgtgctggctttgcgtgctcctctgccaagccctgcttctcctggtgggacacactgaaccacagccagggcattttggtggttagttaaaaaaaaaaaaaaaaaaaaaaaaaggaagaagaaggcactgtgtaattgtgccggggatcttcagaaattgtaatgatgaaagagtgcaagctctcacttccccttcctgtacagggcaggttgtgcagctggaggcagagcagtcctctctggggagcctgaagcaaacatggatcaagaaactgtaggcaatgttgtcctgttggccatcgtcaccctcatcagcgtggtccagaatggtaaggaaagcccttcactcagggaagaacagaaggggagattttctttgatggttgtttggaagtcaggcttaaacaattgtgtctgtgtgtgcgcatgcacaaacacttttaccttatctttattttcttctttttatttgaatgtatagggttgtgtgtatttctgtgtaaatttggggttttcctcctcttagtctttcacttttgtggtgattaccagtcccatttttagagccagggctgcaacttgaaggttttgctaaaaccctcaccgaagtgtctatgatcagcattttaactattaattaatgtggccaggcaaggggtggaaggtgagaagactagaaagggaacatgatatacacatttactcagatactgggcttttctaacatctgcagtgcaattgaagttaccagtcatctgcagtctaaaaagaaagtgattttgggaggtgcgtagaaaaaatcatcttattatttttcctctatattacttttttctttttttctcctgaagaaacttttttttttggtgataccttctttttctctagcacgtataattttggaagcatttttcatatgcagtgtatacttcagaaagagagagagagagaggaaaattgtcctgttcagcgtttgcatttccattattcctgctattagttaaaaacaacaacaacaacaaaaaacaagcaggatacctagatctggaaaagggagaattgtgtagagctgtcttcctaaagttctgagttagggctgcctcagaccactttcataactatctccagtggctttgtgttttatatttattaagatagagaaaaaaagagtaattactaagggcagctgctgtagctttatggtgattactgaacattgacatgctgtcacgtttttggaact

SEQ ID NO: 6283 - DNA, 6000 bp, Homo sapiens
ttacaatagttgttataaaaaaagatgaaagataccaagtgttgacaagatagagaaaaaagaaaatccttgtatgccattggtgggaatgtaaattaatatagccattatgaaaaacaatatagaggttcacccaaaaatttaaaaatagaaccaccatggccaggcatggtggctcatgcctgtaatcccagcactttcggaggccaaggcggacagattgcttgagcccaggagtttgagatcagccttggcaacatggcaaaacctcatctctacaaaaaatagaaaaattagccaggcatggtggtatatgcctgtagtcccagctacttggggagactgaggtgggaggattgcttgagcccgagggacttgagactgcagtgagttgagattgtgccattgcactccagcctgggggacagagtgagaccaggtttttttaaaaaaaaagaaaaagaaaaaagaatcaccatatgactcagcattcctaattcctattacgggtatatatccaaaggaaatgaaatcggtatgccgaaggaatatgtgcattgtgttgtttactgtattaccattcacaatagccaagataatgattcaatctaagtatccatgaacaaacaaatggataaagaaaatgtggcatatatccactatggaatactagtcagccttacaaaaaaaaggaaattctgtcatttgtgatgacatggatgaacctggagggcattatgttaaatgaaataagccatgcacagaaagacaaatactgtatgatctcagttatatgtggagtctgaaaaagttgaactcacagaagcagagaggagaacgatggttgccaaaagatgagatgtgggagtggaggggtggggagatattgcttgaaggatgcaaaatttcaattagatggaggaataagccaagagatctatagtgccacatggtgactatagttaataacaatatattgtatttttgaaaatctcagagtagattttaagtattcttctttttctttcttttcttcttttcttttcttttttcttttttgaaacagactcttgctctgttgccaaagctggagtacagtggtgtgatctcagctcactgcaacctccgcctcccgggttcaagtgattctcctgcctcagcctcctgagtagctgggattacaggtgcctgccaccatgttggtgaatttttgtatttttagtagagacaggagtttcaccatgttggccaggctggtctcgaactcctgaccttaggtggtccacctgcctcggcctctcaaagtgctgggattacaggtgtgagccaccacgcccggccagattttaagtcttcttaccacaaaaaaaataagtatgtgaggtaatacatacgtttattagctcaatttagccactctacaaatgtgtatatattttaaaataacatgctgtacatgaaaatatatataattttttgtctgttaaaaattaattaattaattaattttaaaaagaggagggcagggaatacttgtgtattttgttaactggacaaatgaaactctactttcatttgctcattaaacaaatacttgttttgtgctcagcatgattctaggcactgggactactgcattttggtccattacttccttgcgcacaaaaaccctttcttttcaccacgaatacactatgaacatgtttttttcttcagtgttggcatctcttgattccttccctccaggtctttgtgcgagttttactctttaaaccccagatattgtcatatttttctctgttaaacttttccaaacaactcaaaatagggtaatttcttcttcttctgaatttctctgacaattattctatgggtcatttattaacacagcataatcaaacaacttatttattttcatctttcttgatcctttcttcagttggatgttgtctttgagggcagaggttgtcctctatgttttgaagtctccacacagctcgtcgttgccttgcccgtagttgtagctcagtgaaataaaaatatgtccgtagaaggtgatgtctgtgactggtgagctgagagcttgtggggttggtgttgtatttgggtgcatgtgaatcagtgcatctcctgctccattggtgttaaaaggctcccatcgtcctgggaacacaataggaaagagaacaggtgggaaggcactggatgaaggaatgtggagaatggaggaaaagttgatcagattgttgacaactttcagtgttgaaattgtcaccaaaatcaaagtcagtaaataaatttacaatgtccttttcttcaatgcatcaataacttcaccttcctgttcaaagcacagcaagtaattaatctcttatttgcatttgaaacccaagtttcagatgtttgaaggtggttgtaaaaaataaaaaccaaaataaagccaaaataaataagcagcagcactaggccgggcacagtgtctcacacctgtaatcccagcattttaggagaccgaggtgggtggatcacaggagatcaggagtttgagaccagcctggtcagcatggtgaaaccctgtctctactaaaaatacaaaaattagccaggtgtggtggtgtgcccttataatcccagctactggggggctgagacaggagaattgcttgaacctgggaggcagaggttgcagtgagcagagaccatgccactgcactccagcctgggcgacagagtgagactccgtctcacacttgtggaacccagaacttagtaaccatgaacagaaccttaataaacagaaagttctggaaataaagtttaatcatcatgcaatctttatcactgggttaaatgaacaatcatctgggaacatgtcttggaatgcttaaagctttgagatgcatgtgcctatgtggcagacaaatttcaaatgtgaaacgtttagttaacttggtcttgctttttaatcactgctttaaaatttaaaaaatgctgctggtcaagtaaaaatagcaatagataaaatctgccctgagcaaacagaccatacatcaataaatgaatacttagcttaagcgattttccatgagacccatgaagcatttctaattgaaacttaacaagctacaacccaacagacactccaatcttcacttctagaagggaaatgtgatactccatgtagacgtagctttttaaatttagctggaagacagcgtgacagtgaagttgtgtgctgtaattttttaaaattgctgaagtgtcatggtttgctatttcgtatttattgaaaaaatgtaaatgctatatttaacagaatggcagtaactctgtttcaatctgaagacttaatcttactaatcatggtaatatatgctggctggagttgggaatatttcataaaatactggaataaatttgtgcttatatttcaggggaattaataaaagcaccttcatctgcaacatttaaaatgttattgcctttaaatttgtattaaataatgcagggaagatagatcactgggggagaatggatgcacctctgtgaggatcttggtcattcaacacacgtgtacgggtgaggaaactaaggcacgacttactgggtagggaggtagggatattagcaagatccttcacttgtctgggctttctgtctttgagtcacctttgcgcagtttttcactggacttcacaagcctctgaggcggcagggcagacaggacatccttattttatagaggaggaaacttaggcttacagaggtttcctgccccaaatcacaaaggtggagcctagaccttctcagtctccaccaactgtatttcggttagccacaatcctatctacccacatccaaatggacactgtggctctgcaacttctgtcaaaagggctctttggcaacaggaaaaacgtcatggctccattgtattgtagaggatgggaatgggtgttccggctaaattctccctcccctttccctccacagctcagatggcaaatgtgcgacccagggacctcccgctccagcagacctgtgcgcacaactttgcacagattacctgctaagtcagagccgaaaggtaacacagatgccaaaggataataaaggtgaatgagatttactcaaaattggaaacttggtgtttggtttttcaggagaacaatcaacgactgtgatttgaagttcaccagggtattctgagagatctaatcaaagatagagtgctggtttgaaattattaaaaggtaacagtaaaagggagagcaaaaccccagtcccaacgcaacccataaatctactttgtcttcctcgaaagaggggcgcgggtgggcgcgtctccccgcgagcatctcacctaagggggaatccctttcagcgcacggcgaagttccccctcggctgtcccacctggcagtccctctaggatttcggccagtccctaattggctccagcaatgtccagccggagcttctttgggcctccgagtgggagaaaagtgagagcaggtgcttccccagcggcgcgctccgctagggcccggcaggatcccgcccccaagtcggggaaagttggtcggcgccttttctccccgacgaagccgctccagggctgctctcagaggacgcgcggcaggcaaagagaatgaacctgagcgtccacgaaacgtcctgcacggctcccgggagctgggagaaacaggtgcctttctccgacgtccgcgggcgacgcctgccgcaccttgcccgctgccgcgcccctcccgggcacccctcgccctcggcgcccctgcccccgcccccagtgccagggcggaggcagtcccggctcgcaggtaattattgccagcggagcccgccggggagcgggggtgggcgcgccggcggtgggcgggcgggcgcggcggggcgcgggcataaaggggcgcggcgcggggccccggagcctggctcccgcgcagcatgcccgccagcgccccgccgcgccgcccgcggccgccgccgccgtcgctgtcgctgctgctggtgctgctgggcctgggcggccgccgcctgcgtgcggagccgggcgacggcgcgcagacctgggcccgtttctcgcggcctcctgcccccgaggccgcgggcctcttccagggcaccttccccgacggcttcctctgggccgtgggcagcgccgcctaccagaccgagggcggctggcagcagcacggcaagggtgcgtccatctgggatacgttcacccaccaccccctggcacccccgggagactcccggaacgccagtctgccgttgggcgccccgtcgccgctgcagcccgccaccggggacgtagccagcgacagctacaacaacgtcttccgcgacacggaggcgctgcgcgagctcggggtcactcactaccgcttctccatctcgtgggcgcgagtgctccccaatggcagcgcgggcgtccccaaccgcgaggggctgcgctactaccggcgcctgctggagcggctgcgggagctgggcgtgcagcccgtggtcaccctgtaccactgggacctgccccagcgcctgcaggacgcctacggcggctgggccaaccgcgccctggccgaccacttcagggattacgcggagctctgcttccgccacttcggcggtcaggtcaagtactggatcaccatcgacaacccctacgtggtggcctggcacggctacgccaccgggcgcctggcccccggcatccggggcagcccgcggctcgggtacctggtggcgcacaacctcctcctggtgagtgcgaggggccaggcggagggccacgcaggggagacagagggcctccacaggggccagggggaagtgtgggaactgagtctcccccagacgaggcttcacttggacacgtgtatgtggtcaccgggggaaactgagcagttctgacttcccttggaaggcgtggaattaggagagaaatcccttagtgggcacacgagtgagtgcccc

SEQ ID NO: 6284 - DNA, 6000 bp, Homo sapiens
acattttgtgaaattatttctccttttagtgtcattaaccagtgcattgtgaaattttgttgaaatagcaaatgcttgcttttccatgcagacattccaagtctgtcctctcacctctgacctgcgtcacacttgccacccatcacaaagccagctgctttgaaatctctgaatcgtgcaattccaagtacagcaaacggttacctggagcagagaggtcagtgtgttgacgtgtttcctgtttggaacctaggtctgaaataccattgaattgagctacctctatagacagcagtgatccatgtctctaaaatgttgttctcaagaggccataggattcctaggaatttttttttttttgagatggagtctcactctgccacccaggctggagtgcagtcgcacaatcttggctcactgcaacctccgcctcccaggttcaagcgattctcctgcctcagcctcccgagtagctgggattacaggcacgtgccaccaagcccggctaatttctgtatttttagtagagacagggttttaccatgttggtcacgctggtctcaaactcctgacctcaggtgatccacccccattagcctccaaagatgctaggattacaggcatgagccaccacacccggccaggattcctaggaaattacactcagaacaaagtttgcatggacactttcttaatttagtgccaatcagatgattttacaatcacttctctgagcatctgagagataggaagcatttttaacatctatatatttatttctttcttcctaaaataaagatagcagaaagagccactgttgtgggggattttaagctgtggaggtgacttttataaaatattatagaaggagatgtatttcagaagaaagaacttccagttcctgcagcccttttgccttttttttgagacagagtctcgctctgtcacccaggccagagtgcagtggcccaatctcggctcactgcaacctccaccttctgggttcaagcaattctctgcctcaacctcccaagtagctgggattacaggcacctgccaccatgcatggctaaatttttgaatttttagtggagacggggtttcaccatattgaccaggctggtcttgaactcctgaccttgtgatccacccgcctcagcctcccaaagcactgggattacaggcgtgagccaccacatctggcacctcttgcttttaataagaagcctcggctgggctcagtggctcatgcctgtaatcccagcactttgggaggccgaggcaggcggatcgcttgaggtcaggagttcaagactagcctggcaaacatggtgaaacgccatctctactaaaaatacaaaaaaattagccaggcatggtggcgggcgcctgcaatcccagctactcgggaggctgaggcaggataattgcttgaacccgggaggcagaggttgcagtgagccgagatcgcgccattgctctccagcctaggcgacagagcaagactccgtctcaaagaaagaaagaaaaaaagcctctgggagggagcactgcacagtgtaccagctgagcgcctgacctttggagttggacagaactttgctgagtccctgcttttctcttagcgcctgtgtaatgtggcctcccaacaccttggtttcttctccaacctcattctcaccagccattgggctaggcaaggggacacagcaactaagttggacagaagacaaataaatgagagtttgtgcaaaaaacccaaaaaaggtaactttgtagactatggattaaaaatctgagcaaaattccgatagtttcttatagaacaaattgggaggcatggagaggagaaatgtggaaggcttgggagtgatgagagtttggaacagcccttgtcaggataggagaggaaggggctcaaggaagacaagagaaagcactaggctagggcccaatggctcgaggagagtaccaagcgccctgcatggtggactgttccagcaggctgatggaacacagggggttcaaaggaaccagtgatgcagtcatgctgtggctggggtttacaaaaggctaagtgactcactaaaggtcacacagggacatttacacaaacatcctggccccaagtccagtgctctttctaatctataacagggtctttcctttttttttttttttgacagggtcttgctcagtcgcccaggctggactgcagtggcatgaacacagctcaagagctcttgccacagcttccccagtagctgggactacaggcatgcgccaccacaccaggtttaaaaaaatttttttttgttttgatttttagtaaagacaggggctcactgatactgtcattgcaaaaattataaccaagaaaattatgatggtcaaagagatctgacctaactgactctatcttgcttctaacctccaaactgtccttgttctgggtgtaggcccaactaactctgggaggagcttagattatagtttagcgttgaaacaaagacgacaacagccctttcccaaaacaaacccccttcctgcctggggactaggccgccttgtaggactaacaaattagccacaagtttacaaattatggtttaggagtcatgcagctggagactgcaagattctaaacctccccaaatagctcctcaggatgacatcactattgtaaaacctaagatcacagataagattgagatatttttgcagagcctgtacttgatggattgatcagctggcactacccagattgataaactgcctcatctggttttgtggcccccacccaggaaccgactcagcgtaagaggacagtttagactccctatgatttcatctccaacatgaccaatcagtactcccactcactggccccctacccaccaaattatccctaaaaactccaaaccccgaattcttggggagattgatttgagtaataataaaactctggtctcctgcacagctggttctgcgtgaattaaactgtttctctattgcaattcccccatcttgataaattggctcagttgaggcagcgggcgagaagaacccattgggcagttacatcactgtgttgcccaggttcaactcgaactcctgggctcaagcaatcctcctgcctcagcctcccaacatgttgggattacaggcatgagccaccacacccagccaagtctgtccttaatcagggttcctttgggtctcattttctgaagctgcaaaagctattggaccaggtgacattgccaacccctttaagctgctgtaactgtagtttcagctgctggatctgctttcagttagttatgttccccatcactttggacaagtcatcccaactccctggcttgtttttgtaactcgattacagtccagaagcccaagttctaaagtgctgattctgatgagtgtccatgtaccaggcactctgatcccatcatagcatctactacagcctgggaggtctactcaagtgtgcattcatgttaagcactaacaccaattaaatcacttaaataacgtaggtaattatccaatagcacatccagacgtggtggctcacacgtgtaatcccagcactttgagaggccgaggcaggcagatcacctgaggtcaggagttcgagaccagcccggccaaggtggtgaaaccctgtctctactaaaaaatacaaaattagctgggtgtggtggcgcatgcctgtaatcccagctacttgggaagctaaggcaggagaatcgcttgaacccaggagggggaggttgcagtgagctgagattgcaccattgcactccagctcgggtgacagagtgagactctgtctcaaaaaaaaaaagaaaaaaaaagaaaaaaataataatccaacagcacatctaaacaaggcttaaagttgtaaaataaaattacactgtgtggagggtgtgtgtgtgtgtgtgtgtgtgtgtgtgtgggtgagagagagagagagagagagatgaggtctctgtcatccaggctggagtgcaacagtgccatcatagctcactgcggcctccaattcctggcctcaagcgatcctcccgccttggcctcccaaatagctaagaatagaggcatgtgtcaccacacctttttttttttgtcgttgtttgtttgtttttatgaaacggagtctcgctgtgtagcccaggctggagtgtagtgatgcaatcttggctcactgcaaccttcacctcccagattcaagcgattctcctgcctcagcctccctagtagctggggttacagacacgcaccaccacgctggataaatttttgtaattttagtacacggggtttcaccatgttggccaggctggtcttggactcctgacctcaggtgatccgcctacctcggcctcccacagtgctgggattacaggcgtgagccaccatgcccggctaattcctgtattttcatacttagttgtatttcctattagggccttggatcccgagtataattttgtactcaaatataatttataaataaggccttagcctcccaacaaggtcaaagtagctaaaaagtaagtcctcccaaccactgacattaccagcccccagcccccagtcccagcccagcgggctaacaagggtccggcctcagagagggtctcggggatcccagaggtgggaaagtctccggaggcgcaggccccgctctccaccttcaccagggtcggcggcagcaccacgccgggtcgcgggctggctgtgcgcgccgcggccccacgcccacttccgcttcccgtgctgggggcggtggcagggccggtgggcggtggcggctcccggtctcggctcgggcacggccctgggcaggccgcccgccagccgcaggggcgctcctgagcttcgcggggccgcagtccgggatgcctgcgcgaagggaggggcgaagggccggccgttgccgacgtgggtgttaagtggccgccccagccggcgacccggagccgagagcgggcggcggagcctgagctggacgcggccacgccggcgcggcggtgagcgcagcccggtctggcgcctgcagctgcggggagcgcgccaggcagagggagcggggagcggggcgcggggcgggcctcggtgtgcgggcggcgtgaccttcccgagcggcgggggaagcggccagcgtcgcagcgcacgtgccgcgggactcggagaatctcggggttgtcggcctccttcctgcagtgcccacctggtgggaacttttgtccttgtttgcccccaagtcctgtcatttggctgcggggctccgcgcctcaggggcgccagtgctgggcagcatggagccgcttgtgaatggagacttgctggctgcccaggagtgggcggctgggcaggggcggtgaacgtttagggtccggccaagaaagttggaagtcgtctccctgacctgttccttgcgaggcccgggaggagacgcgcctggccggtccttggcggcgaaactgatttgcatctccacgctttacctaaagcccgggctctggggactggatggcgagctggcctgcggctcctttagccagaagctgggatcttcccgcagcagttcgtgttccctggtggaaaatgcagcctcatctactgactctcccttccaaaaaaaagttattttccccaagggtcgagaaaagtgggtggtcggcactgttgttcctcagttgcaccctggtgtaatttgagagaggggtcaaaggcgctgaaaagattcttttttctattccaagtgctacagcaagctcataaatcaattttaattcatgctgaacagtcttgcctcctccaagccctgtgtcttctccaagccagagctacacataatgtgaattagctgcccactccttctgagtgaatctgttagtacccatcatcgttttctatcctaataattctaatggctatttgtagaatttatttgtttgtttatttttttgagacggagtttcg

SEQ ID NO: 6285 - DNA, 6000 bp, Homo sapiens
tgccatccatgtaagatgtgacttgctcctccttgccttatgccatgattatgaggcctccccagccaggtggaaccataagtctaataaacctctttcttttgtaaattgcccagtctcgggtatgtctttttttttttttttttttttttttttgattcaaggtctcactctgtcacccagactggagtgcagtggcgccatcttggctcaccacaacctccacctcccaggctcaagtgattctcccgcctcagcctcccgagtagctgggattacaggtgtgtgccactaccacctggcttatttttacatttttagtggagatggggtttcaccatcttggccaggctggtcttgaactcctgacctcaaatgatccacctgccttggcctcccaaagtgctgggattacaggcataagcactgtgcctggctctcaggtatgtctttatcagcaatatgaaaatggactaatacagaacccaacacacaattaatgtttgataagaggatgagtgaatgaatgaatgggtaatctataatgttactagatctctaatgctgtacaataagcacacacacacatgcacccacacaacgaacatataggcataattatgatatatgcgtatcattataaataacacatactcattaaaacatttgaaaaacaaaatacaagtaaaatttaaatgtaattaaaatgactgtctagtaagccatcaagcaaatttaccataattctatacttaaattgtttctaaatgttttttaatatcctgctgtgaacatctttgtagataaagcttttttaaaaaaaattaagagattatcaatttatgaaaaagccctagaaaaggaagtaaaaaaaaagtgagcatttcaaggctagtgatagatatttccaaaaatgtttttaccaacatttacacatgactttattgcatgtgttttaattttattattagcaaagaggcagttcatagctttttgaggttgaaattttggaaggtaattatgtctttcttcaaaacatgccttgattctaaatattgattctgaattctaagctgtggtactatttgtctaattcttctgttattatgaaataaagccttagctactatttaaataaattgtcaaggtttacagtgatttatagtcactgatgtgtaaatgagaaattgataaagtgagtaagaaaggaaataatttgaaaaggaaaacagatcttcagacccttgatgaagctatagaaacctatagcaagggaagtggttcttctgataataggctggagagtatacataaagaaatccatcaattccacaagaacgtgctctgaaaattcacgaggcaattgtacacatgcagctgtgtataagaatgatttgaactattccattttgtaactttgctgttttataagcagtgaagtaaaatggaaaatgatctgagaagtctgtgtgttctaacgttcttcctcttttacgccatgtttagtgttttggcactagtacaaccttgaagtaccatagaatgctgggaagcagttctgccagcctgtaatgctcatccttggaactcatgcttgctaaaatgtcctgtgacaaaaaagtacgaatgggttcaaatgtacgaatgggttcatgttgctcactttcatttgtgttagcacagagggaaaagagaaggtcctgcccagtgtcctggttccaatgacaggtctgccctttactaactgttatcctgagcagctcacaaacctccctgaagtttgtttttatcattcattaaatagggcaaaaaataatatccaccaactacctacctgagtgaaagtgagcagcagatgagaggtgctttggaaatcaacacatgagctattcttgcaatgccacattattagcgggggtcctttgcagtgtccaggtttgagtcattgaggagggctgaccatggcgaggctatgaagccctcactataaggaggtctttggatccttaccgccgtctccttccctatctctccccttcctcaatctagagcacctctgccccttgtcccttaggcatttttccatttccaggggcctattctaagatattactgggtgaaaaaccctaggaagcaaagaaatgtggaattgcagacacttgtagtaggtaataggaaagtttaaccatggtctatgtctttattagggcagtagacagtaggatgtggtgcagtctttctcaaactagagcttgtgattacatttttaaaatatttgttttcatttcaactcttttttttttttttgagacagagtctcgctctgttgcccagcctggagtatagtggcacaatctcagctcactgcaagatccgcctcccgggttcatgccattctccttcctcagcctcccgagtagctgggactacaggtgcctgccaccacgcccggctaatttttggtatttttagtagagactgggttttaccatgttagccaggatggtctcgatctcctgaccccatgatccgcccgcctcagccttccaaagtgctgggattacaggcgtgagcaaccacacccagcctcatttcaactcttaaaactatattcatgcatattctggatcaccaacatgacagttttatagtttaggattaccacatgatttcagcttccaccctccttgtttgtgcatatagaatatttttaataaagctactaaaaacagcagggttgttttaatatgcaaatgatatatacaagccagataaaggaaaaatggtattagggatttaccctgagtcaagtgttcccagtagttcaaatggtggggaacacagcatgctgctggtataacagaagtgtgatgaactcccaagcagctgtatagcagtagtcaggactgtcttcgtgttgccagaagcaatttcgttttccagcaaaataatatcccacatctcacttgagttgttaatgtgaatgttattggttatataccgttatatgttagttatatttctgttggcatgtaacttgcatgtctattttggtataaacatccaaagcttatgtcaagtcttatttttgttcatacttaagcaatataatacaattatttacatcaacattggggatctgcagattttttaagggctttgtacagcaggcaacttggagaagctgtggtatataaagggtgtcagacacagtcaggatatctaagttccagtggtgacgctgatgttaaccacctgattgcaggatgttaggctgcttgcttcacctctacgggttgtagtttgctcctctgtagacagaaagggcttgattatatgattttaaaattctcttccaacttcaaattctattctttttttttttgagacagagtttagctcttgttgcccaggctggagtgcaatggtgcaacgttggctcacagcaacctccgcctcctgggttcaagcgattctcctgcctcagcctcccgagtagctgggattacaggcatgcacctccacgcgcagctaagtttttttgtatttttagtagagacgggatttctccatgttgatcaggctggtctcgaactcccgacctcaggtaatccgcccacctcggcttcccagagtgctgggattacaggtgtgagccactgcgcccggtctcaaattctgctcttaaaagatcagagccttcatttgggaacatagccaggcactgatttgtgctataaagcctgaataaagccttcagactttacccagacaatggtcaaaattgctacgaagctgtttccacctgccttgactccagggaggagcaggaagaggcctccataacttgtagaagattgtctgttctccaccatttatttattcaatcgtttatttatagcagtatggactcatgggtatttattttattctgtaaattatgatccaatactatcattatttattttgttgctcaaatctacaatatgatttaaatggtagagtagaattacatgtctgtaccacaaattattattattatacattttgagacagtctcacttgatgcccaggccggaatgcagtggcaagatctctgctcactgcaacgtccaccttccaggttcaggagattctcctgcctcagcctctcaggctgattactggcatgtgccaccacgcctggctaatttttgtgcttttagtagagacggggttcaaccatgttggccagtctggtctcaaactcctgacctcaggtgatacgcccacctcggtctcccaaagtgctgagattacaggcctgagcccccgcgcctggtctgtgccacaaattcttgatccagttcttcaatgttggacatttaggttgtctccagttatttgataccattaatgatgtctgagatacacacatctttgaattttttatgtgtttccgtaaattagttttctagtaggggaattactggatgttggaaaagtttatgcttttggttttgatccaagaggcataaattgtcaacatgccaacatggaaatcatacactccacacattctacccagactacccagctgtaagcagagaggtgtagatccaagtctcctgccggcagggtgatttagcgcagttgtcaataatctgtacaacacgtaacaataaagttattgatgttgaggaaaagacttccggtaggggcatttctatttccattgggtcctgtcttctccaccttctacgtttcaaccggaaatagtcgtacccatttaaagccacgtcggtactggcctcggtcccgccccccacactgcggaaccgtttccggggtcagggcattccgtcccgccccgccgccggtgcagtgttggaagctccggttctcccggaagtggcccaggtctctctgtcggggtcccctccatctcgctgctgctgaaggccgcgagggcggcggcgatggcggaggcggcgctgttgctgctgcctgaggcggcggcggagcgggacgctagggaaaagctggctctctgggatcggagaccggacacgacggcgccgctgaccgacaggcagacggactcggtattggagctgaaggcggcggcagagaacttgccggtgccagctgaggtgaggtgatgggcaggaaccgggccggggcgatggggctgggattctcctcgggcgccccggcaggaccccggcctcactagcctctgcccaggatatctctccactcctccctggccatggtggcggatccggtgggaggggcctcatctcccaggctgtcaggcttcgctctgcctgcgaccccgactctaattctgcctggggacggctgtgggggtgtcctgcagctggtgctcgccggaacccagtcctcccccagcagcatgggacggttggcccggagccttgcaccgaacgttttgccccagacgaggcgtcctgtcagccgaggcgtaatcctgctgcccactctctcccagaaggagaggcagtcaacccgaggtgctgtgctgcaggacagtctccagcgcgtgctcgtttaccgccttaatgattcacctaggttgctttgtccatgggggtcttggggagaccaaaacttggtcctgagtgagtttcatttatcgcacattgaactatgagctctcaatcaagtgcaagttatgggagatcagatttatttcacctattgcaaagcaataaaaatgaattttatttgaaagttggctcagtacattattaagcagtgctggttttcggtgttagagtcaatgtgtttaatccacttaccattaggatattatgcactactgcttcttgtgtgattcaattcaattagttgtaatagcaggaagtaacatgaattgtcagatgtttgacaaacgttttccagttttgagggccaggtttaggaggattattttatataagcagtggtgatggttacttttgatgttggaagcattcttttctctcgctctgtcgc

SEQ ID NO: 6286 - DNA, 6000 bp, Homo sapiens
cctcccccactgtctacagcccccaccaggctcatacacttgttaaatcaatgaacctacattgatacattctatggattttgacaaatggataatggcattgtagtatctatccaccattgtagtatcatgcagaacagtttcactgtcctaaaaatcctccctgctcctcctattcatcccttcctcccttgccactaacgctgatcgttttactgattagtggtaaccagtgatctttttactgtttctatagttatgccttttctaaaatgtcatatagttggaattatacagtatgtagccttttcagactggcttctttgacttaataatatgtctttacatttcctccatgtctttatggtttgatggttcatttcttctcagtgctgaataatatttcattatctggatgtaccacagtttatccactcatctactgaaggatatcttggtcgctttaacattttggtaataatgaataaagcagctataaacatacatatgcagcgttttttggtggacataagttttcaactccttggggtaaataccaaggagcataattgttggatattatggtaagagtgtgtttagttttgtaagaaactgcggctgtaccattttccatttccatcagtgatgaatgagcgttcctgttgcccagcatcctcatcagtaattgttgtggtcgctgttgccgattttggccattttaataagtgttcagggtatttcattgtagttttaatttgcaattccctaatgatacaggtaaagatagatgtggagtatcttttcatatgcttaattgccatctgtgtatgttctttggtaaggggtctcttcagattgtttgcccatttttttaaaatgtggttattgcaactagggaactggattttttgttttatttaattttgatttgtatttatttatttgtttgtttatttttagggactcctgtgctcaagtgatcttcctgcttcagcctcccaagtagctggaactatatagcatgcaccactacaccctgttaagaaaaataattttttaaaatagaaacggggtcttgttatattgcccaggctggagtgcagtgactattcataggtacgatcataacgcactgcaaccttgaactcctggactcaagcaatcctctggcctcagcttcctgagtagctgggactataggcttgtgacactgcacttagcttggtggcctattttttaatgaggtggtttgttttgttattgttgagtttaaagagttatttgtgtattttggattcaagtctttcatcagatacatgttttgcaaatattttctcctagtctgtggcttgtcttcccatcttttgatttcactctttctatggtttgtgtttctcatcttttccatctttttcctccctttctctctctctctctctctttttttttttttttttttttttttttttttttttttgagacagagtttcgctcttgttgtccaggctggagtgcaatggcgcaatctcggctcaccgaaacctctgccccctggattcaagcaattctcctacctcagccttccgagtagctggaattacaggcatgtgccaccatgcccggctaattttttgtatttttgtattttttttttcttttttttgagacgaattctggctctgttgcccagactggaatgcagtggcgtgatctcggctcactgcaagctccgcctcccgggttcacgccattctcctgcctcagcctcacgagtggctgggactacaggcgcccgccaccacacccggctgattttttgtattttttttttttttttagtagagacggggtttcaccgtgttagccaggatggtctcgatctcctgacctcgtcatccgcccgcctcggcctcctaaagtgctgggattgcaggcgtgagccaccgcgcccggtcaattttttgcatttttagtagagtcggggtttctccattttggtcaggctggtctggaacacccgacctcaggtgatctccctgcctcggcctcccaaagtgctgggattacaggcatgagccacctcacccagcttctccctctctttcatcagtgcagagcatatccagtcttttcacaaagcaaaacaaaaatcccaagtgccacagccagtcaaatcaaaagagatctgcatttgttattaggataattcctaaagggtctcgggatattatagagcccaagatttgaaaaagaaaaaaaaatgcatctgctagttcaaggaaaataatgataaattattttaaaattacatgaaaataatttatataaaataaattaaaataattgaaaagcatatataatattgaaataggaagtcggtaagaaaaataaacagtgcttaagtctctgaagaggtcagtcaaagccttcaaagctctcacctagaagaaacacttcttttatgaaagttcagacaaagccacaagatgaccagctaaactcacacattgggttaagagaagaggcaacaggagcacatttcaaagggcttattcagtgacgttgtttcaccaaggaccctatacttgtgaaaaataaaataaaataaagttttccaatcattctgtaaaaccacaagaaatttctctgaataaggaattgtttccttgagaaagaacagacagaatagagatgtaaagaacctaaaaagaaaaaaaaaatccctgttgaagcacataatgcaaatctattaaaatattttagaattcagttccccacttccattttttcctccctcctttggtaagcataaaaacaaacatggttgctggtgatatgcagagctggaatcagattcatcttgctctctcaaactcaacgtcaaaaaggaaaacaaaggtcctctaagactccctttacatttggtagttaatagtaacttataactatgtttttaactttcttttgttgagtcatggactctcctcctccctggctcctaagttttcagggtcaacgggcaaccttttctaaatcacaagactggatttgctatgtttggtcttgctccagcgtctttattatccctgctgttgtgcactacacagttctgtagacacatgagataaaatggagaaaaaaaaccaggagattattcccagaccggttgccaactgattttaaactgttgctcactgcaagtacacaaaataatgaatggtcttttattcatgagtctttcaaaatagaaatcctggggcggggaggatttctagttttgtcaacctcatttgttcatcctttgcctcagcttcctagtctgttcagtagtgttgttcacgaagaattttgttttattttcttctgtaattccttttttccccccggagtataatgacagccagattcttctctatcatctactgcaaaatgccttgagtatttttctaccatcttattttaacacagaacgaagtaggaaggatgtacatataattatttataatcctccagatcttgcttccagaaatacttagtcttcaactgtaatgtctcagggaacctattaaactagggagctggaagcagtcgttgactttgaggaattagataacattagatactatgaaagtccagtccatagagtcaacctcacagagccgatgcctgcacaagggcgacccaggagtttaaataagttgctgcaagtatggttagctactgttaaaactcaccagaactggaacctaactcatcctcctcttggttgagcagatttcattttgacaggaatttctgaatacccaaagcaaactcaaagtctggcctgggtttctatctcagcccaggatgcttctgaaatacatgaacagaaggatttggagatcttgggctgtttccctgggacttatgatctgacattctatggaaatacccaactccctccttgagcagggccaaatccccaaagatctcagactgaacccacttttttcagggttggcccaaggcagagctgacacagctgtaacattctagagcacacccacaactctggatgaaccaggacagaatggggtggaaggatacaagataacacatttgtccaagggggccgtctgttgacacagtaatgaacgcagtaacgacgggagccagtattctacctcgcattagttgtaaatgaaacgtcttcaaaacatgagaattttgcgttatccttaattattttttcattttgcagaaaaataaagggactcgtcatcgagtactttgagtcacaaatcagccaagtgtgcatgtggtttttttccaagtacgcacaagagtggaacatttcgttttacgagtgtgagatgtttgaaatacaaatctgccaagagcttcctccacattggtctgggactaggcagaacaggccctgacctcctgagagagggaaggaagaccaggcaggtctgagccaggtaaacgcccttgggtgaggtccgtgaaagataaagtcagatctcaaggacagagagctttaaacatgtttgtgctccactgagtcggttacctaataagtgagaaaatgaagatgtggatgcacaaaaattccatggcctttaggctcgcggtggggacagggtacagggaagcggcggtctggtgctgccaaaggttagtcccttgtacccggcgaactcaggaaagttcactcgatttcgctacaaacctgcagcactcggcctggaggtaacctggttgggagcgaattcagaactggaaattccaggcggcccagagggacacccatccctctccgaggcgcgccgggatccggcgcccagctgcggggcgagggcagggtcccgcgcagcaccccacccccggccgctggccccgcccccgcccccgccccgcctcccaggggatgtgcgagcagtctccgccctcgcgcgggagctgggaggctgcgagatccctaccgcagtagccgcctctgccgccgcggagcttcccgaacctcttcagccgcccggagccgctcccggagcccggccgtagaggctgcaatcgcagccgggagcccgcagcccgcgccccgagcccgccgccgcccttcgagggcgccccaggccgcgccatggtgaaggtgacgttcaactccgctctggcccagaaggaggccaagaaggacgagcccaagagcggcgaggaggcgctcatcatcccccccgacgccgtcgcggtggactgcaaggtccgagcccggggaggtcgaggaagcgggtgctgggcccggccggggagggctgcgcggactgcagcggcagtgcgccccgaggtggcgggcgcggggctcgcgccgcggggacaagtccccgagagagcccggcgctcccgtttcctgtgggtccgcagctcctttgtaaggaagtgcgtgtgctggaagcggtgcctgacgcggggtcgggggcttgggaggcctggagagggaacgattggctaattgtgccgaattcccggtcgtttgtgcagtccggggagcgtgcgtgcagccaggacttggcttgttcgatctggggaccggcagcgacaggcacaacaacaacaaccgagtttggcacttccttcccagtataaataatgtacctaaaatggctgacatcattacaagcctaaacctctgttgtttcccactttcgtttctaggcttgaacagcacttggactaagtccagcaactgtaagcgtcttaattttaaaagcgtttctttacctcctttttccacggcccttcggtagtggcaggtgaacttcacctggagaggggacgaagggacagtccgcccgaagtaggtttgggctgtctcttaccattactagtaaaggccagtaatgactatgtggatgttagtgaaaaaccaattgttggcatttaaattgtatcagcgtctttgtgaggactcctgctgcgtgaaactaaacatgagaaatttgcccccgggtccctaat

SEQ ID NO: 6287 - DNA, 6000 bp, Homo sapiens
aaaacaaaccttgaacagtggaaagggcaacctggccgaatacggcctggattctgctttcacctctgcagccgagctcgttttgagagacttgaaacccacatgacaccagagatgttccaaacaccattgcatgaagttgctcttagcataaaacttccatgtctagttggaattggccagtttctggccaaagcaattgaaactctccctttggatgctgtgattgaagcagaacacactcttagagagcttgatgcattagatgccaatgatgatttgactccattgggacgaatcctggctaacctcctcattgagcctcgttttggcaaaatgatgataatggtgtgtattttctatgtgggagatgctatctgtaccattcctgctgctacctgctttccagagccttttataaatgaaggaaagtggctgggctacaaccattgaaattttgctggaaacggattttctcatcatgtagcccttttatcagtattccaagccggagatgatactagaatgggtggagaagaagcagaaatacgtttttgtgcgcacaaaagacttcatatggctacactaagaatgacttgggaagtcaaagttcagctcaaagagattctgattaattctgggtttccagaagattgtttggtgacacaagtgtttactaacactggaccagataataatttggatgttgttatctctcttcctggcctttggtgtgtaccccaatgtatgctatcataaggaaaagacaaagattctcaccactgaagggtgtaatgcacttatccacaaatcatctgttaattgtccttttagtagccaagacatgaagtacccatctcccttctttgcatttggtgaaaagattcgaactcgagccatctctgctaaaggcatgactttagtcaccccactacagttgcttctctttgcctccaagaaagtccaatctgatgggcagattgtgcttgcagatgactggattaaactgcaaatatctcatgaagctgctgcctgcatcaccgctctccaggcagccactgaggctctggttgttgaagtaaccaaacaacctgctatcatcagccagttggaccccgtaaatgaaagtatactgaacatgatccgtcaaatctctagaccctcagctgctgatatcaaccttatgattggcagtacatggtatggagatggtccaggtcctcctaagatggcccaatatgacaatggaagcggatatagaaggggaggttctagttatggcagtgaaggctatggcagtggctatagcagtggaggctatcgtagcggaggctatggtggcagctccagctcctgtcgggcaggatatggtgcaggtgttggtggaggctatagagaagtttcctgaggtggctatagaggcaactctggaggagattacagagggcctagtagaggctacagatgatctgggggattccagcgaggaggtggtaggggggcctatggaactggctactttggacaaggaagagaaggtggcatctgttaaggcttggttatgtcagttcctgtgtgtagacagtaagaaaaaaaaagccatgctatgtgtgacatttttttccaatgtttatttcccaccaaaaagtaaatgcattttaacccattctgtggttcactgtagcttaaggaaaccaagcatatagatgcattagtgattttgtttatattatgtaaaatgtaacgatctatcttagaaataccacagtttgtatttttctttaaggagtaaagatttgtctttaaaaataacttgatattttcctggctttcatttaatacaatggaaaataaagtattacacgaaaaaaaaattttttcttagagacagtatctcattatgttacccaggctgaagtgcagtggctattcacaggcacgattatagctcactatagcctcaaagtcctgggttcaagcctcctgagtagctagaacttcaggtacatgccaccttgcctggcttcctgctttcttattcactaagaaactttgttctctaaaatcatagattagagacaacttcgtgtttgaaattacatcagtaacaataaaatatcccacctttgcttgaaggacctcagtcattccacacagagaattggcctcaatttacaacccagatgtcaagcttctgataaggggtttccagacacaaaactccatcgctattttaacttcatagtctccaaggaaataggcccttcatccactttgcagtctagacctagagcctgtgtgttgatggcagcagcaggccgtctggagcagccactaccatcattgacatacagccttgttttgctttgagtctaccaaaatactgcttatttaaatttcatctcaactccacacttccccagaatcctatcactctatctggggagatgccatgtggtccaggcagtcttaggctgaatgggcaaggatccaagggaaaccaattagattgaaattagttctgtctgtgggccctcaagatttaaaagccatggacaagggggaagcaaccagtatcgaccagcgataatctatgagcaccttcagcttggggtgtggggtcatagacaaaaagaatggggtttaatcagtgttcccatccaaggcaaaaccagaccagaagaatgggagctaccaggaggctgagttaagaccaatactagggccaggcatggtgactacagcctgtaatcccagcacttttggaggccgaggcaggtggattacttgaggtcaggagttcgagaccagcctggccaacatggtgaaacctcgtctctaccaaaaaaaaaaaaaaaaattacaactggcacacacttgtacccagccactagggaggctgaggcaggagaattgcttgaacccgggaggcggaggttgcagtgagccgaaatcacatcactgcactccaggctgggtgacagaaggagactccgtctccaaaaaaataaaaaataaaaaccaatactaggaagtgctttcttaccatgaaagctccctgcacacagaatgaagagacagatggcagaagcaagaccagaggcctccaccactgaacaaggtcaacctgaatttgtttttgtagctctgggaagtcctgaactgaatgggaggttctactgtggccctctactaacagtagatggaacctggaaccatctactgttaattgtccttttagtagccaagacatgaagtacctatctcccttctttgtatttggtgaaaagatttgaactcgagccatctctgctaaaggcatgactttagtcaccccactgcagttgcttctctttgcctccaagaaagtccaatctgatgggcagattgtgcttgcagatgactggattaaactgcaaatatctcatgaagctgctgcctgcatcaccgctctccaggcagccacggaggctctggttgttgaggccatctactgtggccctcatacatcatactgtgtatggttccaggatttgtaaatgctctaatcaatgtttttttttttttttaaagctgttcctgctgattgctttttaagctaggctcaagtgtggggccacggaatccttcaggtgcccttcaaatcagacattacatttcagctctcagggctagaatgcttccccctcttatcttgggcaggtctttgaagaagccagtttagccttggtaattttgaatttggccatagtatacggaggagagctaggtagctatcaaaacgcttagacaaacgtatggtaaaatgcagcccagcctgaacctccgcaaaacccccaaacctggagcagcaagtgggcaaaggagtgtgtgtttggggcagggtactgagtcccatatgtaatcaagagacctggagggcccaaggaagtcagtgacacccccacaagctacatatcctccaatggattgtggtggtcatctccggctaccgaagccaccttgcttattcccataggcttacaaacattatgatgcttcacacgagttgtgggtgaagtgaaggaattggaaagtcccggtctaaggccctgcaaaactgctgtctggtaaaaacaagtgactatggcaaggccctgaatgtactacgtatagacttaagtcagtatttgtgcctaacagcaaagcatgccacaagaggctcctcaaaagccgggtaattgatgccattgttttcttgacctagttgaagagtcaaagaagagaaggtgatgcagaaacttctttccagtgaagtgacagatccaagcaaggaacacctgcctgtgaggggagcggtaggggagggggtagattcggcagcactcgggtagtggcagggaccacatattgtcggtgttaaccactgttatcactggcccaggtcgagtgaggacgagtcatttccccactaagcacttggggagtggcagggaccacatattgtcagtgttaaccactgttatgactggcccaggtcgggtgacgacgagccatttccgcactattgtcccttcttcctcactgcacccccagccctgcaccctcagctccaaatacacattctcgttcactcaacgtttgttgacacctagcgtgggccctgtgggatggggtaaaagttcggtgttgggaggagccccggtgacagatttttggttttggtggtggcttttgggcaaggacaggtcaattcataaaagatgacgccccaggtctggatcgaattctcctgggagccagaccaaagcaccttcctggactgcaaagtgtggaagccgccgcgggccgggcgcggggaggtgtcatgcgccggaacctgcgcttggggccaagctctggagctgacgcgcaggggcaaggcgccccgcgtcccggactggcggctccgcgcatgctcctcccaccggcgtcgcaggcctcgagaggctccggaagtactgggtgcagcctgatggcgcaggaggtagacacggcacagggcgccgagatgcggcggggcgcgggcgcggctcggggacgcgcttcctggtgctgggccctggcgctgctttggctcgcggtggttccgggctggtcccgggtctcgggcatcccctcccggcgccactggccggtgccctacaagtgagtgcggcggcgcgcgcactgtcggggttggggtcggcgttgacgatgggggatggggtgctggggcggggacccctgctcaccgtggtttgtgtcgggtcacgagatggtgcggggacagcgccgggtgacgctcggagcgcacttgagagcaaagttgaggactggggagtcgcagccgctcgttacgtgcagccctgggacctttcgtcccctctggtcacttgcggcagactcaggacagtcctgaatcgtggaagaagaaaaggagagtaatgttatttaatggagggacttctgggtacaagtagctgatttcttgagtagtttaaaaacactgtctatcgcatttatttatatcatgcactgtcgttagttattaccgcggaacatttggtacaatttactgggcgaccaactcgctctggtttgaacctgatcagaacctgatccgaagtccttattgggacttcccagttttgccctcaaaagtcgcgcatcccgggaatccccgtctcctgcagtcctggttagaccgggaagattgtcaccgcttttgtccagtcttcagcctggaggtaggacgccggtcctaagtcggggacagagcccgcacacctgggaggtcgattccagcctttgacagagaagacacagcctccggcggtcagagatagctaaacacagagaaagaaaacatggtgtcaacatcaggcaggagaaagaccagcagtttttgaaaacagctatttttctttaaaccaaaagcatcattggacataattttaacttactagcataagtaatcaacagctaaaactgcacacaaca

SEQ ID NO: 6288 - DNA, 6000 bp, Homo sapiens
tatagatactatattagtttgttgtatttaaataaacagggaatgtcagttctctctattaacttggttagattacagccctaattattcaaacactcacataggcattgtggtgatttaatagatgtaattaaagtcttgaatcagttgactttaagtaaagaagattatcctcaataatctgggtgggtctgattgagtcagttaaatgtacttaagagcagaactgaggattccctgaggaagaagaaattctgcctgtagacagcagcttcagctccaaccctagagttacaggggtctgtcctctggattccggacttgctggaccagcccacagaactgtgtaagccaattccttgcaataaatctcttaggatatgtcttctgctgactctgtttctctagttgaatcttgactgataaaaagttttatttcagattctttcaacatactggaggagaataaagagaggaaaaagaagtagatacttgtttgtaaaattgctcacttagatatcctctctaaaattatagagctgaacagatgacggaatctcagaaccagttaaataagaaacactatgtgtagctaaactgaggttcaagcctacaaactgattaaaagatatatatacattataaaagattcagagataaaactggagtcattattgtgttaattttcatttatatgtgaaaagcaatagtttcttatatttctaaaatatgctttagaatttaatgtccagaaaatgattgctagtgaattttcattaggtagaaatagaaattttcagataatgtaattttacctctttccagtcattctacaggtaattatacaaaaaccacacatattccaaatgcaattcattactaagatctgtgatcacactaaccatcaatagccactttgagtagttctttgtggtagaggaagtgataaaaaactaaaaatcagtgaagtggtaaggaaaatttggaacatcgcctccctgtgatttaggcctgtgtagacggctttctgtaggcaatggcatgtcttactgctctttaactggtgggactcccaacgaagaatcctggcatttgggtgtgcagctcaatatatctgacgatataagaaagaggatgatgaatgttaagttgctagtttacctctagagggaatggccctgcttctgggaaggtgggaggggttcccaacgggaagtacgcctcaggcaaagaggtccccatgaactctatatagcatcacactatagaacaacatcaaaatcattcttagtaggaaggcttacagatacattacatccacatgagaaaatgctaacaatgtagagtcctgagggttattctgaagatgaaacaccaaccatgtaaaatgatagttgtaattatctaacacaattttgataatactgctctatcactgtacatattggtacttgtcttagttgggttctccgggatgcagatgctgatataaagttttcagtgcaagagattcactgcggagcaatgtctgttaaaataaaaaggactgggcagggggagctgtcgcaacatgctgcagagctgaaaaagtctctgccagcttcacagggaactctgaaagtttgtccctttaagggcttcagtgtctggcaaaaatagccagagccttgtaccactgccttgctcagttagtggctgggtgccaccctgaaaatagcacctcctcaggttgaaagctgagggagaccctgacaaagctaccaattggaagttgtctgacagccacattccttccagctgggcagagtgtgctttcttgaaagggaatctgggcagcttatctccatgtctactccagtactgcagagcagcactagtaaaattttgggtggctgtgtgtttggagatgaaaattgatcaagccagaatgagaggtgttagtgaagtgcactaaaattctacaattctacttgaggtagcttctagtgctgcaccactgcaaattccttagataactagagttgtcgccataataccagggattgaaaatattattggatgttgcttaaggtctgtaaaatggtaaagaatattgttattcccactgcatctcaagtaagtttctcctagtgggacaactcagtgcctctgcttgtaatggtccattacaggtcacatgggcttagttgtaaagtgggcaaaagaagctcagaatggctcttttggggatgatgaataagaattattattttacatagatcaagaaggtgggatttaaagaagtcagattggctctttgtgatacattgctatctttttatgtcttctgcacgtttcacagtagtggtggctaggaagaggaaagagacaaggactcttctttattaggtgcattatgcttaatatagtgcttaatatggtggaggctctgatgtctgtcatcacctactagtgatttggcattagccaagttcatgaaactccttgtgccttattttcccccctcatctgttaaccaaggagtgcaactgtgcctatatcatgaagttctggtgaggctaaaataatagatgtatagtactggcttagaaagggctctatactagtaagctgttgttctacttctccttcccctctttctcttcctcattacaaatacgctttcctgctgaatttgttactccactagattagcaaaatgttcagagaatctgggaggagggtaaaatagaaagaatctgttactctatcaggattcaagatgtctgcttttggtcagatctttgatttttacttttatgttctcagtgctgcattgggtgtaagaaatggtctctgccctgagcagccatctatttgagaaacagatgaacacatgaatgattaatgaaaacacatatgcatataaaattaagttctaaataaatcttatagatcgtaagtgatataaggatctaatttcagtttgctgatactggctgttgttttggtcatcgagaggcaataccatttggagtgaaattgtgagagtgagcgtttgtaccagtaataccaataaaatggcatatgtttattggcttagaaactaaaatacattaagatcaaaacaaggcaagtttaacaatatttaagtatgagatatcactgcctcttattgttagcacagtaatgctttatgctattagacatgtcaaaacggcacaaataggaagagttgatgaatgctttaaaaagaactatgaggaaggcttacattttttagttgtcaatctctcaaagagtttctgtttttattctatcttgctattttaaccagttgattaggctcacccagtggcagtcttcatttcaaggatctcctctggacattcatgaaggaaataaatggggctccagatccctttccttcccttcagggcgctccactgtaagatcatttagggaaaatgtggtgttatgttaaaaacatagctgggccacatcaagcagcatcatagtttttagggtatagaacgttggtcttcaggttaaaaggtacttttcgctgctctgtcatactcttctacttgctagagaaatatgctttatgccgtgtcatgtgtggttaaccagacagtgagatactactaacagtgctcccaagtgattccttgctgttaaatcaattggaattattgagtattaccacaaaataatcctatctgatttcattactttcttctaacgtccttccagtaacctagaactctagagacctctttctttgagagttgtctggagagtccgttggatttttaaatctcttattaccaaaaagtggaaaaaagagtttaaaaagtaaccaaagagctagtgcctgtagtctcagctactccagaggctgaggcaggtggatagcttgggccgaggagttcgaggctacagtgagccatgactgcgcctgctaacagccactgcactccagtctgggcaatatagtgagaccccatctctaaaaaaacaacaaacaaaaacaaaaattaccccacagaagaatttcagggcagtggaaatactctgtaggatactataatgatggatacctgccattacacatttgttctaactcgaggagtatacaacaacctgagtgaaccctgaggtaactatggactttgagtgatgatgaggtgtcaatgcaggttcatcagtcgtaacacatgtaccactctgaggggggatgttgataatggtggggggttatacatgcgtaggagccaagtgtatatgggatatctctgtaacttctcaatttttctgtaaactctaactactctatattagtctttaaaaaatcgcttatcttacgaatgattttgaataagcgttttgggaatgttctagagatgaatctcctccccatgtcctacgctgggtgaggaagtgtcgggtacccgggcgacctgtcctcaggtgttctaggaacgcggccccatcccttgtcagcctctgtctctgtgtggtgagaaggcgcactggctcgtgcctgcgcgaaactcgcgcacacagaaaagaccaatcaaggacgggtcattcccgccccccgcgcgccttttgcgaccgcccactcgacaggttgacaacctagacagctcccccggacttgccttacttttccatctcctcccacccagctataccctcccactggcggcgcggatggcacgccggcggagccagcgagtctgcgcgagcggtccgagcatgctcaatagcgcgcgcggcgccccggagcttctccgcggaaccgcgaccaacgcggaggtctcggcggccgctgcgggagccacaggaagtgaagagcttccgccgggagaccgcggctgcaggaacggaggcggaaggggccctgcggcgacgacgtcgtcgacgggggtggccgtgggagctgagcacggagaagactccctctctcggaagccggatcccgagccgggcaggatggatcaccaccagccggggactgggcgctaccaggtggtgagttcccggcctcctgtgcctcccgggactgcctcccgccgcggcgtcccgagagtccctttcctcaggttattcccggaggaaaagctgtggcttttttttgttgtgttttgttttgtttttttggatcttctggctggagctgcttcactcgcctcacctgcgcactcctgcctaggactccttcgaaacccttctctctcgccccaagtctgcttagctcctcacccgcacccttagccccgctgtgagacgccctccctccacacaccttacaacttgtatccgttttaatttctcactttatcattttcttattctctgactcagtcactcctgagacattctagtcgattgtctactggaaatggggctgacttcacatacctgcccggaaggtgatcgccgtcataaatggggtgggtgagtaggtgggtggaggtgtaagtactgcgtggggtgggatgtggatttggcaaaaatgtgggttaggaattgtggaactgtagagaaagactagccataatgctgatcttgtctctctgctcgttaaccttgtcattttgtccttttccattatgttagtattaaaaatgactgtattttttggtaatccccactttttctttctttctttctttcttttttttttttttttttttttttttggttagaggggaaacagaggtagttttagtagaacaaattctaatcttgtttgaaaaattatttttcgttaaatacaaggttttccagcttaactgtgtaaactttggtaactatgttgaaaaaagtgaaatgtgttcctctatattttcagtgtcaatttttaaatatatttttctttgtgtattctggtggtgacgttggagattcctgttgtaaaccttagttaaagatggactgagcaatagttgactctgctgttgtgctgttgcagctaggtagcatgtcattctacaaactttcagcccattt

SEQ ID NO: 6289 - DNA, 6000 bp, Homo sapiens
gatttgtgtgtattaatttctttccagaaaaaaagtctgcctctcacaaattataggtaatgctatatatactcctaataatggcaaaacagtattcctatacaaactgttgtttaaagtagaagagtattctaaggtatagaaggatgtgtatgacttttcagtgagtcagacatttaacttgttcttactcattttcaaatgcaagcatctgttacatatcttctgacatagtgttttatatatcttactttggcacacctgaaggctactttctgaaaaagtagtgttccaaagatatatttttgtagatatttccaattggttatccaaaaaggatattttcatatgtaattatatcaaaaaatatccgagtgtatgtgcaaggaactgcatgaggcaaggaagaaaattggctattttttgtatattcttttgtaatgcctctgagagtctatttctaaggctgtgaataattaagtctgtaagtgaataaataatttcagcaaaattagatttgctggccatttttaatttgataaatataactgcatgatgtttgtttttaattttaaatgtattagacaaaatgtcaaagacaaatgctgtacagttatttaatttagcaatttcatagagacacaatcataaatggtgactcattattttcctccaggagaaactttcattttctccttttagatatgtgatatacatataacatatattatatataattatatatatgaatgtgatatatatataatttcaatttcaaaaactttaaagacatatgccctttaacttagacttgaaaaatgtgtcatttattaaattgagttgaacagacttcttagccattactatggaggaatagaaacttagcattagaattccataatcttaactcaccagttaggctaacaacaacaacaacaacaacaaattgcaagctctactggctttagatgttgatcaatacttatgaagtcatgaaatgattaataaagaatttccttgtttataatcctcattaggttgtttcttaaagcaccataattcttgactaagcattttaaaattctaatgataacacacagtgatacgcaaatgtgataagaattatcttaaaaaatgtacttaatataagaatccctcctgtgttcataaagcactaaaataataattctagaaactaataaatataaatttacaaaaatatatggtcaattttaagtggcaagtatgctacttatgttttcaatttaaatttaaatttgcaggtatcaaattatggccataattgataatgacaattatatttacaatataaatgtcaaatatatttccctacatgatatacacttatgatgataccctctcaatagataattctaatatgaaaaaaaaatatttgcaaacatttggacaaatgtgactttcacatccaactccatcaaataatgtttaatattaatagacttaattctggggagatatatttgatcaatcatttaattttacaatggccaaatgtatctatgtaattaagtgcatgcatctgagtgctgtctgaaagcatgtatacacatatgaccatgtgttgcttagtatagactaaaacatagatacatttgttcatgtgggtaaaagttttggctcatatttgatcactcttatgtaattcacttatatattttctaagcaatagtcaacattcaatgcaaataaagaaacagattaataactgaggcttttccttatatctatgatgttttccctcttgtgtttttctgttctgaactgttcaagtcacagtattttctaaaatttcattctcttgcagagcatcttatagagacacctagtggcaaaaggtaatggtggcttccgggaccatccttaatgttgagttaatggcagaaagttttcatcatttacttatttgaaccacaagaggtaaactagattattagcataagtgtttctaacaaaactgtaacctaaactaattccaaacatatttaatacttcttagttgaataatatttcctttaattagaacaataaatatttaaaataaaaataatacaaaaccatgaattaaactttgctattgaatgaaattataaagatttagaacagtgataaaatataacagctttatttcagctattttgaaaaaatcaataatcgattaagacaatttaggacctttaagaacttctacaaagttaatcgatattgaaaattatgtttctgataggactcaatatttatattccaaaggcttctggctgtaattcctatataattttaaatttaaatatttcatttcattttgaaaatataaaagtaattttaaacttaaaataaattttctgaaatgtttatataatgttaaaagttaatgactgaataaaaaatacagaaataagccttttgtggatgacgtgtaagttatatttgttgatgcaatgtatctacagctagtggctatcattcctaggtcaaatgcttctaaatttaatgaaacgttcattacaagattttgtttttattgtctgaaattacatattacttctttccttcctctcccttgaatataacccatacttaaacaaaattgcttccaaataaagtttttatggtataaagtaaaaatatatatattcacacaacatacgcaggggaaagttcaaaaaagattgcagtacctcaggagactgcaatgttcatcacctgagatatatatacatctcagaacatagacatattatcagactctatatcaatattaaacatatgattaaccagattataacacagtattatcccaaatattactaagaataaaacaatatcaataataattaagacgtaattaattgcaaaataaagtgggtaaaatatatttacatggagaaactaactacatagttatcaaaggaacaggcacatgtgcactcagcctgcactgggtcacttactattatcaacttttctcttatacccgggatgaacggcaggtctaatattacaaatattgaaaacatgtcttatgaaagtaaagacccctttttggggatggaagtgtctggtttcatggaaagacccaagaatacttactgtagagatgactctagtggagtttagcagatgactcttcaagaaactcgctttctatcgatattgcatttacttaggggttttccagctttttagtacacaccagatgtattcacaaacattccctctgaaagtctttcacattcccttgtgttgcctagacacacctataaaacgtaattctattaaagagaaaagaaaagtagcgcccttgtttgcagctaggaggaaccactcccttttccaggatccttaacagtaagtacacgagacagcagcattctgaatggcaggaggaaggcaggcgatcagcacagggctggaatcatctgttcctgaccaccagcaagcctggcactgccggggttatttccactcctccctttcccaatccgagaattgcacagtcccacgctcgaattacacacatggtccaagacttctctctcttcctacgaatgtgacatccaagggggccccggttgcgccgccctagcccagggacgccttcgccctcggctgccatctatcggccaccgagcgcccgcttcgccccgggcccatcatgtctgctgcagcttggctcgcaccagaggcgcgacaataaacaagtgcactggactgggccctgcacccgctccggagcagctgtctcagagacccggtgttgcttaccgcgttgccacctcctcggcgcccgggaggaagacgcaactttctcggagttttttttagagccaccgggctgccaggacaagccacaggcatagaacgacgcggttgctgcccgccccccccttcccccagaaaccccaaaggatgtcggtgatagagagttccaactaatgacgattgtgcgccgcatctggggaagggatacagaaaaaaaccctgcaaacaccgtgaggatgaaactgccaaagggatgcaagagcctctcaaatactaattaggggccgcggcggcggcgggctcggcgcggagacagcgtcggcgggatcccagcgcggtggtcgccgctgcgctggggggcggaggacagcgcaggagctgcagccgccgccttcgctggagcagccgaggggccggtgccacctttgctcgccccctcactaccatgtacagtgtgcgctgcaagaagaaggcgggagatgcatgcacacccccgcgacccgctccctctggctcgtcccccggcgtgcgccactgaccaggggggaatgtggtgaagacggcgaggaggagagccgaggggggaggggagggccggccggcgcgaacccaggccggagggtgcgaggagccagaggaggctggagggggcggcggccacagctgggtcggagaaagttgccccctatgcagatggcaactgtgagtacccctgtgggggggagggtgcagcgaaggctgccagggaccccgcgatcgcgccttaacacgtattggagcgagtgtgcgagtgatcatgagtgtgagcgggtgcgagcgctcggcggggctgaccgtcacgttggcggggccggcggggccaggcagtcttctccgcgtccccctcctcccgctccgtgcctcccctcccagcagctccccctccccgccccgcccggctccggctcccggcccctaccgcgaggcgcctctccagccggacctccgccgccccctcccgccgcctccctatcccgccgctgcagaacgccccccgctctccaccccccaaccctgctgcccgctccgactaccgcggagagcaccggggagagccttttggggagccccggaacccgcggtcgccaccgcggcggcggccccaggctggaggcgtccgggcgcctctttcctccagcctctgggactgcgctgctcgcagtctcctcgccctgcctgggcttgagaaacctagtgcataccccaaagagggtttttgtgtatgtgtgtgtttttaaagggtggctatgatgactgggccttggagatgtgagactgggtaagtctatcgtttactttgcaaaagaggtgtgtgtgtgtgtgtgtgtgtgtgtgtgtgtgtgtgtgtgtgtgtgtgtgtgtctatgtggcggggtggttttccttccctctcctccctccccttcttcctccgttttcccttccttctctttggggcggggtgggggagggggagcctcgcgtcctggaactccgggtgcttctgcctgggctgctgcttgagcagctgtgcccggagcctccggtgcggcctgggtgctgggctccagtccgagaggctccatgctgcttactgcagggacgtacagggcggtgatccagtatctaaattctttgggagaaaatgaatagttcccccgcccccgccctccaggaaaaaaaaaaatctgagaatctgagaatgttcagcgcacccgcgaatttgcatcggaggtgcgtttccccgtcagaatgtcagcctccccaggctcattcaactttattttctcaaatttttggtctcctttgctagcaaggaggagggggaagggagtgggttgagaggaagctcttcgacccttgctaactagaactgaattaaagttgtaaacgctggagtttaatactggctggactgaatttgcaatgggctttcagatggggtgggaggtgaatgggggcggggaagcacagggagggagggggaggggacccaacctcgctgaatggatgtgcggatttgatccagcggagaactgaaatttcaaggtaaacgttttgctttcactggggtggggatgtttttgccgcttttaagccgggagacgtttaccgttgcgttgggaggtcggggatacttgcgaggtttatgcactgtggttccaattcatctcgacacgt

SEQ ID NO: 6290 - DNA, 6000 bp, Homo sapiens
taccatgccttatcacatttctcctaaacagaaggaataagtgacaataagtctacatgtagagattttagattttctccatgcactgcctctcacatacacatctatacagacgccacctttaaatttaacaaaggagggaggcagaaagtgggaataaaacagtaaagacaccaaaggaaaactgctactctcctctccttgatgttatctgtgaatgactaagttcattaggaatcctagactcaggggtttttggagttgaaagtggtctcggaagatatccagaataactcctctgttttacaaatgagggagctgtaactcagagacataaaatcacttgcccaaaacatataaattaacatactgccccgacctgggtgggaggttatattgatattcatcaagtgcttatggacaaacaaaatgtacccaacctgtctacaagccctggaatgttctagcatcacagagtgagagtaattccaggctcgaagggtattcctgctggggcccaaaccttacccctccccttcaggggctcaagaggagtctactaagataatttagaattgggaatgagtgtgtttcaaatgaatgcatgaaaaacaaatccacaaggtatatggcactgacttgtaataggcccatagaaatattctgatggagtacaacttcacaggttgccaaatgacagaataaggcaactgtttttatagttataatttgcaaaaaaaattatagatatatatttatatatgaatggtgatgcaatggtgagaataactgttcattctgtaactattcctatcactctgtagctttcatgctaagtagattacaaatatcattggatttgcataagcattaagataaatgaaatgttagggaaaatggaaggaaaaagaacacagatatgctcttttaatatcttggtaccggcattaatgtcttctttaatgtgatgtaacaatacttggctcctgggcagttgttttttttagttaataccgtatcatcaggaattcagtttcttcccacctgattagcagcacgccacctcactggaatctaggaaggagctaatgtatactgaaaccaaatctgatgcttagaaaatccttgagctattgaaaggcacacctgcgttgcttggtaggtgtactgaatctcaagtaaggaatttctgcaaatctcctgtttagttggctaaactggttttcactcctattgaacaaccccagggtgggggggatcctctatttctctttaataaccataataagccaaagaaataattttcaatgctaattccagtgacttagacctcaaaagtagaaaggctcagaatatgtttgagggcattgtatgtcttcgggtcaaatttatagatcagttagtagttttcatattggaaaagatctatagctttttgtaaagactaaactattgttaactaagatgttactttgaataatttagaggaggcaaccttttttgatgtattcacttttatatttaaattaagaatagtctcttatgaaatttcagtgaactgaatcctaaagaaaataaggaagcatttatcagtcgaaagtactctgtaaatcggcttgcagattaactgcaaaggttatttgggaactgtataatcttaaagcaaaacaagacatttatccattacttcttttcaaaaatctctatttggtccatttttattttctggacattctttttttagattatatgctactccataatatctttagaattctcctgacaaaactagcttgagaagcataagatataagacattctaaaataaaaatgtttgattcattacataatattatctaggtattaaagaaagttaacatttttcattctttggtcaggaactcatggcctccaacatacagctttccacagtaactatgtagtacatcctagggaagataaagaaaagagtttagggttgtccaacctcatagaaaggagaaaggaaaattaaccaagtccacaggcatgacgaccctagtctgttttagctgccaaaggaactaataatgctgccatttaagttttaatttatggattgtttgtggtgtttcccatcccttttaagttgaaattgtgtgttgcaatctctacagtaatagaatatttcttttttcaaagtattcaacaatgagtttaatattctttcttcctgtgatgcataccaccatccgttatgctaaattaactgtttatacacacatacacagagctcaactggtcagagctgtggttctcagcctgagtccacattagaagttttggaaatactgctaccaaggccacccccagagattctggcttcactggtgtggcgatgcggcagagagaagagtgttccaagcaggaattcagaatttgtttcttccggatgctatgttgcaacggtaatctgggcttatggatttttgaagtataatgggtagagctacattatgtgttaaataaactttgcagactggtttaaaacaccaaaccattcttcaaagttctttctttaaaacaaacaatgtgcctttggatccaaacagtggacttcatagcaactaggtgataaattaggaagtgcttgagtcttaaaggtcacagcactacacttgttttgtggcaaaagtaagtcagggttttgtctagtaaaaacaaagaaataatcaatttagtgagtatctaccataggcgagccacggtaaacaaagggactatcgaacaaggccaggaaataaagtattaaatttgtgtaatttgtaattttagaaaaatcagtaagaaatgttatggttagtgggttttgtgtttttcaaatagtaattggatcagaaataggcagattattcaggaaggaatatggcatagaaataatagtggaaatatgctggagggcaaaaaaacagatgataaaacactttaaaaaggcaagccatacaaaagaatagaggatgctttgtagtcattgctcaaaggtgactgatttgcatagcaaggagaatgagaaggaagaggttaggaagatacttttttttttttttttttttttttttgtatttttagtagagacgggatttcaccgtgttagccaggatagtctcgatctcctgacttcatgatccgcccgcctcggcctcccaaagtgctgggattacaggtgtgagccactgcgcccagccagggagatacttcttaaactcagtttttaagtttagtttaccagtgaacctaacatgatacatcaggacaagctggggttcagagcagaacagtagggtaaccatgtctgcattgtcacccttgtacccattcacgaaagccatgggaccattaagcacagagaagcccactacctgccagccgctgcacggctgcaacaagagtaggacttacttcgtgttctcagagcacagattacaacattcgggtagacattgaagagagacagatttggggctcaataggaagaaaagcttttttaaagggctgtcaaaacaacatgaagaaaaacagaatagatacgttgccatgcactgaactgctggtcctgaagggtggagcatgggctaaacattatctctagaaatagacaggaacattgttttgagtgtggagcgtgtcctgctggtctacagtgattcttccaatctaagttttgatgattctatgtccagcttcctctcttctccagtcaccttgtcgcctctaatttcactgggcacccatttggttaaaaaaaaaaagtgacaaagggaaattaagaaattcttcacattgaaccagagtgtttctgcctaaagatagtgacacagagggttagcacgagatttatcacagcagactgattgataggttttagacctttccttacttttggcaacaagtgaaacctggaagctcataacaaaactgcaagaacctttaagtggacaaataataacccgtgtccttgttctctcatttatgcccagatttgtggcctcaggagccagaagtacaccttgatctttatgtttaccttgagacagcaatgaagggatgaaggaatgaatgagtttatatttcaattaggcgtgagagatggaggtggtttaaaaaaaaataaaagacaagatagcagttttgactgggataacagcatcctttcatagaatagcctctagacctggaagctggaagggacctacagggaaaatgtgttgaacaaatgccctctgcgtagtgcattagtatgagtacaccagcaagatcaagatcgtcaggatgccccatctgctgctatcttgactttaggcctgtgccacgcaccgttttgccatgactttccgcatagcaccaggccaaaaagaactgcagagttttgagggcaaggccggtttccagcccagaatctgcaatgatccctccttgacaagtcaaacagagtcacccaaacaagcgtggcacgcaaacctttagagttcagcaaaccgagggctgagttaccaaaccgtgtcctttcagggcatgcaaaaggcttttcctgctctgcttctacaaggtagtcaggaagccaagctatttgccttgggtagggctgggtgggggtggtgaggtgggggcgcagcaggttgtccacacccggttgccagtctgaacctgagccgctccaacaagcgagcccttctccgcggccctttggctcaggggagcgcaggccggccttcctcccgcacgcgggcgcgggccagctgcagatggagaacccggggggcgaccgcgagccctctgaggcccctcaagggacagggcatgggtgtgaggggtcgcgtgcgccccctggcgccgggtccgctgggcggggtggtgggcggggacggtgggcggaggcggaggcgggaggcggagccccggggttgggagtgcgggggtcgcggcgcagagtgggagccggagagcgagcgcggctgcagccggcggcatggctagcacggcttcggagatcatcgccttcatggtctccatctcaggctgggtactggtgtcctccacgctgcccaccgactactggaaggtgtctaccatcgacggcacggtcatcacaaccgccacctattgggccaacctgtggaaggcgtgcgttaccgactccacgggcgtctccaactgcaaggacttcccctccatgctggcgctggacggtctgcatccccgcggcccccgccctcagccctccttccttgatggccagcccgctaggcgccctctcgcccccaatacccccagcgggacccctagactggactcctctgaggcccgacccgtctctcccaacagggccttagggagccagggacgctcctggtgcccgccctctcctgatggctgtctcgcggggcgcctgttcgagcctgggaccccgggaggggggacacgcagacaggcccgggttggtgactcccaggcgtcgggggatggggaagctttgcggtcctgagagtcaaggaagcggctgccctcccccaccccccatatcttggggaccgctgggacccagagttcatgctgcaggggcttgtctcctccacctccctcccctacgttccccgaaggctgggttctgataaaaatggtgtcattgcaagccaaatccgtttgtcctgacctcccttgagccatttcgttggttcttttaaaagtaggcgggggtgggggttgagaggttggaagcgggaaaacatattgcagaatttgttgttgttattgtttccctttaaagagcttctacaaacttgtctgcctaggcaacactacaaacacttcctccgagttttaggaaaataatagcccttgcggtgccgcgatgagtccgcagagggtagggaatcttgggccgtgagagcgtggcgccgggagctgaccagttctgcatccgagtccccggtgcctgctgctgtcctgggttgttcctttgtg

SEQ ID NO: 6291 - DNA, 6000 bp, Homo sapiens
cccttttgatgacaactccatcctttcagttgtttaggccccaaactttggcatcatctttgactcctcccttcctcttttatcccacattcaatctgtatggaaactctctctgatggctctgtcttgaaaatgcaggcaatctgatctcttccaaccacctctgtaaccaccctgtcttggtctgggccaccatcaatctcacatgattactggaatagccacttaaccagttttcctgcttctgtgtttttccttttacagttgacaataaaacactcgaaaggatccctttaaaactgttctgcagtggctcctcatttctcagagtcaaattctcacaatggcccacaaggcctgacataaccttcctcccattgtctctctgacttcttccctactgttttaccctgccggaatttaaatttttgagggtaaaaattattgtctttattgttcatcagtgcataccaaatacgtaaaactacatggcatacagcaggggctcaatatatatctttggatcaaatgaatgaatcttgtttacttctttataatttatttttccactgttagactataagctacatgacgacaggatccttattcttgtttaatagcatatctaaagcattcagaagagtacacagtacatagcaaatgcttaacaagtccttatcaaagaaataaaagaatatctattgggaaaagattagtgcatctacttacactatactgagttaatgaatacattatacatacagatggtttccattcattctcataggcagctatctatggtggatgttacacagtaaggcaaagaatgaactgttcagataaatagaactttatggaaagtggtatgtagggtcatggttgccccaaagttacaatcatatagtgaaccggaatatatcacaatcagtatatatcccaattctttctgccattggttctaactatgtgggctctgtctgcttaacttcctgaggaaaaagaaagctgtcactttgctggttatttgcaaaactgcttaccccaggggcttttgtggggagaaagattgtttacaaaactgaaaaacaaaagtcatttcagtatataagagcactttccattcttgtaggagagagtcatgctgccaatgacttacattatctgttttattttcatctctattgaggggcattcaaatctctcttcctctgtgcaaatgtaggggatccaaaactatcctctgtgatcatttggattgttaatctctccagggtttcttcaacattctcaaggcagtttctggcaccaaagggaaaatggagaagttgagatgcaattttatttcccaattgaacttgattaaatggggactgttctaatcaaaagtttgaatcctgggggagtgcgatgttgttaacaggtttgagaatattgcagaagaacagggaggaagtatactaaagtcaaggcagagaacgaatcaggcaagaaaataattgtagtaaagcttattaaggcataaaattaggtgaacaaattgcttcacagatagtgttaagctcattgctagaccggcaaaggaagtggaagaaagctctttgaaaacattatttttattattttaataatttgtgtgggaatcatagtagctgctatatgttagggagaaacaattgccagctggtgtcatcgtggagtaactatagtagactgaatgcaagtatgttttgcctttttacctggagagcgttcaattttagaaagtttctattcatttttgcctgaatgtgaggtctgcccttgtagataaggaaggctgtttattgtgtgatttaagagctttgattaggttcacaccaagttccacaactgtaatagggagaccacacctgggacagactgtatttacacgaccaaagttacctattattaaaaaatgaatttttgagtaaatgcctgaattgtctgtgtaattgccttgattctatgcattgttttccttgtggttacctcaaggaaatggagtcacttcagtagctattttactgaaaataaaacgagattttcggagataatgttctttgaaaagtgttaaaggtacacttatttatggaaatacacgttttgttagcaatgtagctgctacatgtttgtcgtacattttatttttacaattctcctaagtgatttaacaattatataatcattttatgattgttattgttatttttccctctttcttgaaactaatagactaagtgacaaaatactgcaggatgtagaattgctcagctttgcctataaagtcaggaggagagataacataatttaattattctattgcaattctgttgtctcttcttgcctcttgactcaaatggtctcaagaggggagagaggaaattatgggctctgttgttgatgtttgttgaacttcttcagtgactgtattttcgggatgttagcagtttctaatttggctttgctttcacctaactttccttgcttcagtttcctcatctctgaaatgggatattatacttctcttatctccttagagtgttgttctgagaagcaaatgaaataatggctaggagagtgctttccactatacaaactaccactagcattctggttatccattttggtagctaataaggtgatgtttatccatgtgatatcaagcaattttataggaaatgagaagcttcttcaataaggtgatataaaaaggtataatgatgttttacttaactaaagcagaggtatgtgtatattaagcagacacattcagaaaataattgttgggcttttgttttatcacagtttcttgctgtggagtggggtgtgatgccattaataggatttcaaacttaagtgagagaaaaagaaatagaatcaaataagctttaaagaagctgattcatctcacccaacaccttttctactgatatagcctcctacatattaggaaaggcaagggttggagttgtttaaagagttgaaaacgggaaaggaaatagaggagggaagttttattgagaagaattccacctgtctaaacaaggaaaatagtatcctatgggcaaactttagcatccctgaaagagccctggatcttcactgatggctgcagaggggacaccctgataaatagatgacatcgacagagtgtctcaggaagaaacaagtgcatggattcataaaaaggccagatgggacggtgggctgctatgaaatattatagcacacctgtggaatacggtagtgtagctgggagggacacattggtctgggccagggaatcacactgcattgtcctcacacattgcctttaacacattgccactctccactcggaaaataggtcgagcaggtctagggactgtggtagggcagttacaacaatttgatcgtatatcttttcactatctgaaaaacagaagttgttattgagcaaagatttagttctggggtaatactaaatgcaacatctagatgtttgaaaaataaagtttccaaaaaacatctgcatacaaattagggcttatgaaatataggcaagcttaagtgttatcttccaccattgttgggaaggaataaatcttgaacatttaggagttcaacgtctattagtagaatgatttttttaggaggtgatccctaaactcctttttatgttctaagtactgcatggttgagggctggactgtctagtgctgaaagaaagtgtgtattgaacatagagcctgatacacagttaggcgcttaatggttaattgatgctggttgaatacagttgtatagttggacgcaccaagtttgttattaagggaggaccaccataaaactcgaacaccagttagaatgtcttgggtagaaattcacagcagtctggagccacgttcccctgctgagaagggaactgccaacccgtgtaaagtctggtctagtgagtgttcccgggagtgtgcaggtgttattcctgaaaataaggccggccactaccagacagagaagctgcccattttaaggtgtcagatcaacgccagcgacgcttacctcggggcctcctctcgccccacctttgcctttctgccaaatctctccttgctcccggccgaagggattcccacccccagctgcctcctccgagccccgcggagcagcggactcctcccctggaaactcctccggggctgggggaggctttggcgcatgctccgtacctagggcaggtttttgctgcgggtagcagggctcctgtcacaccggctggcgggttgtggcggtgccagcctgtgtgtgcgagtgtgtctgcgtgcctgcgcctgggcggacagcccggagcggcagtgcgactcgccgggagaggcgtctccgcagaggcgcctcgcccgctgccgctgcgctgcgggggccgctctgcaaacttgcggcgagcgccgtcagccctcgcggctccacagccccgcgacctgccggcaaaggcgccgggcgcgcgtgccgggcgcggtgcccgcggccggccggggcggcgggagcgggccgcgccttcgcccttggccggcgccctggcgagcctcatgcagccccggcgctcgcggccgcagctacccggctgcccggctgcgcgcggcaggtccaggacccgaaccccgctccccagcgcctgagcgcctgcaagccgccggcgggatgccgcgcgtcgcctgagagagccgcgccggggcgggagcagggagcgggccggcccgggcgcacccgggagcgcagggcgccccacgccgcagccgcagccgagcgcgccggcgcccgcctcccccgcccggctcgcaggccccggctcctcaagccccgagggccgcggggccgccagccagccacacgcctcggcgtcaggggcatggaggaacggcgggctccgagccgcgccccggagtccgcgaaacttccgagcgggcgcccgtccgccctgccgccgccgccgccgccgcttcgcctgccggcctgagagcgggaccatggatgaaaggttcaacaagtggctgctgacgccggtgctcactctcctcttcgtggtcatcatgtaccagtacgtgtccccctcctgcaccagctcctgcaccaacttcggggagcagccccgcgcgggggaggccggcccgcccgccgtcccgggtcccgcccgccgggctcaggcgccgccggaggagtgggagcggcggccccagttgcccccgccgccccgggggccccccgagggacctcggggggccgcggcgccggaggaggaggacgaggagcccggagacccccgggagggggaggaagaggaggaggaagacgagccggaccccgaggccccggaaaacggctccctgccccgattcgtgccgcgcttcaacttcagcctgaaggacctgacccgcttcgtggatttcaacatcaaagggcgcgacgtgatcgtgttcctccacatccagaagacggggggcaccactttcggccggcacctggtgaagaacatccggctggagcagccttgtagctgcaaagcgggtcagaagaagtgcacctgccaccggcctggcaagaaggagacgtggctcttctcccgcttctccaccggctggagctgcgggctgcacgccgactggacggagctcaccaactgcgtgccggccatcatggagaagaaggactgtccccgcaaccacagccacaccaggtactgtcgcccgctgggtctctgttcttcccccccaccccccatccctcttcctcagtcctgacccagagcgaccccgcgctccctgcccctgccgatggtttcctggcgtcttcagcggttggcgccgtggctttggggagggatgagaaacctccggatagtgcctaggtcctgaactcgttcttcccccagcccccaccgcttcccgccacccctctgccttcaccctctaagatgtgcggagccaccgtgtggatcctgcctgt

SEQ ID NO: 6292 - DNA, 6000 bp, Homo sapiens
aattggacaaaacgcacagtaaagctaggaaagaatgaagcaaggaaagcagagatttattgaaagtgaaagtacacttcacagtgtgggagcaggctgagcagcagctcaagggccccagatacagaatcttctcgggtccaaataccctctagatgtttcccattggccacttacttggtgctcaccccatgtaaatgaagtggtggcctgcaatcagaggctaaagtgaagttacaaagttgcacttctattcaaacgaagccttggcccacaatcagtctgattggttggggacagcaaccaatcagaggctgaagtgaagttacaaagttacactctatgcaaacatctgattagttgcagaaagcaaccaatcagaggcactttcaattttccagctgcggcacagaaaaggtgggggtttgcaaagggagtggcctctgggccttttgttacttaggagtggaaagttagggttttcctttccaaatggctctaggaagtcagtgtgaaacggccttaggttccctgctcgcagaccctgttctcctgcctaactactagagtacagtgtgcacttcctaaaaacggaagcacttttgctaataattttaacttgacacaaaagtagggtgatcagataaaatacccttatgtcccatgtaatagttggaatgtacttatactaaaaaattattcattgatcatctgaaattaaaatttacctgggtatactgtacttttatttgctatatccgacaatcttatacagaagtcgtcatgggaaactcagaaaaggctgtccaaattattctggcagagaggagtggaagaaacaaatgccatttaggttgggtgcagtggctcacacctgtaatcccagcactttgggaaggcaaggtggatcacggggtcaggagatggagaccaccctggccaatatggtgaaaccccatctctactaaaaatacaaaaattagctgggcggggtggtgcgtgcctgtaaccccagctactggagaggctgaggcaggagaattgcttgaaccagggagtcagaggttgcagtgagccaagatggcgccactgcactccagcttggtgacagagtgagattctgtttcaaaaacaaaagaaaaagaaaaaaagacacaaatgctgttaaaaaaaatttaaaagacaaaaacaaaaaactgtggggcccggcgtggtggctcacgcgtgtaatctcggcactgggggagaccaaggcaggcggatcacctgagttcaggagttcgagaacagcctagcctggccaacatggtgaaaccccatctctactaaacatacaaaaattagctgggcgtggtggctggcacctgtaatcccagttacttgggaggctgaggcacaagaatcgcttgaacctggaaggcggaggttgcagtgagctgagatcctgccactgcactccagcctaggcaacagcgagactctgttgcatttaaaaaaaaattgtggtaaaatatacataatagaaaacttaccgtctaaccatttttaagtgtacacttctgtgacattagcatatttgcattgttgtgcagtcatcaccattcatcccaactttttcaccaacccatactgaaaccgtatgccattaaacagtaaatccccatccctccttctgcagactctctctacaaccactgctctactttctgtctctatgaatatgacagcaccatagtattggcggtaaatcagagttggcaaatgcaatctgaagcagaggagaggagagagtcatatccctcaagttttacagtcccattaaaagtattagtactttgagaaaaggaccgtcacgatcatggggagaatgaaggaaaaactccatttctttccagtttgcaactggaattgtcactttcgtctttcggcacgacagcgcccaggccacaaaagcccacagggcagggcctccattttgtggcctgcgtggagggcggggcggtctctctccgccacgccccagcaccgggtagacaccgcagccacgtaaccaaggaaccccgaatgaggcgttggccaggtgaggccggatccggaagtagggggaccacttcgccccgcgtacgagccccgcccccggcccctcccaccagacccaggccgacctagatgacgtgtccgagtaggagttggcgaggtgcggccgggcggccggccctgcgcatgcgtgatacttgcaccggtcgagatggtagcatgagtctggaggtcattttctttgagaaaggctccgcttctccgggtttttgctgatgccgatcccgggggattgaggaaacattgagctctggagtggaaaaggttgcagacttttagactcccaagtcgttgtagtctcaatctctagtggctgcgttactgcaggaagtcacggaagcctctcccctttcttaggcgcatccttggctgtaaaaggaggttaaaagcccctggaaaacctcaggtttatttcagctctgaaagtccggttccaaatttagatccagcactcttgtggcctggccagtgatggtcgtggagtgctttccccgcgcctgcggtctctaggctctgtggatgtagaggtgtgggatgtaggagcaggcccttacccgtggaattcacatataaatgggggaatgagacagcaaacaaacaaacgtgatccttcctgatagtggtaaatgtgggatgccgaggtttaagcagacgagtggtattaagggatttcaaggttttataaaattgattttgccaagagtggaagctgagaggctactgcagtaagaagtccaggggaactaagaatttggcttggaccagagtggtagctgtgggcatggaaagtactgaaaggatttagcccatagtttagcagcccaaccaacgggacctgctgaaggactggaggtaggtagtgaggaaatgagaaatttaggttcttctccagggttggggcctgaaaagagatgggcagcgatgccgtttcctggaaaactgggagaggaaatgtttgggatgagggcagtgagatataatgaaggtcaagttttttttttgtttttttttttttttttttgagacggagtcgtgctcagtcgcccaggctggagtgcagtggcgcgatctcggcttaccgcaagctccgcctcccgggttcacgccattctcctgcctcagcctcccaagtagctgggactacaggagcccgccaccacgctcggctaatttttttgtatttttagtagagacggggtttcaccgtgttagccaggatggtctcgatcttctgacctcgtgatccgcccatctcggcctcccaaagtgctgggattacaggcgtgagccaccgcgccggccgaaggtcaagtttcagtggtgctaggaaaagaagatagtgagcaaaaatgttaatttttgtttcctcctcttaatatttggagaaaacgtctgcttccttttgttatattggaaatctccatgacttccaaatacagaatattttacaatttttccctatcccaaagttcagcgaatatgttgatttatttgagggagaggacatgaaagggaagccacctaggcacaattttctgctcaggccctaccagattagtttttgttatcaaaaaaaaaaaaaaaagtgccattccttgggccaagctatgtgctcagcactttccctccatttttgatttaatcttcacaacaaccttaagatgaacgttcttttctacttcccagttctcttgattaacttggctaccccactatatggatcaatttgcagggtcctaggtccctttgaaaatctgatgaaagttataaaccttacctgggaaaaaagtacaaacacccgcaagaacttgaaataggagttcactggccctcaactttctgagcttactatttcacaaacctgcctattcttgaattctgagctggaggtcatgattctctcttatgtactttaagatgatgcactcttccgaagtttttgattgaactctagtggctaactgaattgactttttcagatcactaaaaagcttctccttgaaaaatactcagaagatgcaacacacacacacacacacgtgtgtgcacttacacacgcggacaccgtctcacatcatcagtgggaaaagtgatagaatcttgctaaaggctgatcataccatattaatccgattcgccagaactactttcttcactgagctctcaggtatgctcgggtcttcctttaaagaaaataaatgtcaacgctacactctatcctactcccattttcctcctcaccccatttccactctcccttaaagagatgtgtgcacacaatcactgcccaatgcaagaatgcaccactgcatccaatgcttggaaattgtccgtgaagatgcctttgagtagctgtctatttgaggatttgtggctaattcctccccatttgtttccttagcctgctcccaaccaggtgtctccagaactttttctctccgccaccaactccgcctccagacagaccgcaggtgctttctgtcatagggactggcgtgccgcggacagtgtgacaaagaaactgtatgatggatatgagaacttcgtaagacccagcagcaaacggggagcggctggcgagcgctccacagcccccaagcgtgggagctctagatcggaatttgtaatttggaattggaacgtgagcgccggaacagctctcccagcaaccacctctcccagcaaccacctcagctggcgcgcggaaaacccggaaagtggatttcgcccccgctccctcccggaaactcctcctggtgcctgcgaccgttctcactgagcatgtgcagacggcggtgcgcatgctctgttgcggtccgcttcggtttctgttgcgggacccggggtgtctcctagcgcaaccggaactagccttctgggggccggcttcctttatctctggcggccttgtagtcgtctccgagactccccacccctccttccctcttgaccccctaggtttgattgccctttccccgaaacaactatcatgagcgcgaggctgccggtgttgtctccacctcggtggccgcggctgttgctgctgtcgctgctcctgctgggggcggttcctggcccgcgccggagcggcgctttctacctgcccggcctggcgcccgtcaacttctgcgacgaagaaaaaaagagcgacgagtgcaaggtgggtgaggcctgacgagccctctgatgcactgttggaaggggaagtcgtccctatccgggggagctgatcctcgggtgggagcgagggaagggggcgtagcagcgggtggggttgagtttccccagaagcttttggggtctgctgggctgtgggtggggggctctgaaacagcccttgcaagggtagtttctggaggacgcagtgggcctcagactcgcctcccgtcttgcgggccaagtggcacgagcagctgtattcagttttcctggaacagggaccgtgtggagcgcccttggagttgggcttcacgcctcagagctttggagttggatgtatgcaggtccacgcgtgagtgttcgctcacagccctgtaacatgtacgctgaggaagcgggtgaccgactccctacatgtgagcaacactcagcctagttaacagtttccattagcttttaacttcattgcttcctgtttaattgcattttcctggaaccttctagttggttaggagagcttgttctttctaggactttgatatctcgcttcacaattagaagttggttccttatttgtggagtataacacccagagccacacaaagtgcattaataaagagttgctgtaatggttgaggcacttgatttctgagttttaagtgtaaaagattttaatacacaaaaaaagatacgaggtctcactattttctctgagatggttttaaacacttaaaaggggcaaat

SEQ ID NO: 6293 - DNA, 6000 bp, Homo sapiens
ctcttttctttcatactgccttctgctgtgtccagtattcctgagtctaaagcctggggtctcaattgggaaagaggtaacttcctatctgaaagatcacaggtgaaaatctgaggtcaaatttctcctgtaagagtatttatacaaatcttcttgttaacctcacacctcacacatcttgtcgctttcagtttttgaatctttgagtcttttctgcattgttgacagaagcacaatgatggagctgtccagctctacagtttccatatgtgagaggcttaatgatgtcaatactgttggaggtagagattagggaactgtcttgaatctgagtgatcagcctctgggaagcctgtcctcttatgcacagggcaagtctcggtgagaggggcagctgtgactcatcagcagttattactgtcatcagcgagatgggtggatacatgggccccggagaggggatctgggaggcaccacaacatccactagggagacagtcagagtccagatacaaagtaacttatgaactcagagagtatttgggctttatactataaacaatggagagctactacaatattttcaatagggaatggacgtgatgaaatttgcatgctagaaagatgtcttagggagcaggataaatgtagacacaaaaagataagaataaatgcagagagaccagttgggaggctatggcaatagtgtacgaggtataagatgaagatctgaaatacatacattgaagtggaaggctagattactaagaggtgggctcaatgtgattcagggatttaccagaaaatccagatgaattgtagacaggaaccaaaggtaactctcacaattatgtctacagggaataagttaaaatgatatgattaacaaaaattgggaatataggaaaaggatctggtgttatatagattcaagctgaatccacagtcatctcagggggatacctaaggccaaaatgtcatctgacaactgatccagaatccactatatcacctgcatcctttgttgactcataaatttattatttatgttgtacattatttttagttatttttgccataaatatatatcgagtatgtaatatgtattgggcactattttagatgatggcagaaaaaagtggtagcctatgtaatggtaaactaagaaaagtaaagcaaccgatgggatctttcataatatttttctgggcaaaatgaagaaataggttcatatcagacaactcagtacacttgtaagtggttggatggcctcttcaatatgtgctaagaggctaatattgtcttaagaaagattgtatctaaacttggtcctcagcctaattttttttcaaatatcttcttaattatttgaataaaggtacagaatgtgtgctcatcatattacttttgagagggtgaaataaatataaaacaagtaaccatagttatttttaccgactggataaaagaacaaagcttagatgaaaaataataaagataaatatcaatttgtgtttggggaaaaatacacttttaaaagcacacaactgggacaacgtggcattcaaaaaagtgaatatgaccttcagttttattgggagaaatatagcatatgaaacaagaatactcaaagtactgatctattccacatccattaggccacagcttcttgaatggtttcagttgtatatatcatactttccaaaaggcatccatcccagaaaaagcaaaaatgctcagaaaatcagggttttgaaagcttgaagttataatacgtaagaaagaggtgaaggcaatgaaaatatttatctttaagaagtgtagaattgtttgggggttatatagactggggaatatactattacatcattgaatatttgattcaaggctagtggctagaatattattttaaatgtcttcttagagtagacctggaaccaaggggtgaaaccttcaaagcaattctcagaaaaggatgtggtcctcttaatttttgtttttttaccaaggccacctaattacttggcaaatatacggtatgttatcaacaaatttagttttgaactagacaacctttaaaaaataccttgaaggctgaaattctctgattgtgtaacctgaggactgaaggactccattcaaggactagggtgttttcaatctttttgaattcagttccagatgcacccggtcctttcaggcacccttcattatgcatccaacctactgctgtgtccccagccagcagaagtgagaaactcaggacctttcttggcacatgtgcgtccttgaggttctgaaaactgggaaaatggaaggagtaggtgtttccaaggcattcaatactttggttaaaaaaaaaaaaaaagaatgctaaaaggcataaatttaaagttaccctttgattttgacagagtttctgtggatccaagactttcgactgagtcaccaagtcagccacaatataactatttcaactgactgggaatattatttctgagtcatagtaatgtaatgatctgaacatttatattctctcagttacctagtacatactaacttcatttcaaaggtgaataatatattaaagagaatattgcttattgaatactacactgtatgaaaatactacaggttaaaaaatcacttaaatccattaaaaatgttcaaatatcaagtccctatttcataataaattttccctcagaaaatatgcaaggagtaaacaatacatgactcatttattaaagcttccatgtttttattgcaaattcctagttgggctttggaatagatacttcccttctatcattaccacattctctgagtcactaggtttctagatgttgacaggaaagcctgttcctatgtccttgtactatcacacgtgggcaggataaaatgtaactctagaatttgtactaaaggtgggtggaaattccactcttagatccaggcaccctcaggcgtcagccctgagccctgtgctttgcaaacttctcaagctattattatgtaaaaatagatatcttgggatattattcaaatgcactctgtgattccttagagctggggttggggcctgagaagttgcatttccataagttcccaaatgatgctgatgttgctgcaggtccatggaccacgctttaagaacaactgacttagtaattcccattctgtctcttttagacaggcccttcccccacaggctgcagttcatgtgacttagggaacctgccaactcagaacctgtgtccttttttcctaagccgcactttggttatccaagaccccagaattacctgtccagacagcctcccaaaactgtgcatacctgtccccagtctgtccttgcaatagaagactccaccagtgtgtacacacctgtatctaagtgtggccagaaaatcagctatttgaaaaaggttaaattgtgtgggtaggggttggggggtggggggacacacagatgggcctcatgcaaaacctcccctattacagggtggagattggggtagaaacagaaatgtactatgattagaggaccttcatcgtcttcttgctccagcaggctagtgttgtggtggtcttacccttatacctacttatatataaaggacagggagaaatcccatcctattatggctcatccctgattttaaggatctgggaccacagatgattcttggatggttctatttcatgaggaaggattgcatgtacagtgctcttcttagggtgaatgaaaaatgttttcccccttccatataaccctctacacattttcccagatgaccataaatgtaggggatagtgtatgcactttggatttcagctgaaatacgactaacttcctctgtgaatttgagcaagtcagttgacctctttgccctcagtttctttatctttaaaatgggagtaagaatgtctccctgttctcttccatctccttcttatttctacccaatttaattcaatacttttttcagttttttgttcagatgctaccatctttgattagatcaagtgcctgtatctcatctggaagtaacttctcactgcacttgcaaccctttgttctttttttttgtggttttgtgttgattaatgtctttctagctcattggactctgagagagcagggatcatgtctccttagttctctgttatattcattctgtcttgcacaaaacctggcacctgatagatgctaaatccccatttgctaatgcataaataaatgtgtgattattgtcataattagagaaaacatactaaatgactggcacatagtaggtgcttagtaaatgacaccaattgtttttcagtgcaatttgtgctataaataaacatttaattttcttttctcacatttgatatatggggagaatggggtgaatttgagacaactacaatttaaactgtccaagtcaccaacaaattgtggtgtgataagctactggcctaaacagctggaagcatgacacgctttttaaagactaaagaaatgaaatatccagtttaaatcaaaggataataaatgcaagaaaaagttgtgtttgtcagatttccttgccccggccccaacccaaactccaaagagtgcatctactttaaaagcgtgtggtgaaagtaattccctacccaagtgttcccactactgtcactggcctcacccttctccacaactcagggattattttaaaggtttctttaatatcggccagtccaaatattctcttgtcaaatatttctgtggcccgtacttgaaatctgtgaacaggacactttttttttttttaatgtcaaaataaaccatctgcttgtacaactgtttctaattacttccctgcctagactctccactgaggggtttggcaccagcaccccgcccagagcagtgccgctgcccaaatcctcgcaggcagctcatcaacgcaattgcaactccggctggagccccggacctgcaagcctgggtgtccgtgggtccgtctgcccagccatctgctggtggcacctctccctcctgccgcctccctcggtgaaccccaccttgcagaagtgcagctcgcccggagcagcccaggagctcagcatgcgtcccccaggcttcaggaacttcttgctgctggcgtcctcccttctctttgctgggttgtcagctgttcctcaaagcttctcgccatctctgaggtaagtttggtttgttattcttcagtacagacctgccctgcttatgtggcagggctcaagcttgcaggatggctgccctaagccaagagctgttattaaattggacaagggataaactgttttcaacctgttccttttcctctccttatatctacagcgtgtattgcctcatgtctgtccttttgcttttcctttggaaaaatgcaatcattgaataaaaatataattttcttttctgcaaatacatatcaggaggaattcctgctgtgagttaaaatgctatgtgtaccagtatcttctcacaacatgtaaagcagaatgatctgtttcccaagggcagcaacaggaggtctgtgttacattttgtatcatcctgaaagagactgagtgaggcacactgcaatagtgaaactaaactttttaaaagtagagttcctaaagactgcttaatgcaaattatgcccgatgctatcatagcatgtctaactctttctatagattcacgttttctcttctgtaatataagtgcccattggccatcagatagcagtgggacgttttttaaaggagaactgaaaagtcagctgagtgccgtaccttggattactttgtatttaatctaaatgtgcatataagatttagtgataaactaccaaagagcagggcagttcacctctgtccacctggaggaaggacctgtgtccgggggcaggtcacccattacacattttgggccctggtcatttctctggtgggtgatacctgtttgcttgggaaaatacagcccttccaggcagcgctt

SEQ ID NO: 6294 - DNA, 6000 bp, Homo sapiens
ttaatctgtaaccggggttgagaaatactgctgtggaaaaataactaagctttactaagtggtgccattaggaatgctaagtgggggagtgattagtgataaccgagccggaacccaggcaggtgtagggagagatggcatctgagaatgactaagagggggccaaacatggggtggggcagaagattccagaccaagggaccagggaggttagagaatggcctgcggaggggcagaaagtgacgtttctgccattgaagaactctaggggctgggtgcagtggctcacacttgtaatcccagcactttgggaggccaaggcaggtggatcacctgaggtcaggagttcaagaccagcctgggcaacatggcgaaaccccatctctaccaaaaatacaaaaattagccaggtgtggtggtgggtgcctgtaatcccagctactggggaggctgaggcagtaaaatcacttgaacctgggggtcagaggttgtgatgagcctggatcacaccattgcactccagcctgggagacggagcaagaccctgtctcaaaggaaaaaaaaaaaaaaaaaaaagaactttaggaccaatccctggggagatggtcacctaggtaattctggacctgtggggatagcgactgaagacacgtgtgcacagcatgggccagtaacttggaggagcaaggctgtttgccctcggaggcccagcttgagtcaccaccctcaggtaatagctctttctagcaccaaaatgacactcattaataattcacacttcctggttctgtgtctacagcagttggctctggctttgggtttgtcatttcaggtctcggtgcaacaattcttctgaactgtctttgcaggaagacctcatttttttgcccccactcccttatttccccccagtttttttcacttaggggccaatgaatccaagatttctttggaaagaaaggtggagggaggaatgcaggataggtgtttatgagtctgtgtgtaggtgagggtgtggccagggtgtcacctgaagcacccatttgcaaacccacaatttcaagtcttggggttggcctcctagctgttgcctcctcctcattcatcccatccctccagcactgtgaagcagctgtgctcgcagtgggtcaggggtaggtcctggttatttgaggcgaagacaatttcattccccttggacacttactagtttggtgatgtgcactgacctcgggcctaagccaatcatctcagggactctgctacttgcgtgacagactgggcaggagtgggcacgtgacttagctggcacgtcactgtgaagtctctccttctgcttagatgtgaaggaagaaacttgcaggccctggagttctggcagtcgtttcacttttgaatgcactgggaggggcaccaacacattacattatcatttattcagtctatggtagattatttccaaagataatcccccataaattctctgtatgataatccctcataaggattaggagttctcataatccctcataaggatccctgtctgtacatgggatcctcccatcaaggagtgaaatctacgttcttatcccttgaatctaggctggccttggaatttatattcaccagtagaacatggtagaagtcatattcttggacttccaaacccgggccttacaggctgtatagcgtccacattgaccctcctgagctgccatgtaaaaaactcaggctagaccactgaatgatgagaagccagagagagacagcaaggccggcctgcccccagtgttctatcaccctagctgagaccccagctgtgtgactagaccacaggaagcttccagccccagctgacccccagaagaatgcagctgcaggacaatcccagccaacaacaggtggagcagaagcaccatcgcaccaattccgcagggtcctgagaaatggtaacccactcactgccgtttcagctcctgcactcgcggtcactcgtgacacagccaaaaataactgactcacagggtgtcttagtctgctcaggctgctgtaacaaaatcctttagatggctattcatacacacagaagtttgcttcccacagttctgaaggctgagaaatccaagatcaaggtcccagcagatctggcatctgagaaaagttctctgcttcatagaaggcctcttctaagcatcttcatatggcagaaagggcaagcaggctcccaaaaacctcagttttaaagggcactaatcccattcctaaccacctcccaaggcccccacctcttaatatttgggattaggtatcaggtatttgggattaggtttccacgtgtgaatttgggaggacaccttcagaccatagcacagggtgagttggactttgttttttaatagccctgatttttttttcttagatttaccgtgaagatgctgacatgtgttagaaacagaaaatccagctcatgtggtttaaacggagacgtctctcatagcaggaaattccaggtgagggcagcaggattttggtgaattgcctggttgtgccaccaaggactcctgctcttctcatcttcccaggcggccaccccagggtgaagatgctcttccggccaccttctcttataagtgcaaagggctgcggagcaccaggcattgcatccagacagggaatgcaacattcaccagggaaaaaggagcatttcctctttatgttcctgtaggagtgagaaaacctttgccagacaacccccagcaggcttcctgttgggactcattgacttgagcttgtttgaagccaattgttggaaagagaaatggagttaccaagattttctcaagagacagagtttacccttagccacacagagtggatacctgaaccagcaaggatagagagggcatggctgctgcattgtcaaccaacagtattcacaacagaatgaaaaacaattcacatttactactgaataaagcagacactcctgacagacaggcagccttgatctagtgccttatacaacctctgattgcgcctcgaccccaatcccacagtcacggtttacaaggtagaagcttagtcaaaatccggcttcagcagtcagggttcttgcaggaaactgaaggtgttcttgggaggggatttggaagcgagtttgatgaaggactctttgttgcggtgtggtcatggttcaaggatccttcaaagggtgctgctatttagggaccagcaacaatggcagaccgacaacatgtctcaccctaagaggcttgggggcggggagaagttctgttcgtagagcctagaggagttgtgcaatggaaagggcacccaggaagaatcgtagccacagagtgaaaccaacactggtgggtgtggggccaggccaggaaggagaggggaagaggcccctgcctccctcctacccggtctgcagcaggttgtccctgtgggtgaagatccactgagggggaccgccagcttcctgagcacagggcaggccagagcaggacaggctgggatggaaaatgaagaatcagtgctttagccgacaacaaatgggagccgtttactgtttagtcactatgattagtgttcactagtactcatttctcttcgtctaaaaagtggccaacaccatctcttttccacaagcactcgggagaacattcatattcaattgccttcctaagacccagacggggcagcgctctccacaggccaccaaaaggtgttgcctgtttggtttcatcagtgattatctgtggcagcaagacaggaagttggaaatcaagtacctcaattaagtcaaggctgaccgtggaattagagaacaagtgtttgttaccccggccaggtcaccctagggaaaacaggcattctccgggattgaaatggtggtgtttgtgtggtaaatagttctcagtccagttcaaagccagcagcattaaggacacgccaccgccaccgggagctggagaccaggcgaagctgagctcctctgtggttcaccaacccctcaggccgcctaagtgtcttctgctgtcgcagctttggggacagaggggtttcggaaacaggggcctcttgtctgcaccctcccctcccactgacaggctggcagcccagggcagccacctgaggagcgtccctgtgtctctccatctgcagagcaggaaaagcctgcgggtcggtggcgccacgctggggcgagacccagcttcggctcaggagatctcccacccagccggactcccgctctctgcccgcggccccctcccacactcccacctcgccccgcgatctcactgccccatcgaggcttccgggcggaggagaaaagttttccggcaggaacccgggaaggaagccctgggaccctggctgaaactccgggtttccccagtgccgagtcccttccccgccgcgcccagcgcctgcgccccgggaggcggaagcaacaggggggttcctccccgcggcctctgacctctgccctctgccctctgcccccagggtctggggcccgggcggaggcgcgagggggcagggccggcgcgcgggtgcgagcgcgggtgtgggcgcggggccggcgggggctgcggccgcggggcgcatgctcacttgcgccggtgacgtgcgcgcccggagcaggggcaggagccagcggggcccggaggctccagagggcggcgggcaggggaggaggagactcgggaggagcagagcgcaggctccgccgcggccggggtgctccagccgagcccaaccgagcgggcggaccgacggggagagagaaggcgccagagcgcgcgcgcgcggccccgagcagcagccttgccgccagtggagcagctgccgacgcgcggggccgcggacccagcattcgccggccgggccgggcatgagcgcggaggggccgcggccgccccctgcaccgcccggcgcgccgaggccgtgaccggagcggggggcgcggccgcactagtaccccggagcccatgggcgcgccgagccgggcgcgggggcgctgaacggcggagcgggagcggccggaggagccatggactgcagcctcgtgcggacgctcgtgcacagatacgtgagtgctcccggcgcgggctgggggacccggggaccagacagacgcgggccggccccgcagcccggaccctgtggccggtccagccccggggtcccgggaggtctccgatgtctgggactcggaccgcccccggggacgagcgggatgctggggaggggcctcggagttgacaccctggggcttccgacggggtctaggtgggcacagcgcggggccccagccccgggcggccacctgctccctggccgcggccgcctggcgcccccttcccgcccgcagcgccctgggggtccctcggagaggctggctggggttcgagctgtcccggcggaccgggcgcccggagggagccaacttcgaccccgccggggcccgggtctggggaggaaccttcagatgcggcttccgcgcagccgtgtctgtaagattaagggattgggaggaagcgttacacttctgcagaaaaaggtagcaattgtgtttgttctttaacacccctgggggattcagaagcggagtttggaatctttttattttttaccttaaagtaaccaattagatcagaagtccggggtcttcttgggttcctctggaatttgccccttcagtgataagcaagtgaagagctcaggagggaagactcggaaggggaaaagttgattttgttttacaccagaggaggggaaaccggaatccctggcgttaggtgtaaaaaggggtgtgtggccgggcgcggtggctcacgcctgtaatcccagcacttttggaggccgaggcgggcggatcacgaggtcaggagtttgagaccagccggaccgacatggtgaaaccccgtctctgctaaaaaatacgaaaattagccgggcgtggtggtaggcgcctgggatcccagc

SEQ ID NO: 6295 - DNA, 6000 bp, Homo sapiens
cttcctcattcttatcgaaccccgaatcttctctttgttcttcaaagacacgcagtttgtgtgtatgcccctgtgaaactgaatgaatcaaacataaagcctttgaaattgtgaattaccctgagccttgaaggaaatgtggctatacggcataggtcatgccacacgcagctgcaacttctgcctttctccctgtaaacaataaagaccaaatggcaccggagataagaccccctcagatcactacccctcctcatggagtcataacgcaatcttccttcaaatacagagatccctaaccaatggaaccgctgcggcgtgtgcccctggtctcatatgagaactgtggtgatcctgctggagcttctgtctctgcgtggtaagtgaaacctgagcttctccacttggaaacgctgaccccatgtgtctgcagtcagtgccttcccgggtggccatcctcaagctctgcactcaaatacacactataggtaatcagattttctgaatctcattatttgcagttgacacctgaattgcaatgctttcttcccaaataaaacgttaaatttggagagtcatctctacatttttgactctgacatctctaaagaccatttttcatcaaaataaaccagggctttttttttttttttttttagacagagtctcactctgttgcccaggctggcgtgcaatggcatgatctcagctcactgcaacctctgcctcccaggtttcaagtgattctcatgtctcagcctctggagtagctgggattacaggcgcacgccaacacagcccgctaattgttgtatttttagtagagacagggtttcaacacgttggccaggctggtctcaaactcctgtcttcacaggatcctcccacctcagcctccccaagtgctgggattacaggtgtgagccactgcgcctggcccaaaccagggcttcttgatgaaatcatggattccaactgtgacctagaaatgcccaaggtgagtttagccgtaatgttggtaactgggctggacatagtggctcccatctataatcccagcattttgggaggccgaggcgggatgctcacttgagcccaggagttcacaataagcctgagcaacatagcaaaccctgtcttttatacaaaagtaaaaataaattagccaggtgtgacagtgcgtgcccgtagttggaggtgcttgggaggctgaggtggaaggctcagttgcacccagaaggatgaggctgcagtgttgggcaacccagcctgggcaacacagtgagaccctacctctaaaaaacattttttaagtagtaactgaaaggcgggtaatagtggtaggcaaggcggggatcattatattattctacttttatttaaaatatcctttagaattgttacaaaaagactacttatctcaatttttacctatcaaccactactttatttcaaatactgagcccatgtatcagcttccaaacctgaactcttgtggcagaaactgcagaagaaaatttcaggagcctgtttcttgtgccaagcgggaagctaggccctgtggcctgagtcatgcagcacgtttgcaacttcagcttcttggactggttaggctgacaggtgaccacacagcctcttgttcttgttttgtaaatgactaggagagaccagagaccagacttccccgcttcccattactgatctttgctgtggaccagccgcctccttcattgtcctgtgcatctgtcctaactcagactagatggcacgacgaccccgtgacgtagtccgtgtggaacgccaaacatacctttcccaataggaaaagaccaccttggctaatcggagcacagtaactgtgcattcaccctcagagagaaagatgctggaattgtgttaagtttccctaaacttcatctatagaaatgatcccaaactgctacatttcagaacaccgacttctgttctttggaatctgtgcttcctgggcggcctgtcctcaaactttgcacttgaataatctctctttaaagtagattctgactcttgattattttaggttaacaatgtcttcagggaaatatattccacactgaattcctaacttaaaaaacaaagaaaagctataaaatgtgaaaaaaaaaaaaaaaaaggtcaggcgcggtggctcatgcctgtattcccagcactttgggaagccaaggagggtggatcacttgaggtcaggagttcaacagcctggacaacatagtgaaaccctgtctctactaaaaacacaaaaattagcttggcatggtggtgcatgcctgtgatcccagccaattttttaaaaattggccaggtgtgatggtgtgcaccggtagtcccatctacttaggacgctgaggtgggaaggccgcttgaggctgcagtgagccttgattccaacactgcactccagcctgggagacagagagaaatcctgtcacaaaacaaaacaaaacaaaaaagaaagaagggggaagaaaagaaaaaggaaagaatcagaaaaagaagaaaaaaagaaaagaaaagaagggagggagggagtagggcatcactttgtctaaataattgtaaccacaaaaaagtggagacaggtgaagtaaatagatgagtatggccagagcatggggcagcagcaggaaaggaaagaacagatatgtatggtttggactagatgagtgtttctgagcctttttttgataaatgccctccctccgttctgatacacactttaggacacagtgtgggaatcatgtcatctctgaacctccttcaaccaagattttgtccagcattagattctatttttgcattgttaagcaggtttttgttttgcaccataaaactgtaatattcagtatgcttgttcaaacacctctcctactttctaaaccctacttctagcctccttaagaagcagtggatcagaggagtccccgaatttaaacctccagagtttcgcgtaattgtctcattccactgcaggggagaaaatataatttctcttctttctctctttattagttgagacattctcctgaaaacaaaattcagagcaacaggagaaacaagcagaagtttattagcacttgctgtacccatcgtgtgagaggcctcagttcagaagtatttctctctcaaggcatgttgtgaacagcacaaggtcagacataaccaggtccacacacgtttatgtctttccacagggtgggaatatattgatgctatttcaattataaaagccacgagctacgaggagttgcctcgagacaattcccttcagtactacttgttaacttggtagagccatgggcaaaggctcaagccagtccacgtgtcagtcaatactgcaaactatacatcatagtgtacttaaaatacaaacgctatggtttaaacattccccatcaaacaaagtaacattggacatcaagagaaagaggataggaaaaggggttaatggatcaatccaaggaaagcaatgacgggaacaaggagtgtattccagcctgatccagacagaagtcattgtcttccaaggaagtccttgatgtgagcagatccttaggcagcagatgcagggtgctaagcacaagtgacagcaaggtggggtctatcaaaatgccagtgttgaattggtcaaatcccgccctttttaaggtcacagtcctctggtgaggactgatagtgagtgcctggtcctgtctttatctggctgagtgctgtctctattaactaggtgcacatccagtccccgttgctatgatgccttttgaaatgtaagattaaatctttttctaagatgtaggtacttatgcgacgggtgctttatacaaagcagtagcgtaggggccttaattaaatagtattttaacaaaaggccataaatcctatatgatgacaagccaaaaaacagagcatcttcagacttctaaaatgcaggagccaggcgccgtggctcagggctgtaatctcagcactttgggaggccgaggcgggtggattgcttgaggtcaggagttcgagaccagcctggccaactggtgaaaccccgtctctactcaacatacaaaatcagccgggcgtggtggcgcacgcctgtaatcccagctacttgggaggctgaggcaagagaatcgcttgaacccgggaggcggaggttacagcgagccgagatcgcgccactgcactccagcctgggcgacagagcgagactccgtctcaaaaaaaaaaacaaagtgctcgacaggaactttctgtaagccaaagagtatcgccatcgcaccttcaccttcaccttgggcagcctggtgccgtcttccctcagcccgcgattaacgagcggaaggccgcactgacccatttcagatcccttatttccttcctaaaaccactcaagagtttgggcacagtggcctccctgtgtgaggaacttgcttcccactcaccaaaagacaaacccttcgcccatccctggccgcgcacccggccggtcacccgcgctgccacccacaccaccctcctgtccataaagagcccgcgtttgggacgcctcgcaggctgaagggaggcctgggcgtccgcgatccgtctgccctttctcccctcgcgggcttcctctttcctcactttctcccgccactactcttcctcttccttttccgcgaacccagcccacttcccgtttcaggacctcggctcggccccagtcccccggaccaggccgggtcacgtgggtccagggtcacgtgccgctgcgggtcacgtgccgctgcgggtcacgtgtcggcctgcatcacgcgtgagggggcgcgcggtgctggaagctgccgcacctgcggggagccgagccgccggcgctcgacgcgcgcgctctcgcgagacccgcgggatcacgtgacgcccgggcgcggcgcagctcacgtgacaagcgctgccggccgcggtgtcttcttcgtgccggcgtcgcagtggccgggcctcttgcgtctggtaacgccgctgtctctaacgccagcccttggcgcccgcgccccgccaccgcagcgcccggcagtccgcggcccaaccgccgcccgcgcccccgctccccgcaccgtacccggccgcctcgcgccatggcggcccccggcagcgcccggcgacccctgctgctgctactgctgttgctgctgctcggtgagggggtcgaggcggggcctgggagcggcgggaccgggcggagccgaggtccctgggtcttgagggcgggggactgccgggtcgttgtcccgcgggtcgccccgcacccactgctcctggtcccggccggctctgcccgcgggcgggtgtttctctcggggtcgtagggtcggagcggagctcaatggcaggtgcttgggggaccaggaggtctcatcccaggacctggctcctctaaggtctgtctcactgaactcagtttttctgtggtggtgagtgcgaaagggaacttccgatggcttgctcggcggtctggtgctttcaggtcgttaagtttcctggcaagttgaggcggtgagatctagacgaggctgcgccgccgaaggtggcagggacgtctgtggtctcagctcccgggtgggtgacctagatcaagctcttcccaacatggatttcacccaggacagggagaagccggtgcgagcattccccacctttgtacttgaacctttctcctctttcagcggtgtggaggagatgcgagtgtatttatgttattgtgaattcacatgtatgttaaaataatttttaaagttatctttgggatttcacaagattccgtagtagacaagatgagggaaagctggcctcagactcacggtggcaatgttcatgtctagtaagtagtttaaagagcgccgttcctgtaggccgaaatgcgggaccagggaacacgtggggaagcacccttctcttctgtcagtttatagagctcagatgggcagtaggtgctca

SEQ ID NO: 6296 - DNA, 6000 bp, Homo sapiens
gctggaggccattttcctaagtgaactggcgcaggaacagaaaaccaaatgccacatgttctcacttgtaagtgggagctgaacactgagcaggcgtggacacaaaaaaggaccaacagacaccagggcctgcttgagggtggcaggagggagaggatcccaaaactacccaccggctactgtgcttagtacctggttgacgacataatctgtacaccaactcccatgacacacagttgacctttataacaaacctgcacatgtacccctgaacctaaaagttagaaaacaaaaaacaaacccaaaaaccacatcgaactcctgagactaaacacttaagagaatggctaattcaggtgatgctaggcaattaacatttcggctactcaaacaatgagtgttgagcatttgggagtcttggatcccttttggaatctgaggagtcacaggtccgccctccaggaaaacatatatggccctcacacgtgcaggcagctttgcataaaatttcaggggtttcacagatggcttaagcccatctgcaaagtcctcacaaggggaaggtagaactcagattaagaacggatgaagaagatcagaagccttcattcagccaactttgtctcttaatgttccagacagcagccatctctgccatctcaggcctgtgggtctgttgccaaagcagacagccgtaggctgtgttccaataaaactcaatttacaaaaacagacagctagcctgtgggctgtagtttgccgaccccgatctagattctagaggaataaatggaatacatattcactacattatttcctgaaactgagcttttgaaaagaactaaacaaaaaattcaaggttgtattctctggtaagatcaaatttagctaaattaaggcagatcccatagtctctgaccgtaagctgacaaaagatacagctagagtctttttatgaagttgacagccttcccaagggagggtgagcaaagccaagaattacctcaaaaaccttaggataaagacagaagtgcagcccccaaaatggtccaccaccaggaacagccatgacgcccttattatggaagtggtcatcgttgctagatttaaaaatctgccatggttatacaacaacatttactatatccatataacggaacataattcggccataaaaaggaatgaagtattgatacatgccacatggatgaacttttgacactgagtaaaagaaaccaggcacaagaagccacacagtgtatgattccatccacacagcgcacgactccagctgcacagtgtacgactccagccacagtgcacgagtccagccacacggtgcacgactccagccgcacagtgcatgagtccagccgcacagtgtgcgattccagccacacagtgtacgatttcacttatatgaaatatccagaatgggcacatctatatagagagaaaggtgagtggtagccaggggctggggcaagggaggagttgggagtgactgctaatgggtacagttatcgttcggggtgacaaaaatgttttaggactagatagaggtagtggttccacaaatttgtgaacgtactaaacaccactgaattgtacactttaaaatagttaattttatgttatatgaatttcacctaaaaaaattcaacattgtaccctcagaccctccaagaccaatcagcagactaatatactcttcggcgactgaattatttaaccagcattatacaactgatgactccacaccaggaatgtgcaaatctggaagatatgatggtgtctgatcttgagctcctgccgataaccccttgaagcctcccctaatgtgtgacaacaccataacaccagcagcctaatttcttggaactctagaagaacagatgcaggagcacatggatccaggccactcaaaatggctttgaatcactactgttagctagagtggacagaagtcggtatccagaaacacgaagagccccctgcaatctactcaaattgtctgatgtcacaagatactccagtaaaccctgaaccacacggtggtgccaaggcactggttctgaaggagcaagagaagctttggggtctaggcttagtccattaacaggcctctggtcagtcaacaaagctgcaatcatttgatgtcaccccttacaggtttctccataaaataacagtgattaaagcaatgatcgatagctaagtctaaagactaggtgcttcatgtccaaaagtgactgagagacccaagttacctcttgtgaaaaagggaactggcataaagcttcttaggaaacaaaaaggctcgtcaactaaaaaactacaggggagagaaggaagccgagtccctctagacaggactaaacccagatcaaatttacaaaggcccagacattggcagtaagctttgagtgcaccaagagaggactgaacccaggtcaaattaacaaaggcccagacgttggcaagaagcttcgagtgcacccagacaggactgaacccaggtcaatctaatcaaggtggatacactggaactagggccgcccttcaagctcacaaccttcactgaggcttaccacatcatgcaaattaaattattaaggccagcttttaaagtgtgtacatggggtggggggaaggcattttctaggtttcattatttctgttaaaatgtacacaattcttgaaataaaaatctggacaatccagtggaaacagcaaataaaatctctaaactataaaaaagtctcaaacactttaattgtgaccttgtgaaatacgactcatataatctggcaccaaggatacccatatgtaaaatggaaagaaattactcttaaaatgtccttagggtcaacttacccggggctggcgggccaatcatgttgatcgaataaactacgtaagtttatggatcactttcactctgtttcggtatacagcacgctagagggagggggagttaaattcatccctgctcttggatctccaacctcggcagcagtggaacgctcctctccagcatcctgaacatgttcaagttttccccaaactaagttcctgtccactctgcccctgtcctcctaaaagctggagcaagctatctctacctgcccaggtgtgcatcctaactcaggctacctggctccagcccggcctccgcagtgacccctaaaggtcacaaaagctcggctgctgcggtcagtgggatcttttcagctgctcttttgttcagcactgctgatggctccctcctcctttaaactccatcctcttggtttcgacacattctagtgtcctggtttctcctaccagccccctctcagtctcctttgtggctcttctcccatcctgaagcttgtcctcaccctccactcccctctacacgttaccgtgtcccttctccggtggctctctgtgccttagccaggacaatctttcagctcctatacgtcatcatcgcctaccactaagggtctgtgcattctgtttcttctgcctggagccgcacacggctggctgccccggaacctcactttttctctggctaatttccagagaaattctccacagttcaactcacaccctcagcatctgacaccactcccacagccgcatcctacaagttcctggaacccgtgccttagcctttgtcccaactgtggtcaaacaattgtgcatctggtgcctgtctcccctgctggggcatcaactccctcaacgccaagatcatgcctggcccagcaccagtcacacccagcagcaccttgctggcctctgaaccgatgtggactgaataaatcccatccatcaccatttccaccacatttcaaagtaactgatgtgcacctccagcagcctccctcctgcgctgcggaactctaccagctccacagatgcacacctacagccacgctacagctcccggctagagcccgcgctagggccccgctgtgcctctccctcccctcccggcagcagggcctcccccgcgaatctgagcttctcgcggattccttccttgcgctgttttggtcaacagcctcagcatctgcacagacgcccgcaggagcagccgagccctcgcccgcctcgactgcccgtttcgaagccgccctgggaagcccccggcctgggttcccgctcggccccggcccctgccccaaggcccctacagttcctcccggcccccgccctccgctcactcccggtcgtccctcgcggctccgggtcaaacccgcgctccccgcggtcccgcgcctccgacgccaccgctccggctcgcgggcccgcggcgcgttcctccctcggatccacgcggaacgccccgcgcagctcgctgggctcggcctcccacatccagcgcgccgcctgcgccgaccttggggcccgaccccgaccccgaccccgacgggcagaggcgacgccgggccacctaccatctcccccgcgccgcccgcttctggccggccccggccttctgcgcaggcgcggcggcggctccgccctcgtcctcggacggccgcggccctcggctccggggcagtgccgggagccggccgcggggactcccactcccggcatgctcagcgccgcccgggggcccacgggagctcgcgccccacagcccctgcgcgtccagccctctgcgagggccttggctcgcccctgcggggtccaacgccagcctgcggctgccaggccccacgccggccaggaagtgctcgccgcccgcggccgacgggacccgcccacgccccgcctcttaaagggggcagtgactgcggctgggcgggagtccgggtcggcttggctgagcgggggcggtgctgggcagggcggcggccgctccctcccggactcccggcctcccggcctccctggtcccgcctgggaagggatgcaaggaagccctccggcgctgcgctccgaggcgggagacagcgtccccctccgcccctcgggtcctggcgcctcagagcccggcccaggccgcggaacggtgatgctcgggccggacgggcgggcgcggatccctgcgtcccggtgagcaccaggcccgtccatccggggctctttcccggggtccccttccttccctccctccctggggctcccctcccctctctccctccccggggctcaccttcccttcttcccttcccaagggtccccttccttccttccctccctccctggggctcccctctctccctccccggggctcccattcccttcttcccttcccaggggtccccttccttccttccctccctccctggggctcccctcctctctctccctccctggggctcacctcccctctctctctcctcggggctccccttttcttgcaggtattgtctcccggggtcgggtggtctgtgtggcctggggtcccgctcctccaggccttgcctaggcgctcttcgctgaggcccacgttctaacctggaatggaacctgcgttcccaccctggccgcccgggtggactcggggcctccagggccggccgcagagatgcagccctgtccctggcccccctcctgtgactcctaacggctcctcacggtgtccatgacccagggtgtggacgcctgcgcgggggaagcaagaccgctgcgtatcgggtccctattcactgcctgtttttctgattattctgtcttccaaatttatcttatttaccggctttttcaaaaggagtgtcttaatgattggattacttgtgaaatatttgtagtttttttctcctacaggcttgacttaaatattctaaagcttttttgtggttgttgagacagagttttgctgtcgcccaggctggagtgcagtggctggtcaaggctcaagcgattctcccgcctcagcctccccaggagctggggccacagggagcatcacgcccggctaattatttcatttttaatagagacagggtcttgctgtgttgcccaggatgatctccaactcctgacctcaag

SEQ ID NO: 6297 - DNA, 6000 bp, Homo sapiens
tggaaggcagaatttgagagcaacaaactaggatatctggcagaagaaatagctaagcaacaaagtgttcaaggtgctgtgtggcttctttgggctgcttacagtataatgacaaaagagagaaacaatttgaagacagaatttaggcctggtgtggtcggtggctcacgcctgtaatcccagcactttgggaggccgagacgggcagatcatgaggtcaggagatcgagaccatcctggctaacacagtgaaaccccatcgctactaaaaatacaaaaaaattagctgggcatggtggcgggtgcctgtagtcccagctactcaggaagctgaggcagcagaatggcgtgaacccgggaggcggagcttgcagtgagtcgagatcgcgccactgcgctccagcctgggtgacagagcgagactccatctcaaaaagtaaaataaagacagaacttataaataaaggggaaatggaacagaaatatttggaaaactctcagcctggccatgtaagaataaaaaacatgttcacgacagactattgagggtggccaagacactgctaaagagatgatggatagaaggaaaccaggttctttctattcaccaagacaattagacaatgaccctgaagggtcattacccggagatcttcaaggtaagctaagactttgagggcaaggttcccagagaggtgcctgtgggacttcagcatacactgccctacattgccctgggactctgctccccaaattctggcacagcaccccacagtttgacccaccattctggaaggtataagctgcaaaccttggtggcatgcatgtagtgctgactctgcagacatgcagaatgtacaagctgtggggccatggtggcctccacctagatttcaaaggatgacttggaccggctaggggctcaggcagacacttgtcacagaggtgaggcatgggagccggggagccccgatcccccagaactgtagggtcactagtgtgcaactccaacctgggaaagctgcaggcatgagactccaacctctgagagctgctgggtggactgatcccagcaaagccataggggaggggctgcctgaggtcttgaggggtccaagccccactccagtgtgcccagatcgcaggacagggagtcagaggagattattcaccagttttaagacttaatgttttttttccattgatatagtttgggtatttgtcccctccaaatctcatgttgaagtgtaatctccaatgttggaggcgaggcctagtgggaggtgtttgaatcatgggggtggatccctaatgaatggcttagtgccatccccttggtgaccaatgagttcacttgcgatctggttatttaaaagtatagggcacctccctgctttttctcttgctcgcactctcaccatgtgagacatttgctctcccttgtccttccaacgtgattggaaacttgctgaggccctcaccagaagcagatgctagcaccatgtttcttgcactgtctgcagaaccatgagtgaattaaatttcttttcttttctttttttgagaccggtctcactgtgttgctcaggctggagcacagtggcaagatcatagctcactgcagcctccatcacccaggctcaagtgatcctcctgcctcagcctcctgagtaacagggactacaggcacacaccatcacacccagctaatttttttttttttttttttttttagtagagatgaggtctcactatattgcccaggatggtcttaaactcctgagctcaagcaatcctcctgcctcagcctcccaaagtgctgggattacaggcgtgagccaccacaccggcctgtcttttctttataaattacccagcctcgggtatttatttgtggcaatgcaaaaacagcctaacacatgcatgttgggttctagatgtagctggaaccagttacccctttcttcctgcctctctctcccttttggaatgaaaatatctctcctatgcctgccccaccattgtcttttgggagtagatagcctgttttgatttcacaggttcacagctggaaaggagtctgcctcaggccagctatgcctgccttggagtcttagctttatctgatttagatgggactctggatttgaacttttcagttggtgctggaagagttaagcctttggggactattgggatggaatgaatgtatttcacatgtgagaaaggcatgaatttggggggctaagacagaatgctatggtttgaatgtgtcccctaaagtccatgtgttggaaacttaatccccaatgaaacagtgttgaaagatgggagggacttttaagaggtgaggaggtatgatggctttgccctcatgaatggattaatgctgtgatctctagagtgggttagttatcttgagagtgggttcctgaaaaaacaatgagtttgaaccccttcctctctctccacccccacctctctctcttttctttccctatcttctcattcttttgcccctccacctctgccatgggaagacacagcaagaaaaccctcgccagatgcgagcatcttgatatcagacttcccagcctctagaattctgaaaaataaatttcttttctttatcagttacccagtctatggtattctgttatagcaacacaaatggactaagacaactaattttcagttttcaaatgcgcatcccatcaagtccttaagttttatacagtccacatttaatttctgctgcaacaagactgtctgatgagtagcaaaaactgaaggacagtgttcaatgttaaggccatgcagactaatatagataacctgaacagaaaaagagatattttacacagtgatgagatggtttcatttttgcacacatgagcaaatgcaacacattctctgtgacaactttggtttgaaagttctatcctgcaccagtcctagaacaatttccactggtccaggatgtcaatgctcagacacagtactgcatggaatcaggtgcaggattgagaacagggcatgctttagaaaaagcaaaagctatttccaggactatctgctatgctggttcagctttgccaagcaatattcaaatactcatggagcagcacatactatgagcaaagtacttagtattgtagaaatgcaaaagaagaagaagaggaagaaaagcttaaactgtttataatccccaaagaagtttacaatctgcttagaaaaattattttactatgcaaacagctgagcctggctgaagcatctgtttgggagaggaatggagagaagactgggaagtccacagttagattgtgtggggcaggacagagcacccaagatttaccgcatagggcacatctgggcagtgtgaggatgtctaacaaaaaagcctagagatgctcggcgcggtggctcacgcctgtaatcccagcactttgggaggctgaggcaggtggatcacctgaggtcaggagctccagaccagcctggccaacatggtgaaacccagctctactaaaaatacaaaacctagccaggcatggtggtgcgggcctgtaatcccagcgactcgggaagctgaggcaggagaatcacttgaacccgggaggcagaggttgcaatgagctgagatcacaccaccacactccagcctgggcaacagagccagacttagtcaaaataaataaataaataaataaataaataaataaataaataaatttaaaaagcctagagatttctgtgtctctccactctccaagttcaaggccatttcaggggcctccccaaagtttttaaaacttgacttgggcaaattctttaagaaccttgttctcctcaaataaaatattttggaaagcggatttttatgaagtcttggctcaaattccatgacctttaacagacatcttaattgtttcgtgggagaatatgacccaacaagtggcatatggtttaggtggggacgtttaattaccgaacagttttgtagaataagcaagtcacacatcttttgtccgatgcgtgacaggtttgaacctgtaaagccaggtgcctaaatagcttccaacgtttccaccccaccagcccttgcaccactccctgtactggccctgagctttctagtcttgactgaaaagcggggaggcaatgtggtctctcctggtgcactgtcccgaggaaggcctgctccgcttccccggaggagtcttcaaaggatggaggtaattaataaaaacaacccctgtacctcctctaagtggtcattaattaataaagaacctccaggctcctataggagaggtctgtgcaccccgcgggctatgagaaggctggatcacccagaaagactgaggatgtgtcctggcaaaaacacagcctgcccctcacactgctccccacgggtgcactagggaggaagagttccctcgagggcctgagcaggcgccccacacctgcacccgtgcagagggggctgggcccgccctctgcgctcccgagggagagccctaccccctgcatccccggtaccccgttccctccaagggccggaaagagggccccgcgcactgtgcacttcttaggggtcccccaccctgcgcccccgccacgggaaaaaggtccccgctctgcgcatccggccccggagggacagccccggtcctgcactccttgctcctcagggggacggtccgcgcccagcggctagtgcgccccgggtaggtgggggcggggggctcgtcgagtgacagcgctcgcctcccgcagcccgcccgagccgcgtcagggcagaggcggggtggggcgcggttaaaaggcgcagcaggtgggagccggggccttcacccgaaacccgacgagagcccgacagccggcggcgcccgagcccgacctgcctgcccagccggagcgaagggcgccgccccgcgcagagcccgcgccagggccgccggccgcagagcaggtaagcgggcgcggaccggctgggtcttgcggggggcgagcgggcggtgccacctcggccccccagcggaggaatttcctccaagaaaacaaaacaggtgaggtcggcggctggtccccacctcgcccctgtcgctcctgtctggcaccggatcagagccggcagagcgcggccgggatgggtgtctggccgcacgtggggcgaccgggcccccgatctgcctctatccgcaccctcctgtccacgcgccccggccccggcccgatggcagtgggcgccgcccgcgctggaccctctctctgtacgcagaggaacgaggatggactggtttgacttttaccccagcgtggtcccctttgacttgtacaacaggttttatgaaggtttcatatcgtgtgtctaagaggccagagtgagggccggtgcccctttcccccgtttcatttgctgcgtgttggattttctaagcttttgtgggtcaccggggtgtccccttggatttggggagaagaaagccaggtctaggatgcgggtttcagttcagacaaaccctcaacttgggccgatgcataagtccccggagaaccgcagggtatgggctgcgtgatgggcttccgagaaacttgtgaaatgctgatgacaatagcgtggacgacagtaattaaaagtaattggcgacacatcttagttaaaacgtgcaggcaccagaaggcacttcctgtcggtgaagaagacctgtctccggtgtcacgggcatcctgtgttttgcaaacggggctgacctcccttcctggggagcaggaagggtcagggtgagtgtggcctgcccgcagctctgcactcccggaggggttagggacctgcaaccaggcggggacactggcccagcgacctcagtgtcccctgggtgggcgtgcactctgtttagtgtctgattgaacgtaaccgtgccgggttgttcttttccctcaagtagactttatgccatacagctattttcttgccccagttctagcagaatc

SEQ ID NO: 6298 - DNA, 6000 bp, Homo sapiens
ttggaggtgggagaggatgtcccttcttctggtaggactatgtctggctacattgtctttccatttttttctgattgtccccttgcccccctcccttttctgggggcacagagggcatggcaattttgtttcctagctttccatattcctactgcagtgctttcttcagaatacttgttcagatcggattcttggctgtgagggcaaccagctgctttcctgtttctttaaaagtggatcccacactgccgtgtcctgcacagtgagttctgcattgtagaaaccatctagcagtggtgactcagggagtggcctctgctcggtatggggcctctgcaacatgaggttatggggcttctacgctgtggggtcaaaggagacatcatgatccctactggcagaaagagcagagccccagagtgggttccacttacggggtcagtgtcttttctgagatattcctcagaaccacatttaaattctttttcatattgtttgcataataattgccttctagtgcctactttataggactgagaggatttaaatgagataatccatgttatggatttaacacagcctctggcacaagtctaaatgttgcatgtaagtgttaactattatactggaaagaaggctcagttccttgatttaggtgtgggagaaaaatatatatatattttgagatagggtcacactctgtcacccaggctggagtgcagtggtgcagtcacagcttgtattagcctccacctcctgggatcaagcgatcctcccacctcagcctctgaggtacctggaaccataggtgtgtaccaccacacccggctaatttttattttttattttttggtagagaagggatctcattatgttgcccaggctggtctcaaactcctggcctcaagtgatccacctgcctcgcctccctaaagtgctaggtttatggtcgtgagccacttagcctagccctgagaaaaataatttttacaacaacttaatttcgctctctcattttaccaaggcattaaaatgttgtgctctttccttgggtgggtttctaaattagaaggggcagacatagtcccagggtgctggaggagggatgcgggcctctgaggcatctgctgacaggttcaccatcccatctggtcccaggtctgagggaaggaacaatagtctctgggctgttttggctctgactgcctggatggacttgaagccatctctctttggaatcctgatgtctccctgagcatggggtgcaggtttgcttaggactcagacccatgcaccttgcgctcagtgacttctaggactcctgggaaacagagctctcagcccctttcttagtgtttgctgtgtgtgggtatgtgtatgtttatgtgtatgtgtatgtgtatgtgtatatgtatgtgtgtgtgtttggtggggggcaggacgggagtgactgccctggctacagtcatcccaaacatgttgttcaaattactccgaagcccttgggttttagaaaaagcaaagctgaaaagctgaaactctgggccgtgtttcccacctcactcatcccgtgcttgggtctgtaggataggatgtctccatacagcacaggggtggtgggcgacacccacctgggggcagcagtgagaaggcaggggctcatcctccccacaaagtggctggagttgatctgttatggacgtgttcgaagtgtccttctctgcatcttgtctgcttactgagtgccattagccaaagtctgttaggccaagtaggaaggaagggaggggccctggggctaggtaagatcaatcattgcaagcacttatttagtgctcaccatgtactctgcgctttatctatgtttcatttgaatcttcctaaccacccagtgggatcggcccttctggtgtgactgatggggagaggggaaggcaggtggcccacgggcacacaggtaggcagtcagtggcagagtgaagattggaacccagatgtctgcctgtacctggactccagcctgtctcgggataggcctggcctggcctgccctgtgtacactgagtgggaggcagacagatctgaagcccatctgcctgcgtccctctgtttctggctgagtccaggtggtgctggcaccggtcacccgccccaacgctggagggcaccctgcctcccctctctttgccctgatttccctctgctgtctctgaaagtgggtcttccccctcccaagtccaggcacctggcacagctggagccctggggtccttggggcagctgcgctgggacgtggccagtgtcaggagccggtgtgtgtgacggaggctgggctgcattctttctgggtcagtagtttggcatttacatcaccagcctttggctggatgcaatgcctcctgcccagaccacaatggagccttgtttgatttatcaccatccagccacgcccacactccacctccatctccacctggggagacccctttgcagggggtcttgtggaaatcagagactgttcgtaggggaaagtcagcttccttttctgtgttccatccttcttaaggccagtggccgctgtcatcctgcccttggcttggctttgctgatttctacaatatcttgcggaggtgccccctttccttagaggatgcatctttaacactctcagagaggctggggcaggagctgtccacaccagggcctgcagcaagggcccgtcttccccaaagtgacttgggagagtcttcctggcccgcagcttttccacagtgtcagggacacctcctgccctcccttgggatgaggcctggtctaggagctgggggcgttagggtgcagtttctgggacccagtgaaggcccctgggaaagactggcagttagagttaggagaactcttccctcatcccttttgcccttctccttttccccttttctttttcagcagtttttggataacatttcaaacttaaagaaaagttgcagaggccaggcatggtggctcacgcctgtaatcccagcactttgggaggctgaggcaaacagatcacttgaggccaggagtttgagaccagccctggccaacatggtgaaactcatgtctacgaaaaatacaaaagttagcctggtgttggtggcgcatgcctatagttgcagctactcgggaggctgagacacaggaatcacttgaacccgggaggcggaggttgcagggagccgagatcacaccactgcactccagcctgggtaacagagtgagatactgtctcaaaaaaaaaaaaagaaagaaaagaaaagaaaatttgcaggagtgcaaggaactcctgggtaccgtctctcagatgcacaggtgggttatgttttgcctccttctattctctctccaccccacacaaactcacatgcacacagacacatacatttttttctgaaccatttgagagtcagctgaagacgtcatgccattttatttgccctctatacttcagtgtatatttcctaagaacaaggctcttctctcacataaccatggtacaatagcaaagtcaggaaatttaacattaatacaaccctgcgatctaggccacagtccatatttgacttgcagtcgtccacataatgtcctttatagctaagtatttttggggaaggagttttgcagtgtgggggttctttcaaaagaggtgtgattttctacctcataagcctttttaagaaaaagtgtttctaaaagttagaatgtttgttgtggaaaatttggaaactacagaaaattaaaagaaggagaaaataaaacccattcataattccagctcagaggctgagtgatcgaccagaaaggtggtggaaagactttctcagctccttcagctctggtgacctggccacacagactcgtgatccctccaccacccacacactagtcaggagccccgcagccaagtcctggggctgtgggaggagccggcccctgtctggagctgacggtctttcatgctcctgcccaccccttgggcaggtgcccaccgagcaggcagacttaaccagccttggtggtgcctttgtggtgcatatcctccaggtggggaagggtggagatcgttaataaatatccagaacttgtttgagacttgaaaagaaatgttgcaggcccactcttgtctggtctataccccttgcttcctggacttggcagaggttaaggatggggcctggagcgtgattgagggaaacagcactggccccatatcagtgagctcttgggtgcttcatgtggttgttagacttgccttttaatgagcctcttggcccctaccagtgggctacggaagaaataaaatgtgaaattttaccatgtgaagtttgctgtttgccaatgactgtgcttctcaaaagttcctagggaaaggttttaaaactggtgcaggtagtgaagtttggatctcgcttccctgctttgtccgcttaggtggtccattcgccataacagctggaactgagagtggctctcccctttcctggcccagaacgggtctttgctaagcgagtctggtttctggaaggattttgttcttagaagctactacgtcattgtcctcagctccccatcatttgtacctcagtttccctgagctgtaagtctatgttatgtgtgaaaatgggcctctgaaggtcatgatcaaaagccttgagtatttttccatgtgtttgttttttctactccggccccagaccctctccttgaaggagctggccttgagagtgacttcggtgggcagccgcccagactccacacaccctgctgagtccacgtaacgcccaacctggacgggccagagctgaagggctactcttcaaagaaaccctttgaagtgcaaacatttcctttcctgaaaagaagggaaattgaaatgaaaacgtattgttctgtgcagacaatgttctcttcgatcaaagagggagtggggcttataaagggagatgcacaaattagagcttgatgtggccagtggtgtggatgtgaatattcatccctgtggaggaaaatagtggggtctctgagatttgtaagattgtattttccttttttttcttctttttccttaaggctctgaatctaggtctaacgttctatttaatgatgtctctcctttgtgtttttatcttgtggtaagcatttgggagtgtctttcagtaaatcatgataccatttccatgttagaatactatgtagccagtaagaatggcgttttcaaagaacatttgattttgtgggagaaactttaatgttaaaagtgaaaccatctgggtgcaatttcccatgttccgtgttagcttaatgagatatatgtatttgcacagaaagaaaagactggaaaaattggactttgtttttctcactgcagtgtttgtggcacctaaaatagtgctcaagaaatatttattgaatgactattcttataattagtaaaactgtatttaaaggaggaatgtctttgagctaatgttttggcaggtggatgggacaatatattattttaagtttctgttgtaattttgccctagcagctcagttctggtagattttgttctttggcacacatacataccccattttgcactttggtacaaattatactgtgaatgggtgactttgacatttatatttttggaagaatccagttctactgaaatcagagtatcagatgttgtctttttcctaatgttcccagatggggtagaattacagcttcttcttacttactctgtaactaaggaacctttgggccagtttgtcctgtcctgtggttgagaatttttgcctggtttgcccagggtttctcatccttgagcatccaaggctaccaagatacactgttcatatgtcgtcctggtttctaatggatagttatctaaaaatgcagcttcccattcttacctgcactgtaggttagcttggaagatgtccatccctggtctcagtggtcttgttcaggga

SEQ ID NO: 6299 - DNA, 6000 bp, Homo sapiens
cagtgattttccttttctttaggacaagtccacattccttaataaggccctcaggatgtggggtgctgtcccctgcccactcttgcagctgcctctctccactctgtctgcctgtgccccagccactctgcccacctcttcttccttgaacaagctgcttcccactcaaagtcttcactcagctatttcttctccttggaataatgcccttcccccttgttgcctggcaaatttcaggtctctgcttaaatgttacttcctcggggaagaaacactctccttgaagttatttgtgttcttttccttcacggtacttaaataattgtttgtgtaagtatgggtttaatccaatctccctacaagctaccaatgcctgggcacaggatatttgtaactctatctcatgattgtattacttctacctagcatggtgcctggcacattggagacactcaaaaattacttattagatgaatggatgaatgaatgaaaaattatgtggtctgtaaaactcatgacctcaaaatggcattgaagtcaaggatataatccttcatataaaaatgtgaattttcctatcactggatctctagataattattttctggagagaacatgttaacctctaattacttgagtacgttgagagagtcattggccatcagccatcaacctggagagagaccgtgggcagtaaggtgatggagcctgctgtgaccatgttctgttgaaagcttttatcaacaactgagatgatgatgttggtgcagtgttaatcagactgataggatgctggagggatcattcaagtataatgcgccctcattaggatccaaaaggatctcactcaacaggtttcaatgggggagcaaataacaatacgcaaggttaataaaggaaaattccaagtgggcactggacttaggtcccccaaatctaattaaacaaatgcagaatgagtggtcttaagagcaaaacatgtgaaaagcatggagatttttattgactggatgagtcaatagcatggcatgcctgtcagagacattgattagacgttagcttcctataatggaagcaccgtgtcaacagccaatgaagtcatggagcttccctagtcagaccacccctgctgtgccatgcccagttccgggaggcagatgtggagggagacactgacagttgcactgctgtgagcatttccaaagatgtcaaatgagaagcagttgaagggctgaggattcctagttaatgaggagtcaaatttgggagaaagtaatgagactgtcaagcaaaagccaggaccatttgatttgttctccacaggtctaaagggtagacccagggtacacaggaaaattccagggaagtggatcttagttgaatttgaggagctgtccagcaggggagtgggctgtgcagagttcccctttactaaagcaaattacatttaggcaggaaacgaagaaaagagctttcagaagctctctgctagtttatagaggttctatgagagtagtaggagcctttcttcctctgtgtaggtccagaatctcatgtagtttggacctcagcatgtttggagggccaaaccaaaggtaaacagccagttaaaacaattatttttaaagatctcatttactgtgtctagaattccatgatctatcctaacactcaaagggataatcttattcctcttcacttttgccacagacgcaacagaatggaggctggaagacaacttgttgtggagggaattcatgcactgggtaaaaattgataggcttctgccaaggtctgacatcaccgagtttctgtgattctagtagaagccagaagtatgttctctgtaattagagggaattagacaaactatcaggaaatgccatacagagccttcagaagaaaagaaatacaaaggaaaatcagactgacgattatgttctgtaaagctgcttctcacaattgtggcagccactacatatacacagtctcccaacccaggagcactatatgcccatagccacagaggagagattatgaatgagccagagcaaattcttcctcctagagggaaaaacaggaagtgtatctcttcctgctcatattctcattctacagttctactcgcatctacatgattaagcatattgtttatgaagaagccaatgaaaagaacctgaaaaaagatacatggtgaattataaagtattattccgaagaataatggttctctgtctctttcctggtttgcactaaaaccttacattcaggaagacaagcacacttagataagattatccatcctcttcgttgccagaggttaaagtgcaaatgtcctcatgagaagtttagtccaaagacacatttgaggggatccatcactaaaagaagcagtgttcatgatagcaaggagttaactctctgttatgaagtaataagctctttgattaaaagactgcattttccaaaaaagattacactttgcactagaatttggtattgctttataagcatatggccttagcaattgaaaaactgacttgaattttaaaacataccgattttaaatattgaagttgggcttgacatttttaagctacatgactgtgggcaaatgatgtaacctctctatgtctaaattccttcatctgtaagatgaggataataatgccaatgcctaccttgcatggttcttatgagaatgaagtaagaaaatgtatgaaagcccccagcatggcaaaaagcaagcactaaattaatgggagccactgagagagttgaggcctagtcattttcaacctgtaggatatagagctgtgtctgcttggggcggtagttggggtacagcttaaatagcatttgcttttgggagctagaatgagatctccaatactttcagatgatcctgggggaaaggatgtattagttccattcacttctttgatcaatatcttagtaatataaaggaagtagcattcgtttttgaaaattacttgaattaggagttttctagttagatttcatttcaataaggaattattgttgaatataaattagatttgccaaatgcttaagctgccctggaatgaactttagtaccagcctgctgtcctggactaaatgatatgaccatactgtagggccaatgtatactatttaatgtcttcatctacttaattatcagttgccccctggtttccttaaagagctaatgatgcccaactatttctagtgagagcactttgctactgagagagtcaaacaccaaggtgattctctgaacacattatctgtgtgtgctaggtacaacagctaggaagaggtaagatgatggtgagttacttaaagctcttaagaaatgaccctagtagaatatccataggggttaagagatgaaatttatttcttggcttagcattttggaagaaatcacttggcatttgtcattggcaagataaaaagaagctctgatttctgttctccagaagatgtacttggcttcttcctttctcttaatttacccctatggctctcattttgcctcagaatgtgaaagaataggcttactactttgcatttagttaatttggtgagttcactgtactctcatctctgggctattaaatagttcaaaaataaatatcgcatcacttgtggaatatgtagcatggatctcatttgagctgtgttttaaaacaaatggtaattatttaacatttacatcatacttggaaagtatttcagaatagaactttttaataataagtagtcaaacacataactgggatcaatgggcaagagaaaaataaaattttaatgttccattgaaaggtgtaggctcaggaagagagaaaaatacttatgtgtattttgtatactcatgtgtatttgggacaaacacaggttgtggacgacaggattgaaagtcagattaactggatcaaaattcaggctgcgtactgagccagtctaagatttcaccgaaatctgggagctgctcccactccctggacttttgtgcaaagactggaggaagctgtgaacagcctgggctaggagaacattccccctctgggaggagaggctcgcatgagctcatggggctttccaccgcagacccagccttggcagccacaaagtgtccagcagtgaaacctggcccttcagttctcaagggccctttggaacatatttgactctaagcagaggtcactattccaagagtgactcatgtcttggggttaagtggagatgatgggtgggatccatgaacagatccagctcttcccaatgtggggggcaccagagtgcatagcttgggagggttggtcatccgaagaggcactgcgtgggtgcatcccgggcaaaaaggatgagaaggtgatccactggcttccataccctgggaaaggtgtcagaccgtgaggtcacatcaaaaggtatgagtgtgggtacctccttccctcccccgacggtgggggcctcatctctcggccatatcacctctgtgccttgcacacttcctggctcagactcagccctgtccacgttctcttccaccatctgatctgcccccatctcccaaagactacttgtggggactagggaggtttaggggtgtagtcaagccagatgcaccgaggttgctgcggtgggaagagggcgctgggagggaggaggacctggggcgcagccgtggtgggtgcgccctgccaagaagggcgggggcgacggggcgcgcacgcggaggaggaggaggaggagggagacgggagggcgtgtgagcgagtgagacaagaaaagggagcgcgcccgccgccgccgccgccgccgccctcctctggagagagaggctggagtgaggctgtgcgaagcgccgcatttcaatgaggacgggccgaggcacatccctgcactagtggccgcaaccgaggcgccgcgctccagcagctgctgccgcccagcccggccccgccgccgccccccagccctgcagccccgcagccccggccgcgcccagcccggcgaggacagcaccaggaggcggcccccagcgcggccacaaagacccccggcggcgtctctccgcggaccggtgcgtggtttgccttccctggggacgggagctgcggggagggcggccgggggactccgcagagcccgctccgcccgcagccgcggggcgccgagggcagggcgggcgctcagcttggccccgccgccccgcccgcagttcctcgaaaggcggccgccctgccctggccagcctggcccgacccgggggcgttgcgtgcgggcggccccggggctgctggcacctgcctcttttgtttggtgccatggggctttaaacctggagtcaggcgagcgggccctcccaggcttttcgcgttgttagtggagatggagagccagggcggaggagctgggagaggtgcttgtcattgtcagaactggctgcggagcgggaaccaaggaaggagtggccgggcccggcctcttattgtgtgtgtgcttttccgtgtgcccgggccagtgatgtgtgcttgtggatggggtcgattcgtgcgtggtggtggctgcagcgtgggtgttgcaagtacgtttgcagggtctcaagttccttcagggacagcgaggctgcctcatgttcaaattagtacctgcagtgctaaaagcttgcggagaggaaatggcattttttcctcctagtgggagcgcacgcacagccccgcaatgccccacaaaagaggctgcttttgaaaaccaggtttgcgcggaattgctcctggatttggcaaggagatgcttggtcggtgagagagaagatgaaaggtttcattcaaaccggctccctctctgctgcacctgtgagtgtgtccaggcacggtgcacacacgttcagcgaccacactgcaggctgttccgtgaatacattttatgactgttcctaaatatattgcctttcagtgggaaaggaaagtaggacagcgttttaag

SEQ ID NO: 6300 - DNA, 6000 bp, Homo sapiens
tactgccaactatttcttgaatgaatgaaggcaggaactatgctcatcttcatggttatactcagcacctataatagtgcttgacacagcagtcaattatcaactgttaaattaatgaatattgttcaactcggtgccactgtgagaaaattaaaaagatagatgacagtcattagctaatttcaagtagtttttttttttagatacaagccagtgccataatagaaggcagttcatgatattgttttctaaatatacattggtccgatggtctggcttgttccaaacctaagtatcagagcaccaaaaggaagtgatagataaaatgtcagtcagtaaaccctctgttaatatttttttcctcattctcaggccattagtaatgtttgagcagcagaaatcttagagacatattcttaaatatcatagagtaaaagaattctatgctgccaattcataacaaaatcaggcataatcaattgagtgaaggttaaggttggcactgtcttgcaaaattaagcagcttaaaaaggacaaacgtaacaaagaaaagggacctattctatgttcctttgaacaagaaaaaaaataaatgttgaaaccccaaatgtccaggccatttcagtttctcagactacaatccattaaataatcatttaatcacagtgacatggatgaacacacagatacactgttgagtgaaagaagcgtgacatagaagactgcagaagatgctacagtctttgcctccactaggaaggagggccacatgtgtccatttaagttaaagtcaaaaaaggataggagagtactttcaaaaatgatgaaaatggtggatatcttaatttgggtgatggttacatgggtgtacatatttgtcaaactcagtgaattgtatacttaagagcattatgttttaataaatttaaaatataactcaatttagacaaaattaaagtgtctttcaatgagtgttctggatgaagaggaatgaaataaatataaacaaatttccttactgcaggatctcttacagcttttaatatgcaattatgcactgtatatttctaagaggagactataagatacagtaatgttccagacttaattggtcaaggaacctttttttctcatatacattgacatatgtaagacactacagtttcagaaacccaataactttagcctggaaaaaaattcaaacaaaggctacaaataccactgaagtcattgagaaaatattaacatctaattttaagcaatcactttctagtgaatcttccaaaatgaactagttataaaatgtattcctatatatggtccaattaagaactagagaaattctgcccaagataataaatatagttctggtattgttaaccttaaattccttctggcagtaattagatagcaaagccagatgtatattgaagaattctaagcttatggcaaggaagcatcattcatcatcacatagacaacacttatctgttttgtgtaagacatccaactcacccagagatgttattcaaggcattaatacacagctaaagatgataggtcataggttgagctccccaggaagctgactctgtgactgatgtgtgtgcaagagatttgtgtggggcgagctctcagatcaacaccggcaggggagcaagagaagccagactggacaaggggagatatttaacttggatttgacacaacaaaggcctcagtgaatcccatagaagcactggaaccaaagttcttcagccatcaggcaagagggccagccctttatatcctcacaatggaccagtctttgcatgctggctgccacagagaaggggcatgaccactggcaagctggcttccttggctgaggggagtgttcacagaaagagtggagagccagccaccaatccttccagcagcagggagcccgagtctcagccctgaagcagaagctgggcgaggcatcacggtgcgcactacagcagccaacacacactcgtctcaccaaactcacaggggcatctgcccagcaagaaactattcctacctaatctaaccctcatgctattaacctagaagctctgtttaagaatcaggagcctagattatgcccctactgctttgtccataacaagtattcataaaattgcaataaaaactagaaataatcttagatggtagccaaaaaaatatttcccagtgtaaaccacataataagaaacactgattagttttggcatgactagaagcctagctgttcttcatgagaaataatggactgagatcatcagaattctctaagagctataacaagaacatctataaaatttaacctcagaaaacttttgaataacttcctgacactggagtattttttatattacatttccctctgctatctttaataaaattaaattggtatcccaataaacaaagtaacaagaaaaaatgagaggttctaagtttctccctggttctcctttttaataatcaattcatcttaatttatgctaataacaattcagtcagaacacatctgttgaggaccttccattatgagataccatgcttagataccacatgtgaggtttatgaattgcatctgggtggataatataatagtataagatagatgtaatatagattacatctatattaagggtatggaaatgaagttcaacatctaatagagaagacagacatttacacagatgtcatgcattcattcaacaaacatacttaagcactatgcgcccagctgttaacaagatagacacagttcctgcctttatgaggcttacatgagacatgatgtgttaaaaatagaaggctgcagaaggtgctatagtctttgcctccactgggaaggagggctacagaaagcttaggaacagtaaacttagtaagaataatagcaactaacctttattgagtgcttaaaatgtgccaggcaaatatgtaaatttatttggctttcacgtcaatcctgaggtctttttattattaatgttccctacttgcggatgaggagactaaaacacagagattaggtagcttaatcacgcttacagatgtggtgagtggtaggcctgggatccagagctgctctggaactaagcacgaatttgccagatggacacacacaaaaaaggaatggtaagagcactccgggcacagggaagtacaagtacagagacataaaaatggtcagaaacatgtaagttcagtctgcatacaggctgactgggagagtaaccagagtccaggcctgcaaagtggggcaagcagggtacaggtagatgaagaaaagtgttatgtgccccacaaggaagggactgcaggagtgtaggcatgggagtgatgccaattgtgtcattaatatcagtaagaatatcaataggaatgaaagtggctgacattacttgagaacctcctataagccagacatgggccaaatacttacacacattatctcagtttagcttcactacaatcttatgaggaaggtattatcccattttacaagtgagaagactgagctttaaagggagcaactagatgaggcgaggttctactgtttatgagtgatagagctaggatccaaaaccaaggaactctaaggtctgtgttctccgctgcctgctcgccagcgtgcatatttaacgtggaggggtaggagggtggcaggcatggcagtgaggggggcactaaggcacccacccaggaaataggtggctagatctcgaccacagggtgccagctgcaggctgcaggagaggacatgtgagaaacacgcatacagaggtagcaccggagacgaagtgggatctggcagcgagaatgaaggaagagtcgcggataacagcagctgtctgaagaggtggtgattccatcatgcaagccaatgggtaggaacaagcactgagagccgggcagggggatgcggagtgagggaagatgctgaggtcaaggtctcccaggctaccatggaaggagccaatgggcagctagagatttaggtctggaactgagagaaataatcagctatgaaggtacagacttggccacaaacatattgaaggcatgagagtggttgaatttgtccagggagaatgtgaagaacagaaggtgatagaactgtagcaaaacccaactattgaggaaaatattttcatgcctgcaaaaagagagagatcgaactgcctcctttagaaacctacttgggaaagggctttctttacaagtaaggcaagttgtcattactggtgggggaaaaaaattggtactgcgaaaccaacttatttcctaccacatgtgaggttttgaataatatctgggtggcatatttctgctgaagaaaataagccagttcaatggtgtatctattaaataaaaatagtgctaatagtttatcagagttatcaccacagacgtgcctagccaccctgagcctatgtggccaatgtcagtaattccactctggacacaaacactgttggctttggatggaagtgccggacactcacagcactccgaggacatactgttttctagccttatttatgttctctcttcacccttcagcctaaaaaattaccacagtgccacttacctaccttaatgggaatctgcacaaaaggccatttctccagtttctctcaaaagcaaaggaaaacttcccaatattaatatgtagcaaaaagagggagaagaaaaagcctgtttggtccgccctcctggctgttgctaccttgcagcttatgacatacacatagagggaggtctgatgaaatgaacgagacagtcagagagctactccattcccgtggaaaccaggagtcccttggtgcagacagctcttcctactttcccatgcagttcttttgtgcgactttgaggggctcgtgaatgatttctaaatgtgtgcctgctgaggcgagccgcacagggagggaggaacccagccgagccgtgccagaggaagccaacaggatcctagcagtgcgggagctggctcagctcttgcatgcagtttttgaagtcagcaaaacagaaaccaaattactatcatattatgctggtggaagatcaagaagaggggactctacaccagtttaattactgtgagagatgcagcgagtcacagaataacaaatgtatctcatgtgtggaccctgaagacaaatgtaagttctcatgccgctatattttattgctgtgtaattttctttccggtttgaaatcatgcttggccaacatgtaatcatttcaatgagaatttccagggaggaaagttgtctgctaatctttacttaagacttttttgttttccttttattagctaagcaacattataggagctgaaattcctgacagcagctgtggcaattcagcttaagaatggctgagaactgtaacccaaagtacatccaattactatgggattaacactggatgtatttttaattgactttcttaatgtagaatgtgtacatccccactgtttctgattgcatgctattttaataatactgttgctaaactagtaccatcggcataaccaacaaaatgagatatagttaaacaagagtcccagtagttataaaacttttcttctttgtccaggacatttatcttcccgagcgctcaaaaaaaaccctgcaacctctatgctaaaagttcattctgcttttttgtcctcggtttggtgagaaaataataaaaccaaacagtggactctcctaaaattgtgaatgaagaaaacttacagccaccacagttcagttctttaactatcattgtaataatggaagacaaaaatccagccccgggagaacagcatgtacaccagcctcagtgttacagagtgtgggtacatcaaggtgaatggtgagcagaaactataacctgttagtccttctacacctcatctgctacaagttctggcttagacatggatattctttgtgaagaaaatacttctttgagctcaactacgaa

SEQ ID NO: 6301 - DNA, 6000 bp, Homo sapiens
ttttcttgtgttgttttctgtgtttttttcctccagatatttggagactagtgtttgttaagaacaaagaaagagatgacaagtatcaaattcaaaaacaacctgttttaatcagtcaaaactagtctgaacaacagcaaaggatttcaggaattctctaatccaactgccctattatacaaatgaataaactaaaccctgggacaccaaatgacttgcccatagtcgcatcgttagtccacagcagagagagtggacctggtttcagatattctgaaagttaacctgatcttttatgtcaagatctccagtacctgttattaaaaagggttgaaaagaagggggaaagaaacaaattatcatgggaatcctgcaaattcaatgattttaacggatttcaattttatcaggcctcctcgaaggtattgttctatcaacttattcatctttagttttttctctctctagtctgtaaacatttttgttctttaactgtcatcatcccattcaactggatccctaatgcaattcttttcattgtcaaacaataaaaaaaaaaaatctactttcattgtttccactagcacatatctcatctattcatcagcatattgcagtctggtttctattagtctcaactcttcaaaagtagaactcagcaaaatcacatattgagagatagtaaatattatttttattggagcttttattatgtactactcatagtcacaggatattttgtgtatattacttaatttattcacctaaaataattcaagcatcatgttcagtttatcaaaggaaaaactgacgttgaaatattaagtagtatattcattattgttcacagtttgtataattatacagatcattgctgtgtatcattatttcttataaatttctttgtaaccttctttccttcacattacattttataaaatatttttttcataaattccccaagactcaatggattccttgttctaatataccaaatgtatttttactagctgctaaatctaatctttttttcaatgataatgtccaaagtcaaaagtagtcaaataaaaatcaattcaaaatcatcagctcttgtcctgttctggtagagaggggaatttaagagtgtgagctgcagtcggacataccggagtttgaacttcatctctagtacttatgagacgtgcagcaggaagcaaatatagctgttctctgctttattcacctcatttgtaaattaggaacataacattacttcaaaagattattgggaacttgacacgagataaagtatgaaaagagttcggtacagtttttaacatataagaactattaatttatactttactccctactgacatgtttacttcatttgtcttcttgtctagtttggttttaaaattctaactctctgattactctttctcagcctcttagccctttgtggctgattcttctttgttattataatccatattttgcctttgactttttctttcatccctctggccattttccttagatgattttactaagtccacggtttcacctgccacttctgtatgtatagaattatcacatctttaactataacctctctccagagtttctctaagcccttttacaattatttctcaaataagacatatgaaattctacaagtaatatattacttgtcacctttcccccattaaaaaatattctcccaattttcaaaaaaatagacaaaataggaaccataatcatccaaaaattttccagctccttaccaactatcatgcaaacataccaagaggaaacacactcctcacaacttggttttcttctctgttgttatcttgttcctattagttcagaatccaatattattctacagaacaggagagtagcttattacagactcaaaaaaagattagaaatctgtgatcaggaagaggtatatttcaatatgaaattaatattttagatctatttttagctattgtgatatattaattgttgacttataagtagaaaggctctctactgtagtacattgttttacaacaatattttactaattatttctctgaagaaatacagtagtagcagatactggaataatatcaagattgcagagctctaaatctcttaaaaaatgcttttttacaaaaagagtacaacattgtaattaaaatgtatttttgcaataaaaagctattgtatgtaattgtccaagtgtcatagtctcatagattccacaagaaaaaagtatttcttttttgagatgactaaatgatattgtaacctgtggaataacacagtgagaagcaaattaagctttctaaagtcacaactaaatttgtcataatagcgaattaataaatgcctttgttaacttatttttgcattgcttcaattctgttgttgcttattcagtaaaatttaaagcatgtgtaacatatgttcatatttaattataaaaacctcaaaatatcttaaattgaaaatttatcagaatggtaattcaataacagattaaaggtaatatgttattacatatttcaacattttgctgatagtgtaataattgttgaaatgagctaaaatttaatccaaatcaaaagacagacaccagtatctaagcacaaaacacaagaccttcaatatcttgatttatttacttcattgctgcatctactatttctagcaggtccatagaagtttgtgaacccacatatacctaaaatttctttggcaataaaatgtttttctttccagaaagcaccctttgaaatgagtttaacacaccagagagcacttctaacaactcccagaagaaattcaacatcttcttcaagactttatgatcttcatattatttgctattgagcagacaataacaagaagctattctgaaatctaatgtgtgctttaagttttgtttgtttgtttgtttttcctcactaggctgaaggtataaacagaaagctcaaaattctacatttatatctttttcagagcagatgtacgttttaatgtagacaacctgaaatccatctgctatttatttaagacactatacaaagagttctttaatgtttagagctactaaaatattaagtttgcttggcagtctgaggaaatagaatttttatcatctcagaatatgggtaaaatatccaaaatgctttgtcctttttttggctagtagccttataaggtaacagatgtagtatgacatttaaaaatctaaagagaatgagcaattaaaatgattcttttaaaaacagtactgtcagtgctgtttcttgtaaataccatgtctatatgtttgtgtaaatacatatataatatgatatatttgtaatacatatcatataatacatatgtatgcaatttataatatgtgtgtctatatttgcacacaaatatatatttactgagaacatgttcaatagctgcactcacttatagatgtgtattagataagggtaaaactgtttcttaagaagccatgtgtttattggattttagagcaatagatatttggaataaatgattctaaaatcagatcataagcttacaatttgaaacaagaaatggaggccataaaatgacatcagatgttttctaaatgaatattaatgataaaaaggtggtttgcaatgctggctctgcagccagtttatctggatttaaatctcagttccaccatttaccagctgttgggttttggatgagctacttaaactttcttctaaaattattctaattgttcagatctgattcggtttttcttgctgggtataagagaggtctacatgttttaatctcttacaggcagtaggaatgggagggatgtgataagttctggccagtgagctatgagtggaagcaatgtgtgcccagtttgggtaagccatttcatagctgctatgagtgctccatgtttactccttccttccacagtgacactgaaagctaagaattggacacgaggagtcacaagcaacggtcttccttaacttatgaagaaaagaggtttatatggcttattgttctgcaggctgtataaaaagcatggcaccagcatccaattcttgagggtttcaggttacttccactcccggtggaaggtgaaggggtgccagtacatacagagattacatggtgaaagagagctgcctgatccttgagtgaaaatatatggagaataacaatagacatgtaatatgagtaagaaataaaccttgattgtgttaagctgctgagagtttggaactaatttataactttgcctaacatactcacagtgtactatagtttgggtgtttgtcgcccaaattgcctgttgcaattgatccccatgttggaggtggagcctaacgggagatgtttaggtcccaagggaagattcctcatgaatgacttatcagggtaatgagtaagttcttgctcttgctcactagagctgattgtttcaaagaccttggcacctcttcgctttctcttgctgcttctctcgccatgtgatcgcggcacacactggctccccttcaccttccaccataggtggaagcagcctgaaaccctcactagaagcggatactggtgccatgcttcttgtacagcctgcagaaacatgggccaaataaacctcttttctttataaattacccagtcttgggtattcctttaaggtaataaaaataatataagttctgtgccttgatttttgcatctataaccagaataacagtacctagttatttggatggttgtcagcaaaattttattgaacttagggattaatacagctttgtaattcctataaataaaaatagtttgtatatcctttatttaattgatcttaaattctagaacatttcgcgtcataaagtccaaacaatatacactgagttcacactttctgcaatgcctaccatctcaagttaaaaaaagtctcaaattttgccttaatgtaaaatggctctaataagatatataatatttttgtcatataaaatattgcatattgacagcaatatcccagtggctgatttattgataatatctttgaccatttgaattttttttcctattatatataaggaaatacaaactaggtaacaggaagaaatgagaaaaggtagagagagacaatagtgaagactggtggacattggactacaaaagattactgcaggattcttctatgatgctgattacagctttatcttatcaagctttggcattgaagaccatgtgaattcatctccaaccctgggagtgaaataagaactttcttttttgcttctgaaattttaagctctatacggaaacactttttacttaatctgcatgacatcagagaaaggtattattttctgtactttgcagataatgaaaatataccatcataccataagccacaggaagaatagagagtcactggttacccaaaggcattgactccatggggaaaacaactctgaggtcttcatttccattcagttgttcatttattgctaactctcacgttgtaagctagagaaaaatatgaaaagagcagtttttcaaagcagacaaaaagaaaacattttctctggaggagcaaagaatttttacattattttcattttgctaaactttagggaacaatttgaccaaagaaagaagaaaaagtggattagcagatctcatggactgagagtctccagatggtaggaggtccattcagcagaaatacaaatgagaatacgatgtttctaatgtatttaatttggagaaaaacattttcacattttttcaataagcaaagttaatcacattacattttacctttggtaaaagaatattaattaaattgattatgctcacactagagaacaatataacatatcatagtcaaataacgtttatgtttatattcattattacaagcattaaaaagaaataaatagtgttggcagatattacttaagcaggcagagtctcctatatctggaaatttatcat

SEQ ID NO: 6302 - DNA, 6000 bp, Homo sapiens
ttctgcggtccccacctttcgctgtactccctctccgcccttctttccaatgtccctgccagcaaaagcctctatttgcagcaccgggcatgttgtccgtttaacgcgctccggggatctgctggctcgtgctcccaacccaggggtggctatacgtctcgcgcctctgttcctgggtagactcccccatctgtgcattttggccccttcacttagcaaagagatgtgcgaagtgtgcgcctggagacgagccgcctcggtgacccccatccgcccgcagcggtggccctggttccccggatccgcgcccgcgccctgcgggtctcccgcgccgcccttgcccgccggaccacccgggctcagagggtcgctcgctttcagcgcctgcgagcgccgcttccgcccgggcctggggagcgccagcgcgtccctcccacgccggaccctgcagagcatgctcagtgcacctcatggaacccggctctcctggggccaggatcagatttccgggttttcgctgctgccgagggggcgcggaggaggggaggctgggagacagtcagcgccttgttccgcgctccctccctcgcgccgggctgcggccgcccgcgccgcaagatgcaggccaatcagagcccgggggcggggcctgggcagtcacgccctccctctgggcttattgagagttatatcaagaaattcagttcagagagaggagagggagaaggagagaggggcagaggggaagggagagagggagagcacgcgagacggaaaggagcgcctcagagtctctgaagcacgcaagagataaccgattaggaatttttcgggcaactgtcacccggatagctgtcagagaatcatcatcaccgcaactctgacgtttcctacaagaagttagagacttaagcagtattggcatcggatggaaatggtatgcatgctgctgtggaaaatatccctgagctgaagaagtgcaactatgtgttgtgtgtgctaaatgcccagaagaacccagacccagtgggtaagagagacgaaatgtggagagaatgactaacgacaaatccgtgaatttgttctctggagttgctaatttgccagcccgaagcaacacattttacaaggaggaaacattttgctgcttctgatttctccccaaactggtgctaccagatgcatggctttctatgtgttggaacaaatcattcctaactgcagcatactgggaaaggggaaaggttgaggcaactaacgtaagtgtaaagtttcgcatgcacaattgtaaattctgtgtttagatgtgtcctcagtgtaggcgaaagatgcttgtaattgggtagacggttggggcagagctcacctactcggctgtatctgcatccctacctgcatcactctgccggaactaatcgcgggcatcagctactgtgcagcctaatgcagataagattagagcctgagaactgaccagtcctactcaagtaggtagctgcctggagccttgcacccatttaaactgcagttatctaagcagaagcctttttacctgcatgattgggttgcagtatttatgtgtggcaaatgttactaatattctaaccagagatcaggattaagaaattgcattttttttctcttttatgttcagtagaaaatattgtgatgttacatgggaatgttagctgcgtttcacttatatctcggcactctcttccacctctaggaaaatgaatcctatattattatacatttttaaaagttttaatgtgtttatgaatcctaatgaggataatttgtcaatatggagaaaggagagcaagctgtgggcaagaaatctgaagtcttgttgttgtgcttttaggcaatgaggatgtgtagaggccggtgactattgcttctgatgccgctgcagcggcatgtccggatgctcgtttcccagtaagattgtattagaaggcagttgaagaactgggaggaaagaaaaagatagcctttttagaaaagataggtgactcagtggggcagagaagaaaacacatttgacatgtgacaaagcaattagcaggaaccgtagctaaatacttagtgtttttcacttgcacctgaaaagactgagggaggtaggttagaggctaggaggagggtgagacagggggaggggaagaggagaacaagaatgcatgttttgaattaaacagtattctgaaaaacaacgtgcgtgaatataggtaaaaatagcagctgtccttaattcaaaagtagaaaattttattttctcccggcaaatgcaaccagcaggagatatttagtgtttttctccacagagtaaacttgcaaacagtggcagagcaaactgccatgtttactaatgttcaggggaaaatgtgtggtgatattttgtgacggtgtgtttttatttactgaagaataatattgtctatacaattgtgttgacagcggctgtctccaaataagtgatgagatataatgcatcctccagtccatgcacgcttcctcttgcaatttgtgcatcattcctcagtggaaacctttaaaccctaaaatccaggaaaagaaaataaatacattatcatggacctgagggatttttacctgttggctgctctgattgcctgtttaaggctggattccgcaatagctcaagaacttatttacactattagagaggaattgcctgaaaatgtgcccataggaaacataccaaaggatctgaacatttctcacatcaatgctgccacagggaccagcgccagccttgtctacagactggtttctaaagctggggatgcccctttggtgaaagtttccagcagcactggggaaattttcacaacctccaacagaatagacagagaaaaactctgtgctggcgcctcatatgctgaggagaatgagtgtttctttgaacttgaggtggtgatcctccccaatgatttcttcaggctgatcaaaataaaaataattgtcaaggataccaatgataatgcccccatgtttccatctcctgtcatcaatatttccattccagaaaacactttgatcaacagccgctttccaattccatcagcaacagatcctgacacaggcttcaatggtgtacagcattatgaattgttaaatgggcagagtgtttttggactggatatcgtggaaactccagagggagagaagtggccacaactgattgttcagcaaaacttggatagagaacagaaagatacctatgtgatgaaaatcaaagtagaggatggaggcactccacagaaatccagtacggccatactgcaggtcacagtaagtgatgtaaatgacaacaggccagtgtttaaagagggtcaagtggaggtgcatattccagagaatgctcccgtaggtacctctgtaattcagctccatgccactgatgcagatataggcagtaatgctgaaatccggtacatttttggtgcccaggtcgcccctgcaaccaaaagactctttgctttaaataatactactgggctgattacagttcagaggtccttagatagagaggagacagccattcacaaagtgacagtgctggctagtgacggcagctccactcctgctcgagcaacggttaccatcaatgtcaccgatgtaaatgataaccctcctaatatagacctcaggtacattataagtcccatcaatggcaccgtgtatttatctgagaaagatcctgtcaatacaaagattgccctaattacagtttcagataaggacacagatgtgaatggcaaagtgatctgttttattgaaagagaggtcccatttcatttgaaggcggtatatgacaaccaatatttgttagagacctcttctttgttggactatgagggcaccaaagaattcagctttaaaattgttgcctctgattctgggaagcccagtttaaatcagactgccctggtaagggttaagcttgaggatgaaaatgacaacccaccaattttcaaccagcctgtaattgagctgtcagtttctgaaaacaaccgacgtgggttatacttaacaactattagtgccacagatgaagacagtgggaaaaatgcagacattgtttatcagcttggaccgaatgcctccttctttgatctggaccgaaaaacaggagttttgacagcctccagagtatttgacagagaagaacaagaacgattcatttttacagtaactgccagggacaatgggacccctcccctccaaagccaagcggctgtgattgttactgttctggatgagaatgacaatagccccaagtttactcataatcattttcaattttttgtgtctgagaatctgccaaagtatagtactgtgggggtaatcacagtgacagatgcagatgctggagagaataaagctgtgactctttccattctaaatgacaatgataattttgtgttggatccctattctggagtcataaagtcaaatgtctcatttgatagagagcagcagagttcctacacttttgatgtcaaagccactgatggaggacaaccacctcgttcctctactgcaaaagtaactatcaacgtcatggatgtcaatgacaacagcccagttgtcatttctccaccgtctaatacttcctttaagttggtgcccctctcagccattcctggctccgtggtagcagaagtttttgcagtggatgttgacactggaatgaacgctgaactaaagtatactatagtgagtggaaacaataaaggcttattccggattgatccagtaacaggtaacattactctggaagaaaaaccagcacctactgatgtgggattgcatcgtttggtggtcaacataagtgacctggggtaccctaagtctttgcacacgcttgtgcttgtattcctttatgttaacgacactgctggaaatgcctcctatatctatgacttgatccgcaggactatggagaccccgttggacaggaacataggggatagtagccaaccctatcaaaatgaggactatctaaccatcatgattgccatcatcgccggtgccatggtggtcattgttgtgatcttcgtcaccgttctggtgcgctgtcgccatgcatcaaggttcaaagcagctcagaggagcaagcaaggtgccgaatggatgtccccaaaccaggagaacaagcaaaacaagaaaaagaaaagaaagaaaaggaagtctcccaaaagctctcttttgaactttgttactatcgaagagtccaaacccgatgatgcagttcatgaacctatcaatgggacaataagcctgccggctgaactggaggagcaaagtataggaagatttgactggggcccggcacctccaacaacattcaagcctaacagtcctgacctggccaagcactacaaatctgcttctccacagcctgcttttcatctcaaaccagacactccagtttccgtgaaaaagcaccacgtgattcaggaactccctttggacaacacctttgttgggggttgtgacaccctttctaaacgctcttccactagttcagatcacttcagtgcctcagagtgcagttcccaaggaggcttcaagacaaagggccccttacacaccagacaggtaaacgagcacttttactggtctataagtactgcatacaagtgcccagtcaaccagtattaacgtgccagtatgtctattgttttggtctaactttagcttagttagaaagaggtaaaaaaaaacttgaccccttttctattcctctggggctcagtcaagaatttttagaacagctttgaaatttctgagttctgagaatattttctcctttcagtttccttcaaatggcaaaagatgaaaagagaaaattattccaaaatgtcccaagataatgtttgctgaagaagaaaaaacctgtcctgatatgccaaattctgctcctgggggtttccaaattgactgcttcaagactttcaccttacc

SEQ ID NO: 6303 - DNA, 6000 bp, Homo sapiens
ctgtgctgcattaagaagtggaatcaaggaaaggtcttgctgggcagacctgaagaaggtgagaagggagggacctgaacaaggtgaggaacacgggagggaggagaaatgagacttttacaaggatgtgcaaaggccctgagaaaacaagaaaggggctatgtggctaaagccagccagctcctgggggcagggcaggagatgtgtcagagaggtgctggtgggataactccaaacatgtagagtcttgtaagccactgagaggactttggattttgctctttctgagataggaagccactggcaggctctgagcagagtgacataccagccttggattataagcagggtccctgtttttgttctggtgatacaagactgtaggagcagaagtagaagcagttaggagaccagtgcaataatccaggcaagagatgatggtggcttggtccagggtgatgatagggagatggtgaaatacgttaatagtctagaaagatttttaacacagagctggcaggatttgctgatgcaatgagcaatggtaattatacaaaaatatgtgcagaactgatacaaagaaggcttttcttggatttgtagaaaagaggctggttttgtcaggtctctgacactaatataacgcctagtagcacaaccacctcgaaatcctgcactgggacttggaagttttgtgttatctattatttatcccaaagaacagaacaacaacaaaaaaagaatgttgaaatacattcagtatcaaaatctgtacttgcaattaagataactggtttgggggttgatctcatttcagcacactgacatgagcgcggtaattgttgagcagatataaacatttcaaaataaaaatgacatttatctgtgaggagactgtgaagctcactgggtagttacacagaaggataaattttatcaagaacaaagatcttgcctgatttatcctgatgtgtggtctatacttcaaactgatgtgataactgcgcagacccctgaccctttgcttattgggctacactgaaagcgctttggagattattcgcctttgcattcctcactccctggtgccctgcaaataatagcaggtacacaagaaacattcagtgacccaatcatttcttgacaccctcctctgcactcttctctttttgcagcattcaggagctcttacttattttcatacccaaatcagtgatcagataatcactcataaatatgacatttcagaacgtgctgggagcagcgcagacagtgtgtagggagccatccagaggccccacccacctgggaagccagggaaagcttccagggggagggggcggttctgtgggctgcagtccgagggggaaaagcaaacgtgtaggcagcaggagttgagagatgggatccagacaagggccttcagatatataaatatccctttctgagactgacgggaacttggacagggccgaagagtgaccgaggcatgcgggagagaaggggcgcctggacttttggaaggataaacatgcaggcgccaaaggtggctttaaaaattacgttagatctgcaactgttgtgagtctaagggcgcgattcaacgaaggctgaatgggacccggagaccgaacgttccggagtcttaccccttcacttcgaagtgaagtgcctcgaaggccctgcgggaagagggaattgcaattaagagcagatttgaagcttcatctcattttgtctctgcagccagaaaataaactatcgtaaagcatcctactgcgggacactgaggtttgctttttgtttctaggtttatttatttattttccaggctggctgcaaggcaacttgaacaaaatctggctgcgctcggactggggcggctctttcgtctctccaggtttttcgcgtctctctactttcagtgacacgacaaccaacgatggcaggccgcagctgcactgctggaagcgcccagttccgcaggcgggagggccggaggcggccacgcatttccactcccggggcgacaggcttccgaaagttcacgtcctccttccagagtccttgggtgcgggctggggcgagaggggagggggcgcggtgactgtccctccaaggagctgtcttccgaagccgccaagtctcgggcgggtcctcttcggaagagggagaaagttgggcgggaccacggggcggggctggtgggtggggagcgggtgggagtccgggcgcccccagcgctcgcgagccggggtggagccagcagccccgcgtggcgtccgcgtttaagatgcaaatcgagtccccgctccccacctcccctcgcccggtaagcgaggctccgccgccgcccacgcctcctgcgcgccacggcaccagagcaggcggctctacttaagcagcgcgcgggccgcgacccggcactcgcctggagcgcgcgggcaaggcgggcggagcgcactggaactcaagggggcgcacagcggcgcgctcgcaccgctcggctccgcgcggctctaggaggtggcggcggtggcggtggcggcggtggcggcggcggcggcggcggggcgcagggctgagcgagcgtccgggttccggggctccggggaaggcggttgcagctcctgagtgcagcgcggcttcctgccactgtcccggcccggccacctctctgtcatggctctggcggacagcacacgtggattacccaacgggggcggcggcgggggcggcagtggctcctcgtcgtcctccgcggagccaccgctcttccccgacatcgtggagctgaacgtggggggccaggtgtacgtgacccggcgctgcacggtggtgtcggtgcccgactcgctgctctggcgcatgttcacgcagcagcagccgcaggagctggcccgggacagcaaaggccgcttctttctggaccgggacggcttcctcttccgctacatcctggattacctgcgggacttgcagctcgtgctgcccgactacttccccgagcgcagccggctgcagcgcgaggccgagtacttcgagctgccagagctcgtgcgccgcctcggggcgccccagcagcccggcccggggccgccgccctcgcggcgcggggtgcacaaggagggctcgctgggtgacgagctgctgccgcttggctactcggagcccgaacagcaggagggcgcctctgccggggcgccgtcgcccacgctggagctggctagccgcagtccgtccgggggcgcggcgggcccgctgctcacgccgtcccagtcgctggacggcagccggcgctcgggctacatcaccatcggctaccgcggctcctacaccatcgggcgggacgcgcaggcggacgccaagttccggcgagtggcgcgcatcaccgtttgcggaaagacgtcgctggccaaggaggtgtttggggacaccctgaacgaaagccgggaccccgaccgtcccccggagcgctacacctcgcgctattacctcaagttcaacttcctggagcaggccttcgacaagctgtccgagtcgggcttccacatggtggcgtgcagctccacgggcacctgcgcctttgccagcagcaccgaccagagcgaggacaagatctggaccagctacaccgagtacgtcttctgcagggagtgagctccccagaccccctcgccactccagcgcccagtccttctcctgcccgagagatgattacagagcctcttgtcccacctttgtcccctggctgctgccctcccattctccccctccagtagtagctgggtgagacctgtccgcccaccttccctccactacagaacctgcagccgcaaatcctctgggctgcttcgtcttctttggacctcctgaaccgagagaacccagaggaacccccaccccacccccacctaccactccatgctttctctactccctgcctcaaaccacccctcccccagatggtacttcagtttggatctattgggggagtgtggccacagaccgggggatgattgaattgttcagaacctgattggaccgtgtccaatgtgcggaagatttccttgaaatcttctcaagctcttatgactcactgggggtttaagagatcaggattggttccactgtctggggttagtgttttacaaggtcattacacagtctttttgacctcttttgaaggtagagttttagaaggctggatggaagattctgagcctggaattaggaccccatggaggcagttcagtaactaaactaataaagttttgaaaagttacacgtaaagtagaagaatctagtgcgtgggacagtaaaggatcctttctcgtacagaataaaaggtctcagcctgtagcttaaacttatagaaagtgatccgcctgcctgcagaggcgcccttttcagctgctgctcgccagaagcccttgattccactggttgacatggcagcagttactggcaagagggagaaaggacgctgccgcctaagagtgcaaggctgctcaggtctccaagcgccgtaggaggtcacctggcagtgactgtagggagctgggtcatagtgcacgtcgtgggtattaggaaagcctgtattctttcaatgaatgtcagtaggaccttcctttagctgtaagacttggtgggcggggtggggtggggagggaggaaagggtaggaagggtgggaagggagaagcagacatagtcatttatgatttgaaagttggaagtttgtaccatctgtttgagtatatgcacatttaaaaaatatcatatagtaaatgcaaacatgccaagtattttataaagattaataacagacctactcttacctggcagtttacttaacttactgttttgagtcctaaacttagagttgttaatgcttatatataatctaaccaaagagttacccagtagggttttagtttttgaacttttattttcttgttgattataaatcctgattttggaatctattgcgcaaaagaagtttcattttggttacttagacctaagatcacttattaaaaatccttattttctccaagcccagcaaacgttgacttctgggcaaacctgaaaacctgaaaatgccactttcatgcagtttgtttgaagttaagtggaatcctttcaaatgacgagctgcagagaactcagcaccaagggctgcctatctgtagatagctgtaaaatggaatatttttaaatgaaggcaaataagtacttaaaagtgagctgagcaataaaatggtccaataataggtaaatgcaacagaaacagaaggagacctggttgccttatgcctttactcttacatggaataaattcccaatgcatatcctatgtaaaccataagtgaagggaaataaacctcgtcatgctccatgctgtgaggtgtcctttggatattctgtgatgacagagaagcctattttgttttgttttcagcatctttctctgatgtacgtttttaaggattttgtaagagctgttttcagtgtttaaattagtgctatttttccttgtttttaaaaatgaatctcgtactgtatcttactatgtccatacagatgttacaaatcgacagttttattcttagactcatgtgatccaagctgtatataccatatataaacattttacatgaatcatttagttttttaattcatttactaatgctataaaatttcctatattaccccagtaatttgcatcagctggtttatatactaaagcaacatgttttgatgagtttcttacatccttatcgaggaattgggttaggaaaaaatacataattgtaaaactgagtttgctgtattatactttttttcttgagtattagttgtattactaatcatatgttgattaactgtctacttaaagtcaaggtacctgtatttttaatccactaatttttttttagttgggaaatagatttcaggtcttttattagactaacattttttgagaagtaaaattgac

SEQ ID NO: 6304 - DNA, 6000 bp, Homo sapiens
agaagtaagtcgcctgtgcatttcccatgagattctgtgagtaattttctttggataattcacagctggtaaagccatttcagaatcactttcttcacggatagcaataattgttctctctagcagggcccaaaagagaagaagcaatttgctatacatgcatcactaaaagagataagcaaaaatcgccttatgaaattggcatggctttgcaagccccagatgatccctcgctttgacaaaagcatgccatgactcttggcctgaaagttaaattgttcatctaatgtatagtaaataaacactcagtaaaatcattgtttccctttaaattttcatacaaatagttctattcccctacaattaaatctcaaagcataatcggaaactttttacagattttggcagattttgattaaaaggtatttccattaccagagcttaataattagcagaaatgaaatttaaagtatctcattgattaagtacagttgttaaaaacaaaagaagaagaaaaaaagcctgctgtgggaattctcctttttggactctcctagcacattctattctgtactacaaataacttttactttctttaaaaaaaaaaaaaaagtacctctcttttatttaccagtaaatagctaaagatccaagtttctctttctttttgctttctaacctattttgactatttcacatctctttggacacttcattcaggtatcaaaagaatggaaacaaggaaaggtaaaaattaaagaaaacaattagagtcacagaaaatacataaactcattataaattatattccatatgaaataacaactccccaaagagtgcattacacatgataagactgtgctgacatacagtaatgatagtgttttctccattactgagtggcctaagaataatttaataaatacagtgtgcattgacaaaccaagacggcacaggtccgactgccttcttagactggaatttctaatatcttttcaaagttgttacaaaagttctgtgaacagttttaagaagtttgtagaccaggttacactcattttttgttttactgagattggtgaaaaaaaatatgtcaaagaaaggaatataaaaattacttaagttataagtaggaaagcaaattattgtctaattttaattaaagtagaccatagcctaaaatagctgaactatgttgcttttctcagaaaaaaagaatgtatcctgtctgtttctcatattttctataggcagaaaagaattaatgaagtcttatttctagttacattaaacctatcaaattttaattacatcagggaatgaagtgtaatttggtaccatcaagcaatcattgataacgtttcaaatgtcagattctctcatttaatcacacctctaatttatgagtgacattttagttatagaagctgataagatgtatcagataagttgataaagcagaaatagtgtcttaatgagcgttttaacaggaatagcgtccaaatctaaaatattcaaattttaccacttttaaagaataaatgaattttcaaagagccccttaggtatgggtcacaggattgcaaacatttggcaaaactcttcaagctgcagttaagccctgtccatttcactgtacatacattatacttaattaaaaaagattctttatcatggatccagatagctacagtcacttaatagaaaagaaaactcaagaaatagaaattctcatgctgtttgctattgacttttgcagtcactttaaaacttttttattctcttacttcaaccactatttgatcattgaatctggtcccagaggaatatgtggagaaccagttgaaccaactctttctgtgtttttcgcacaccttgtctctcagcattcatgatttagagagttcaacataggttttgagggcacattcatttcaagaggattacatgaaagtactaacttttttgtgtggctaaaagggcttttctttgttctgtcaccaggcgaaaaggtttattttgggaatgctccccatggcaaacctctttgagaaatgaattccgaattgcattaaaccctgtcttcaggaacttctagataaagcatttaaaggaaatactgggacattgtctatcttcaactttctaactttgagaagtgatcttagccaatctggaattttgatagatttcctagacacttcataaacgtttaaaataagcaactttgtaaaagactccacatttacctagccaaaaaaaaaaaatcctctcataaatgcaaaattagttcacaagtttgcaggtaggaattcttaaaatttgatacaactttttgctcatatatagaagtgaaatttacatagtagttagttgctagtgaattcataaataaaatttatcgataacagattttaagtaataagatgaaaaaaaaactatatccatagcagtactgctcaaggcatgagtaatgaaagtaacattaaaaaaaaatattggcctagaatctgtttccacttttctgcactttaagacactcctacagaggcagtttgtcagtcggactgatttattggagcaagaagtaactttaatccttttcttccattttacaaaaggggaaactgacacccagtcattcatgaagatcaatgaacaattctttacatttcacatggttgtctttacatgttaaggtgaaatatttaaggttaaacttcaattgcatattactgatgtctagaacactgtttccccaaaataagaaaaaaatttgcttaggctttctgcaattacaataataaaaagcatagtctgtgtaaccatttagacatgcattcaaatcctagctccaaatcctggtcccacaactaactagccacatgaccttaagtgaattactgagactcagtttcactgcctataacatcatagaaaataatacagagctggaagacaaacatcagagaatcaatgaggtactgtgaaaaggtgtctaatgcaggtggtagaccctgtaaggagtagctgatactgtgttttaaattccaaatgaggaatgtgtatatttaccttaaaattgtttggccttattcttgagcccaatgaccagttaataaagtataactgaatactttaaaatatcattatcaatttataaaaaatatttcttaagctcattttgtggcaggtagtgggatggtgcagaaagaacatataactcattcaagtccctgtcctgtaaaagaaattaagtcacacgaaatcaatagtgacccatagatgtctcttatgtgatcaagtgcttgctaagttgtggttaacagtccaaaagtgctccaagaaaagtaaagagatagacctcagtgaggattagagcagacttccaggactcagtggaggaaatttgaatggagatggagatgatgagaaggccagtggggagagagaaaagtcaccccacaggagccataggcatgaacccaacaaagcttgtataggaagggcagatccaacactgggtggagtcaactaagcaaaatattcatattccaaagcttccatataattccttattcagacaacattgtatattgttacttggctcagcaattgaatgttgacctcgttcttacgagacagggaggataaggactgcaattcaaaatagccagatttggaattagcactcacaaccctagaccatatttctcattcctttagccttactccgtaaccatgttcctaaccacatttcacacttaaagttcacctttttaaatagaaattgattttctacttccactgtcccagaaagcattgcctaagagccaaaaatccaaggttcttgtcccatctattccattaactaacatgaagcaaaaaacgagcctcctgtctctgggtgaaactgctacatggaatgggtgcttctgggtttgaagttccacagatccagtagggattttgctgattggaggacggcacagtactctccagtgcatctccaagcctgacttcctgacctcttttatacaatctctgggcaaaactaccagtcgctgttattttcctctctgcggtaaacatggagctcaagaatggatagaaagaccttattgtattgctctacctggtaaataaatatcatgttgaatttgcatggcagctttctgattattttcatgtctccgataagcatcaagtctgtcataggtacagtataaaaatgcctgagattgcctaacaccgatactgtggcaggaagagaggagaagagctgtactggggaaaatgaggagtacttgtaatcctctctcggggcagtgagagggcctgggaagaaaagatcgagctgttccgtgttggggttaatgttggcttgaaatgaaacttcagggcaaaatgaagcagagcaaagagcagcgcccacaaaccaaccttaaatatcacagcggcggaacatttacctgaaagaaaagtgacacttggcattaaaagttcaattatcacgttcagtgcagagccttgttctagtctggagctgccgggtgtcacatggtgcgtgataacttgcccttgatttgggttcatttgaagagcgtagaactctaacaaataaacagccttttgggacctgtccccggacgaggactgcccccctccctcgggcaactactactgatgctgtccaggcatcgcccaaggggaaaggttgcagcggggtcggaaggcgcgggaggagtctggcggtgattgatgggaagggatgaatgaataaaagtacttgtctgatggcagcagagaccccgagcaaacggtggaggctacactgtctggcattctcgcagcgtttcgtcagagccggacccgcctgcagctcaagggaggcgtgctcctctcccagagcaggctggaacccagctgggttccgcctcccgggaaggtggtctccattcgtcgctctgcatctggtttgtcagatccgagaggtaaacattcgggcttggtgttgaattaaaatcattgattgaaccttattctggggcttcggtttggcttactagtttgggattttaaaaaaataaaaattaagcctatagagagggcaaattaaaattaggttgggtaaaggaaggagcgcgagtgtttgaagccgtttggagggaacagcggtttccaagttcctgctgacttgagaagtctctgcgggtttccgaatctccggcgcactcctgggcgcgctgcgggagctgtagctcagccagccagggagtagcggctttcatccgccgggaggagtctttcgagttcaatcgcggggtatagaggttcccctgcggggcaaaatgcagagcttgacacaagcccttggcctctaggtgccttaattccgcggttcccacgcacgcttaactaagacgtgtctgtattcctcccgttacgtgaaagagttcggagctttgcctgggacccccatcattccctccctggcacaccccttccagaacgccccgccccactgcatattatttacccctcctggccacgcgggggaagaaaaacagctgagagggcatcaggaaggagtttcgacccgcgctggcgagtcatgagcgccaagtttcccactggcgcgcaaacttgagttacttttgagcgtggatactggcgaagaggctgcgggcggtattagcgtttgcagcgacttggctcgggcagctgacccaagtgtcctgtcttccttcctctgcttgtctctaggctctgaaactgcggagcggccaccggacgccttctggagcaggtagcagcatgcagccgcctccaagtctgtgcggacgcgccctggttgcgctggttcttgcctgcggcctgtcgcggatctggggagaggagagaggcttcccgcctgacagggccactccgcttttgcaaaccgcagagataatgacgccacccactaagaccttatggcccaagggttccaacgccagt

SEQ ID NO: 6305 - DNA, 6000 bp, Homo sapiens; identical to SEQ ID NO: 3641

SEQ ID NO: 6306 - DNA, 6000 bp, Homo sapiens
attccagagatggggcagggcaagtcaaagacgccaaagctgggaataagtttggtttgttccaaggacaactaagaggccagtgtggctggagcagagtaacgagcagggagatgggtagaagaggacgaaaagcacagccgaggaaacaatcaatagattgaagagacagcctacagaattgcaaaccatacatctgataagggttttaatatccaaaatatataagcaactcaaacaactctatagcaagaaagcaaataacccaattaaagaatgggcaaaggatctgagtagacatttctcaaaaggagacatacaaatggtcaaatctatgaaaaaatgctcaacatcactaatcatcaggcaaatgcatattaaaaccacaatgagatatcacctcaccctagttacaatagttgttataaaaaaagatgaaagataccaagtgttgacaagatagagaaaaaagaaaatccttgtatgccattggtgggaatgtaaattaatatagccattatgaaaaacaatatagaggttcacccaaaaatttaaaaatagaaccaccatggccaggcatggtggctcatgcctgtaatcccagcactttcggaggccaaggcggacagattgcttgagcccaggagtttgagatcagccttggcaacatggcaaaacctcatctctacaaaaaatagaaaaattagccaggcatggtggtatatgcctgtagtcccagctacttggggagactgaggtgggaggattgcttgagcccgagggacttgagactgcagtgagttgagattgtgccattgcactccagcctgggggacagagtgagaccaggtttttttaaaaaaaaagaaaaagaaaaaagaatcaccatatgactcagcattcctaattcctattacgggtatatatccaaaggaaatgaaatcggtatgccgaaggaatatgtgcattgtgttgtttactgtattaccattcacaatagccaagataatgattcaatctaagtatccatgaacaaacaaatggataaagaaaatgtggcatatatccactatggaatactagtcagccttacaaaaaaaaggaaattctgtcatttgtgatgacatggatgaacctggagggcattatgttaaatgaaataagccatgcacagaaagacaaatactgtatgatctcagttatatgtggagtctgaaaaagttgaactcacagaagcagagaggagaacgatggttgccaaaagatgagatgtgggagtggaggggtggggagatattgcttgaaggatgcaaaatttcaattagatggaggaataagccaagagatctatagtgccacatggtgactatagttaataacaatatattgtatttttgaaaatctcagagtagattttaagtattcttctttttctttcttttcttcttttcttttcttttttcttttttgaaacagactcttgctctgttgccaaagctggagtacagtggtgtgatctcagctcactgcaacctccgcctcccgggttcaagtgattctcctgcctcagcctcctgagtagctgggattacaggtgcctgccaccatgttggtgaatttttgtatttttagtagagacaggagtttcaccatgttggccaggctggtctcgaactcctgaccttaggtggtccacctgcctcggcctctcaaagtgctgggattacaggtgtgagccaccacgcccggccagattttaagtcttcttaccacaaaaaaaataagtatgtgaggtaatacatacgtttattagctcaatttagccactctacaaatgtgtatatattttaaaataacatgctgtacatgaaaatatatataattttttgtctgttaaaaattaattaattaattaattttaaaaagaggagggcagggaatacttgtgtattttgttaactggacaaatgaaactctactttcatttgctcattaaacaaatacttgttttgtgctcagcatgattctaggcactgggactactgcattttggtccattacttccttgcgcacaaaaaccctttcttttcaccacgaatacactatgaacatgtttttttcttcagtgttggcatctcttgattccttccctccaggtctttgtgcgagttttactctttaaaccccagatattgtcatatttttctctgttaaacttttccaaacaactcaaaatagggtaatttcttcttcttctgaatttctctgacaattattctatgggtcatttattaacacagcataatcaaacaacttatttattttcatctttcttgatcctttcttcagttggatgttgtctttgagggcagaggttgtcctctatgttttgaagtctccacacagctcgtcgttgccttgcccgtagttgtagctcagtgaaataaaaatatgtccgtagaaggtgatgtctgtgactggtgagctgagagcttgtggggttggtgttgtatttgggtgcatgtgaatcagtgcatctcctgctccattggtgttaaaaggctcccatcgtcctgggaacacaataggaaagagaacaggtgggaaggcactggatgaaggaatgtggagaatggaggaaaagttgatcagattgttgacaactttcagtgttgaaattgtcaccaaaatcaaagtcagtaaataaatttacaatgtccttttcttcaatgcatcaataacttcaccttcctgttcaaagcacagcaagtaattaatctcttatttgcatttgaaacccaagtttcagatgtttgaaggtggttgtaaaaaataaaaaccaaaataaagccaaaataaataagcagcagcactaggccgggcacagtgtctcacacctgtaatcccagcattttaggagaccgaggtgggtggatcacaggagatcaggagtttgagaccagcctggtcagcatggtgaaaccctgtctctactaaaaatacaaaaattagccaggtgtggtggtgtgcccttataatcccagctactggggggctgagacaggagaattgcttgaacctgggaggcagaggttgcagtgagcagagaccatgccactgcactccagcctgggcgacagagtgagactccgtctcacacttgtggaacccagaacttagtaaccatgaacagaaccttaataaacagaaagttctggaaataaagtttaatcatcatgcaatctttatcactgggttaaatgaacaatcatctgggaacatgtcttggaatgcttaaagctttgagatgcatgtgcctatgtggcagacaaatttcaaatgtgaaacgtttagttaacttggtcttgctttttaatcactgctttaaaatttaaaaaatgctgctggtcaagtaaaaatagcaatagataaaatctgccctgagcaaacagaccatacatcaataaatgaatacttagcttaagcgattttccatgagacccatgaagcatttctaattgaaacttaacaagctacaacccaacagacactccaatcttcacttctagaagggaaatgtgatactccatgtagacgtagctttttaaatttagctggaagacagcgtgacagtgaagttgtgtgctgtaattttttaaaattgctgaagtgtcatggtttgctatttcgtatttattgaaaaaatgtaaatgctatatttaacagaatggcagtaactctgtttcaatctgaagacttaatcttactaatcatggtaatatatgctggctggagttgggaatatttcataaaatactggaataaatttgtgcttatatttcaggggaattaataaaagcaccttcatctgcaacatttaaaatgttattgcctttaaatttgtattaaataatgcagggaagatagatcactgggggagaatggatgcacctctgtgaggatcttggtcattcaacacacgtgtacgggtgaggaaactaaggcacgacttactgggtagggaggtagggatattagcaagatccttcacttgtctgggctttctgtctttgagtcacctttgcgcagtttttcactggacttcacaagcctctgaggcggcagggcagacaggacatccttattttatagaggaggaaacttaggcttacagaggtttcctgccccaaatcacaaaggtggagcctagaccttctcagtctccaccaactgtatttcggttagccacaatcctatctacccacatccaaatggacactgtggctctgcaacttctgtcaaaagggctctttggcaacaggaaaaacgtcatggctccattgtattgtagaggatgggaatgggtgttccggctaaattctccctcccctttccctccacagctcagatggcaaatgtgcgacccagggacctcccgctccagcagacctgtgcgcacaactttgcacagattacctgctaagtcagagccgaaaggtaacacagatgccaaaggataataaaggtgaatgagatttactcaaaattggaaacttggtgtttggtttttcaggagaacaatcaacgactgtgatttgaagttcaccagggtattctgagagatctaatcaaagatagagtgctggtttgaaattattaaaaggtaacagtaaaagggagagcaaaaccccagtcccaacgcaacccataaatctactttgtcttcctcgaaagaggggcgcgggtgggcgcgtctccccgcgagcatctcacctaagggggaatccctttcagcgcacggcgaagttccccctcggctgtcccacctggcagtccctctaggatttcggccagtccctaattggctccagcaatgtccagccggagcttctttgggcctccgagtgggagaaaagtgagagcaggtgcttccccagcggcgcgctccgctagggcccggcaggatcccgcccccaagtcggggaaagttggtcggcgccttttctccccgacgaagccgctccagggctgctctcagaggacgcgcggcaggcaaagagaatgaacctgagcgtccacgaaacgtcctgcacggctcccgggagctgggagaaacaggtgcctttctccgacgtccgcgggcgacgcctgccgcaccttgcccgctgccgcgcccctcccgggcacccctcgccctcggcgcccctgcccccgcccccagtgccagggcggaggcagtcccggctcgcaggtaattattgccagcggagcccgccggggagcgggggtgggcgcgccggcggtgggcgggcgggcgcggcggggcgcgggcataaaggggcgcggcgcggggccccggagcctggctcccgcgcagcatgcccgccagcgccccgccgcgccgcccgcggccgccgccgccgtcgctgtcgctgctgctggtgctgctgggcctgggcggccgccgcctgcgtgcggagccgggcgacggcgcgcagacctgggcccgtttctcgcggcctcctgcccccgaggccgcgggcctcttccagggcaccttccccgacggcttcctctgggccgtgggcagcgccgcctaccagaccgagggcggctggcagcagcacggcaagggtgcgtccatctgggatacgttcacccaccaccccctggcacccccgggagactcccggaacgccagtctgccgttgggcgccccgtcgccgctgcagcccgccaccggggacgtagccagcgacagctacaacaacgtcttccgcgacacggaggcgctgcgcgagctcggggtcactcactaccgcttctccatctcgtgggcgcgagtgctccccaatggcagcgcgggcgtccccaaccgcgaggggctgcgctactaccggcgcctgctggagcggctgcgggagctgggcgtgcagcccgtggtcaccctgtaccactgggacctgccccagcgcctgcaggacgcctacggcggctggg

SEQ ID NO: 6307 - DNA, 6000 bp, Homo sapiens
agtggaaccttacaaagtaaacctctctcaagatttagagcatcagccacaaaacatcatttgagagctaaattttgagattatgcccccgcctgaagatccttctatgccagttgcactcaacattggcaaattggctcactttgaaccatctcagtgacaaaaccaagtgggtatagttcctcggtcacctccacaatccagatggaatccttggactactagcgacattgctgagggacctctggcttttgcttctccagagcaaataagcttggacctcaagaatgaattggtgtaccagttggaacaggatcatgatttgccagcaatcttgcaggagcgagagttactgcctgtgaagaaatttgaaagtgagattctggaagcaatcagtcaaaattcagttgtcattattagaggggctgctggatgtggtaaaaccacgcaggttccccagttcattctagatgactttatccagaatgactgacagcagagtgtaacattgtagtaactcagcccagaagaatcagtgtagtttccatggcagagtgagttgcatttgagagaggagaagagtctgtaaaaagctgtggttacagtgttcaatttgagtctgtacttccttgtcctcatgccagtataatgctttgtactgtaggtgtgctcctaagaaaattagaagcaggcatttgaggaatcagtcatgtaattgtagatgaaatacatggaagagacattaatactgacttccttttggtagtactgcgtgaagttgtttcagcttaccctgaagttctcattgttcttatgtccacttctattgataccagcatgttgtgtgaatatttcttcaattgccccatcatttaagtgtatgggaggacttacccagttcaagaatattttctggaagactgcattcagatgacccactttgttccttcaccgaaaaccaagaagaaggacaaggatgatgatggtggtgaggatgatgatgcaaattgcaacttgatctgtggtgatgaatatggtccagaaacaaggatgagcatgtctcaattgaatgaaaaagaaactccttttgaactcgtcgaagctctctttaagtacattgaaacccttaatattcccagagctgtgttggtatttttgcctggctggaatttgatttatactatgcagaagcatttggaaatgaatccacattttggaagccatcagtatcagattctacctctgcattctcagattccttgacaggaacagcgcaaagtgtttgatccagtaccagttggagtaaccaaggttattttgtccacaaatattgctgaaacaagcattatcataaatgatgtttatgtcgttgactcctgcaagcagaaagtgaaactctttgctactcacaacaatatgaccaactatgctacagtatggggatcaaaaacaaaccttgaacagtggaaagggcaacctggccgaatacggcctggattctgctttcacctctgcagccgagctcgttttgagagacttgaaacccacatgacaccagagatgttccaaacaccattgcatgaagttgctcttagcataaaacttccatgtctagttggaattggccagtttctggccaaagcaattgaaactctccctttggatgctgtgattgaagcagaacacactcttagagagcttgatgcattagatgccaatgatgatttgactccattgggacgaatcctggctaacctcctcattgagcctcgttttggcaaaatgatgataatggtgtgtattttctatgtgggagatgctatctgtaccattcctgctgctacctgctttccagagccttttataaatgaaggaaagtggctgggctacaaccattgaaattttgctggaaacggattttctcatcatgtagcccttttatcagtattccaagccggagatgatactagaatgggtggagaagaagcagaaatacgtttttgtgcgcacaaaagacttcatatggctacactaagaatgacttgggaagtcaaagttcagctcaaagagattctgattaattctgggtttccagaagattgtttggtgacacaagtgtttactaacactggaccagataataatttggatgttgttatctctcttcctggcctttggtgtgtaccccaatgtatgctatcataaggaaaagacaaagattctcaccactgaagggtgtaatgcacttatccacaaatcatctgttaattgtccttttagtagccaagacatgaagtacccatctcccttctttgcatttggtgaaaagattcgaactcgagccatctctgctaaaggcatgactttagtcaccccactacagttgcttctctttgcctccaagaaagtccaatctgatgggcagattgtgcttgcagatgactggattaaactgcaaatatctcatgaagctgctgcctgcatcaccgctctccaggcagccactgaggctctggttgttgaagtaaccaaacaacctgctatcatcagccagttggaccccgtaaatgaaagtatactgaacatgatccgtcaaatctctagaccctcagctgctgatatcaaccttatgattggcagtacatggtatggagatggtccaggtcctcctaagatggcccaatatgacaatggaagcggatatagaaggggaggttctagttatggcagtgaaggctatggcagtggctatagcagtggaggctatcgtagcggaggctatggtggcagctccagctcctgtcgggcaggatatggtgcaggtgttggtggaggctatagagaagtttcctgaggtggctatagaggcaactctggaggagattacagagggcctagtagaggctacagatgatctgggggattccagcgaggaggtggtaggggggcctatggaactggctactttggacaaggaagagaaggtggcatctgttaaggcttggttatgtcagttcctgtgtgtagacagtaagaaaaaaaaagccatgctatgtgtgacatttttttccaatgtttatttcccaccaaaaagtaaatgcattttaacccattctgtggttcactgtagcttaaggaaaccaagcatatagatgcattagtgattttgtttatattatgtaaaatgtaacgatctatcttagaaataccacagtttgtatttttctttaaggagtaaagatttgtctttaaaaataacttgatattttcctggctttcatttaatacaatggaaaataaagtattacacgaaaaaaaaattttttcttagagacagtatctcattatgttacccaggctgaagtgcagtggctattcacaggcacgattatagctcactatagcctcaaagtcctgggttcaagcctcctgagtagctagaacttcaggtacatgccaccttgcctggcttcctgctttcttattcactaagaaactttgttctctaaaatcatagattagagacaacttcgtgtttgaaattacatcagtaacaataaaatatcccacctttgcttgaaggacctcagtcattccacacagagaattggcctcaatttacaacccagatgtcaagcttctgataaggggtttccagacacaaaactccatcgctattttaacttcatagtctccaaggaaataggcccttcatccactttgcagtctagacctagagcctgtgtgttgatggcagcagcaggccgtctggagcagccactaccatcattgacatacagccttgttttgctttgagtctaccaaaatactgcttatttaaatttcatctcaactccacacttccccagaatcctatcactctatctggggagatgccatgtggtccaggcagtcttaggctgaatgggcaaggatccaagggaaaccaattagattgaaattagttctgtctgtgggccctcaagatttaaaagccatggacaagggggaagcaaccagtatcgaccagcgataatctatgagcaccttcagcttggggtgtggggtcatagacaaaaagaatggggtttaatcagtgttcccatccaaggcaaaaccagaccagaagaatgggagctaccaggaggctgagttaagaccaatactagggccaggcatggtgactacagcctgtaatcccagcacttttggaggccgaggcaggtggattacttgaggtcaggagttcgagaccagcctggccaacatggtgaaacctcgtctctaccaaaaaaaaaaaaaaaaattacaactggcacacacttgtacccagccactagggaggctgaggcaggagaattgcttgaacccgggaggcggaggttgcagtgagccgaaatcacatcactgcactccaggctgggtgacagaaggagactccgtctccaaaaaaataaaaaataaaaaccaatactaggaagtgctttcttaccatgaaagctccctgcacacagaatgaagagacagatggcagaagcaagaccagaggcctccaccactgaacaaggtcaacctgaatttgtttttgtagctctgggaagtcctgaactgaatgggaggttctactgtggccctctactaacagtagatggaacctggaaccatctactgttaattgtccttttagtagccaagacatgaagtacctatctcccttctttgtatttggtgaaaagatttgaactcgagccatctctgctaaaggcatgactttagtcaccccactgcagttgcttctctttgcctccaagaaagtccaatctgatgggcagattgtgcttgcagatgactggattaaactgcaaatatctcatgaagctgctgcctgcatcaccgctctccaggcagccacggaggctctggttgttgaggccatctactgtggccctcatacatcatactgtgtatggttccaggatttgtaaatgctctaatcaatgtttttttttttttttaaagctgttcctgctgattgctttttaagctaggctcaagtgtggggccacggaatccttcaggtgcccttcaaatcagacattacatttcagctctcagggctagaatgcttccccctcttatcttgggcaggtctttgaagaagccagtttagccttggtaattttgaatttggccatagtatacggaggagagctaggtagctatcaaaacgcttagacaaacgtatggtaaaatgcagcccagcctgaacctccgcaaaacccccaaacctggagcagcaagtgggcaaaggagtgtgtgtttggggcagggtactgagtcccatatgtaatcaagagacctggagggcccaaggaagtcagtgacacccccacaagctacatatcctccaatggattgtggtggtcatctccggctaccgaagccaccttgcttattcccataggcttacaaacattatgatgcttcacacgagttgtgggtgaagtgaaggaattggaaagtcccggtctaaggccctgcaaaactgctgtctggtaaaaacaagtgactatggcaaggccctgaatgtactacgtatagacttaagtcagtatttgtgcctaacagcaaagcatgccacaagaggctcctcaaaagccgggtaattgatgccattgttttcttgacctagttgaagagtcaaagaagagaaggtgatgcagaaacttctttccagtgaagtgacagatccaagcaaggaacacctgcctgtgaggggagcggtaggggagggggtagattcggcagcactcgggtagtggcagggaccacatattgtcggtgttaaccactgttatcactggcccaggtcgagtgaggacgagtcatttccccactaagcacttggggagtggcagggaccacatattgtcagtgttaaccactgttatgactggcccaggtcgggtgacgacgagccatttccgcactattgtccct

SEQ ID NO: 6308 - DNA, 6000 bp, Homo sapiens
ttctgctctgtgaaagatactgccaagaaaataaaaagtcacagcctgggagaaaatctttgcaaaagacgtctgataaaggactgctatccaaaatatacaaagaattctcaaactacaaccctattaaacaggacaaaaaccttaagagacacctcaccaccgaagatatacagatggcaagtaagcaaatgaaaagatactctgcatcattttgaaatgatggttaaaacaactagttaccactacatacctgttacgatggcccaaattcagaacgctgacaacaacagattcttctgaggatgtggaacaagaactctcattcattgttggtgggagtcagactgatatagccacatgggaagatagtttgacagtttcttataaagctaaacatactcttaccatactatccagtagtccagtagtcatgcttcttgatatttacccgaaggagttgtaagcttacggtccattcaaaaacatgcacatgtatgtttatagtagctttattcatatttgccaaaactttgaagcaactaagatggccgtgaataggtgaatggataaaccgtgagacatacagagaacagattattattcagaaccagaatgaaatgagctatccaactacaaaaagacagggaggaaatgtaaatgcatattactaagtgaaagaagccagtctgaaaaggctgtatactatgtgatttaaactgtatgacattctggaaaaacaaaactaaggagacagtaaaacgatcagtggttgccaggtgttagtgtggagggagggatgaataggtggagcacagaggatttttaggacagtgaaagtactctgtatgatactgtaatggtggattccttatacttttgtcaaaacccatggaaacagcgccaagagtgactctaatgtaaactatagactttgggtaacaatgatgtgttattgtaggttcatcagttataataaatgtatcaccgatgggggatgttgttaatgggggaggctttgcctgtgttggggaagggggtgtatgggaaagctctgtaccttatgcggacttttcctgtggatctaaatctctaagaagtgaagtctgttaaaaacgtgatttggtgaatcagtatagggggatacatgattgctaactttgagagagggaaacagaaagagtgagtgatagtgtgtatatatgtgttcgtcttcgatattctgaagttattcaaattatgtgtttagatttagcggccaactttagagtttttgctttggcatataacactttgatggatcaaccccttgactatcatctgtagtggtgtcttggcatttgctatgcttcctggatgaatcactaacaacagtatgtctaagtaattgatgttactgtatttagttttgcttgagtattctgttgttagcttctctgagtttgttgagggaagaatgaaactttccatgaaggaagttggtgtttcaggcctggtcgttactggtttcagctctttggtttgcctatgatagactgtgttgacttttcctttattcctcttgctgaagtcatacttactatggccttgcctcagaatttctagttgttagaagctagaagttttagtgattaatgagatgggatttgcacctatttcccgcacccagtattgtacctggaacatattaggcttttagtaaatgttagctgaatgatggatgactaattgactgaatgaaaatgcatgaatcgcaaaaagaaaaagaggcgtaaagagattaataacaccaaggttatccagctcataggtggtggatctatatcttaaatttagatttcctgacatcaaatcatgttctttttttagtttattcatttagcatctagcttttcttctaaaaatatgtgaaattaaataagacagtacatcatgctaatttttaaaaaggacaaaagaattcttctaacagtaactctaacaatattacatggggttaattgctttaatgcccttgcaaatgaaacttaaaccaaaccagttacacaccgtccagcttcagtccagtccctgggtcagagacagtatccgtagctctggatttagttttagataagactctttaaagttggctgaggagaataaagccccttacaaaagaaacagaatgaatggttgaagatagagggaaaatcaggagggaatagttatcaggaagctaaagaaaaactaattagaagtacagttaagtgtgttggatatattaaatatttaaatagtatgaggactgaaaataggcttttggatttaataattagaaggtcattgttttcagcgagacgtttgggtgaaagccacatggtaatgaattggtgaggaaataaaagtacagaaaatgggagtatatacatacatatatatttcttttcaggatgtttatcactaaaggaaagaagggagctatggaaatagttcaaaaagcagaagaaaaagtatttatttttagctggggggaggttttttttttttctctttgaagtatggtgtgaatagaatatacacgtgggtagggagaaagaagtcagtgttgaaaaggaaggagagagaatttaaagaaaaaacaatcctttgggaggcaagatcttctctgtacagttgtctggcatttgggagtgaagaacataagttaggatggatgccataatgctaagtttagagctgcagaggagagaagttgaaggaatttttgcttgaaagcttattttcctccatgaagtaggaagcaaagattttgactgagagtctcatggttagaagtggagactggtggaattggaacacctgccatggtgtcagtgaactcttatggccttgttggaactggaaactaaatttgctgtggcagccacctacatagtcacgtgatttgttgtcttccctccaccagaaggcagtagacagacttatcccaaattgagtcttaatgggatagatgtggccaaggataagcggactagagaattgagggtgcagttgaaggtcatacaagttttgcattttatagtccagactacataggatagaaggtaaaatcaggtagcagggaatagagggcccagagaataggctcagtggaagtaaggaatgaaaaatgttgaggccagaaggttgggataaggaaccaagttgtatgaatgtaatgtttttgggaagaagcagttctagatgatgaccagatcagggattctgtcagagggtagagaactgaggtttactggaccactcaactgtagatatccatcattactttttgttttgtggctgaggtgttaggatggtttagttgtcttgtattacagtaggatttaaggttgaggggatgatattgtgggtggagagctggcttataaatcttactcactgggaataatttggactcctgtcaatgccactgataagaatagggtgatagagagtctggcaggctgtatggacagtgtgaatttcaaaagagcctcttgatttggaattgaaaatatccaagaaaattttccttgtcttcttgttcccagataagagggagagatgtgaggattagcacccttatttgagagggctttgagggatgtagtgccattcatggaaagttggagttcagttaaatgtggagagatcattttataaaatggctgaaggtatagaggagttaatcatcatataggggttctagagatagagggaaaatttttagatactgaattgtaaagttttaaattaatgtatttgtttttatacaatatattctactttcttactatatagcattttgctttttaaactttattgaaaaataattttagacacagaaaaatggcaaaaataatacaaagaattcctgtgtatattttacccagtttccccaaataatattttatcacatttgttttctgatgagttctttacctgtatttgtatataagtacattttttcttgaaacattttaaagtaaatgacagaaatgatgtttctttatatctaaatgtttcagtgtgtatttcccaaaaacaaagatgttgtcttatatagagtgcagttatcaaaatctgtagcattggtgcaatattaaacatatttcaccagttttcctactaatgtcacatagcaaaagaaaaaacatttttataaaaaattgagatctgatctgtgattaaacattacactcagttatcaagtctctttacctggaacagttctctaaatttttttttttttgtctttcattacattaatgttttagaaaggttcaggtcagttattttgtagctctgttttattatactttcactcactggttttaaaattcattggtggttcttgccttaaatagttataactttagtggttgtcaaatggtgatttcctaattccatttttttctatgtttattaattagaattctgtaaggaagagttttctcttgctccccatctattcatttatatcagtatgaattcatggattcatgttttattctatgagttataatctgatactgtcataatttattttgaggctcagattatcccagatttggccagcaggagcctgttccatctgctcttgcatccttgtaacatgttcttggcatttttgtactttcttgccatagagcattcagataatgtgaatatgtctgacttctagaatttaatttgggttgaagaagcactgtttacacttacacatggggcatcagtgggagaaaactgaccaacacaacagttactgccataatggcttactgctactgtgctgggtgcctaatgaacattttctcacagaattgcttgtggaaaggttgctagagtcctttattagccggattgttgaataaagcagttggaactttggtggcatgttgctcacaatgtgggtgtgttatccttactgtgggagttctaaagaataagtagttgccggcgcagcagctcatggttgtaatcccagcgccttgggaggccaacacaggggtattgcttgagcccaggagttcaaggccagcctgggtaacatagcaagacttcagctctacaaaaaaaatgtaataaattgaccagatatgatggtgcctgcttgtcccagatacttgggaggctgaggcgggaggattgcttgagcccagaagttagaggctgtagtgagctagattgtgcaactgcactccagcctgggcaacagagaaagaccttgccttaaaaaaaaaaaaaacccaaaaaccaaaaagctcccaaagaataggtagtattgctgtgaaaatagaataccattttagattatataaatgaatatacagtgtggctaataactagttacagcaaaagggcactatgaggaaaaatcttgtaacaagtgggaaagagaaaaaaaaaagcccttatgaatcattgtaacctctaaactgggtttcattagaaaatcatcaccttaaagtggatacatgctggtatttactctatgtattattagtgttaaattattgatggcaaccaacatcatatctgtgtttatgtacttgactttcttgtaaagacgaaaatgattatcagaggtttttgaatggttgtagaatctgtgatgatcttgtttatcatcatggagaaatctaacaaatatgagttttctaacttgtagaaacttattcctttaagcacagatggaaatctctttaacatgttaccttctgtcctacattaaaaacagaaagatatgttcctttctttatccctattctagggaacttggaaaaaatacagaagagtgaaaaagaaaaaagaaaatacaacttgtaagcaaccatgttacctatttcgtctattaacagtcatttaaaaacttaacatgtttgtcttatttaaaattggaataatatatgattctcacagacacacacagacacaactctgttacttctttaacatcttttcatgaacatttcctta

SEQ ID NO: 6309 - DNA, 6000 bp, Homo sapiens
gtcatgaagtctttgtccatgcctatgtcctgaatggtgttgcctagattttcttctagggtgtttatggttttaggtcttacatttaattatttaatccatctttagttaatttttgtataaggtgtaaggaagggttccggtttcagttttctgcatatggatagccagttttccgcatatggatagccagttttcccaacaccatttattaaacagggaatcctttccccatttcttgtttttgtcaggtttgtcaaagatcagatggttgtagatgtgtggtgttatttctgaggcctctgttctgttccattcgtctgtatatctgttttggtaccagtaccacaatattttggttactgtagccttgtagtatagtttgaaatcaggtagcgtgatgcctccagctttgttctttttgtttaggattgtcttggcagtacgggctcttttttggttccatataaaatttaaagtagctttttctaattctgtgaagaaagtcagtggtagcttgatggggatagcattgaatctataaattactttgtggagtatggccattttcacgatattgcttcttcctatccatgagcatggaatgttcttccatttgtttgtgtcctctgttatttccctgagcagtggtttgtagttctccttgaagaggtccttcacatcccttgtaagttggattcctgggtattttattctctttgtagcaattgtgaatgggagttcactcatgatttggctctttgtttgtctgttattggtgtacaggaaagcttgttattttttgcacattgattttgtatcctgagactttgctgaagttgcttatcagcttaaggagattttaggctgagatgatggggttttctaaatatacgatcatgtcatctgcaaacagggacaatttgacttcctctcttcctatctgagtaccctttattgctttctctttcctgattgccctggccagaacttcctatactatgttgaatgggagtggtgagagagggcatccttgtcttctgctggttttcaaaggcaatgcttccagcttttgcccattcagtatgatattggctgtgggtttgtcatcaatagatcttattattttgagatacatttcatcagtgcctagtttattgagagtttttagcatgaaggggtgttgaattttatcaaaggtcttttctgcatctattgagatgattactttttttttttttttttttgacaaagtcttgctctctctcacccaggctggagtgcaatggcacaatctcagctcactgcaacctctgcctcccaggttcaagtgatttttccacctcagcctcctgagcagctgggattacaggcacatgctatcatgctcggctaatttttgtacttttgtagagagggggtttcaccatgttggccaggctggtctcaaacccctgacctcaggtgatccacccaccttggcctcccaaagtgctgggattacaggtgtaagccaccacacctggccaattacttttatatattaagctaaatatacattaaagcttttatagtaatcactaaacaatgcaaataaagtgtaatttccaatttaatgcagcagaaaaattgaaatgtgaaaaaaggtgtcaatttaaaacaactcaagaaaggagaaaaactatatgtatacttattgagggatctggccagcagcccgcaatgcaacagggctctctctttgttcccaggcagatcggcaggttgagaaataatagacacacacaagatagtgaaagctggatccaggggggtcactgccttctggtcccatgatgccaacaatgcactggatataccagcatttattattaagtttagtgagggcgggggtaggttagtgagggatttagggtcatttgattatgaggtgagatggtcacatggggatgaagtaattctttaacataacatttgtatgtagaagtacagtacatttgtatgtagaagtacagtatacagagataagaatttacaatatagtgtgtgagtcagtaacttctaacagagccttagaacagaaacacggtatttccataacctatgattagcaagatattaatcagcagtaacaattgcaacaaaagctggttacaaacaatccgtggaaacaggacgtgaagctagacaactggttagaccagaaattctcagaagggagtatgctttaaccctaaagaggcctagaagagctgtggcaagatgagggcgtttatagccctatcttatccatatggacaggcgccccccatgagtccgtttataggctccccacaagggtcgcattccattcccagagctatgaacatctgcttttctgggataggaatcttggtgatgtgaaacctccctgactgcacgtccattcataggctctctgcagggggaagcacatcacgcgctgttggctcgttctggcagtccgacctggcattgtctttacacaatcctgcatgcaattttgtatttacaataatcaggagcatttcatcttttattccatagcaatagtttcagggggtctccctacatataatcaagaaaaaaactggacaaactaagtacaaaatagatgttagaatgagtcctaactttaagaataaatataacaaaaaagtaactatttttagagattaaagaatgtcactaaaagcattaaagatgggttaaataaatgaagagatataacgacgttcatgaacaggaagacttgattttataaagctatccattttcctcaaactgaataaatagctgcaaaacaattccagcaaacctcccaatctatatgtatgtgtatgtgtctaatttgataaactgattctaaaacatataagggctgggcacagtggctcatgcctgtaatcctagcactttgggaggcctaggcaggtggatcacctgaggtcaggagtttgagaccagcctggtcaacatggtgaaaccctgtctctactaaaatacaaaaattagcagggtgtggtggtgggcgcctatagtcctagctactccggaggctgaggcacaagaatcacttgaacctgggaggcggaggttgcagtcagctgagatcgcgccattgcactccagcctgggcaacagaatgagactttgtcttgaaataaataaaataaaataaaataaattatataagaaatagccaagagctaaaaaaaaaaaaaatccgaacattcttgaaaaagaagagcaagataagcaaggtaaaacactcaccaataagatttgagatatatttataaaattaaaggagttaagaaagtattgtactggcccaggaacagtcaagcagataaatggagcagagtaaagaatccaaaaacagatcatgtgaatattgatgcccaacatgtatgacagaggtaacattgcagatcaatagagaaacaagggactactcaataaaactggaaaagtgggtttccacattgcaaaataacataggtcccaaatcacaagacacagaaaaatcaatctggatgatttaaaaacttaaatacgtaagttaaaattttgaagttttttgaagtaaaggggaaatatttattttttttaggtagagatttctttttcttttctgtttttttttttttttttttcgagacaagatctcagctctgtcacctgggttggagtgtgtggcgcaatcatggctcactgaagccttgacctcacaggctcaaggcatcctcctcccacctcagcctcccaactggctgggactacaggcctgcaccacaacacccagctaatttttgtattttttatagagccagtgtctcaatatgttgcccagtctagtctcaaacccctggcctcaagtgatcctcccacctcggcctcccaaagtgctgggattacagctgggagccatcatgccaggcccaagatagggatttcttaatcaagatctcaaaccacaaatcgcttggtgaaacttgataaatttagctatcttaaaaccaagactctttctcaaatggccacataaagacaaaccacaaactgggggaagatacctgcaacataaataatccacaaaagattactatcttgagtatatagataactaaaaataaattataaaaaatcaaacaactcaatagataagtgagcaaaagttgcatatttcactgtagacaaaaacataaccaataaacacaaaaaaagatgctcaacctccttagtaatcagaaaatataaattagtaatcataatgtgacacctttatacccatcaggctggccaaaagaaaaaataataatcttgacaaccccacaataccaagtgttatgaagtggaacacgtaggacttacccactgccagtggaactctaaattgctataactacttagtcaaacaatttagcattatctataaagttaaagatgactgtttcctacaccctagcaaaattctgattgtaggatacgccctagagaaactctcactcacgtgcacaagaagaaatgcacaagaatgtttatagctacgccaatggttattacggagaaaacggaacagcacgaatgttcagtcagctccaggaacatgaataaatcatgttcgttaaattgcatttaatgaaatactatattcagctgtaatatttaatgaatgacagctacattcctgagcatggataaatccctcaaatacagtgttacatgaaaaaaataggttatgggagaatttctacaatatgattcaattatgtaaagattcaaaagcaagcgagactaaagcaactggtcaaataagctttaactgttactgtataatttgtactttgtaatatctggtagtcgcatggttcgttaagcttcaggctaacagaaaattaagcattaactatggtgccaagttaaaaaaaagtctgcgaaatcaaaacccttaaaattcgtctacgaaattttaataaatatccgtgtagaaaatcagaacgactctttcaggccatctttaaaatgtcattggtaaaccatacttgatcctaaattcctgtacttcctcaggccatccgagcatgaaacgctgtcacctacccacatccgctggctgtgacgcttgtcaaagtgttctctatcggctgcatgcctagaccaccaaagcgttctgaccggacagtgtcactggagaaggcggcgcgacatgtccagggcgcagatctgggctctggtgtctggtgtcggagggtttggagctctcgttgctgctaccacgtccaatgagtggaaagtgaccacgcgagcctcctcggtgataacagccacttgggtttaccagggtctgtggatgaactgcgcaggtaacgcgttgggttctttccattgccgaccgcattttactatcttcaaagtagcaggtaaatataatggctttgtttggggtggaggtaaaatgtacttttccccccgactgtgctgaagtagctgtctatggctggctgttaactctctgaagactgagtgcttaatcaaagtgccaagatttgcctaggaaggatggggtgtatgagtattggctgaaagaatgacatttatcttatttgacaaaggagatgtaagaataaccttacagggcttttggaatacccagtgtgactccaaagggaagagtggaagtgactggattgttttaaaagtcagtttcaatttgccttgagtcatggaggaatcttgatgggtcagcacccctatgtaggaaatgctctcattgatttaaacttgtctctccctctcttcctctctctctctctctctgtctctctctctctatatatatatacacccacaaacacacacacacacacacacagaggtatctatatgtgtgtgtgtatatatatatgcacacgtgtgtatatatatatgcacacatgtgtgtatatatacattcacatatataacccacacaggtat

SEQ ID NO: 6310 - DNA, 6000 bp, Homo sapiens
tggctaacaatcgccaggtgcgcatgctggctgacctcagcctggtgggctgctataacttgactttcatgaacgagagtgaaagaaacaccatcctgttgcagagtgcaaagaacaacctgaagaacatggccttctttgggctcactgagttccagaggaagacacagtttctctttgagagaacattcaacctcaagttcatctcccccttcacacagttcaacatcacgcgggcttctaacgtggagatcaacgagggtgcccgccaacgcattgaggatctaaacttcctggacatgcagctttacgagtatgcaaaagatctcttccagcagcgctaccaccacaccaagcagctagagcaccagagggaccgccagaagcggcgggaggagcggaggctgcagcgagagcacagggaccaccagtggcccaaagaagatggggctgcagaagggactgtcaccgaggactacaacagccaggtggtgagatggtgacctcctgccctctcctctctcaggagggggagggtgagcaggcacattgactttctgttgaggtaccttggagaagctgagccattctgaggacatctggctgtgtgtgcttgatttggacatcttcttccttctttgtcttcatttttatccagctggagattatccgtcttgttcttttttttcttgacattttgcaattggtgatattaagtagggtaggagtgcatcccatataggccattttagaaggccaaggagagccacaccgaaaaaggagacagttcctgtgatctcctttgcaggagcatagaatagtttgggtaccaggaacccacagaggcacacatgaaaagccaaattatggcttggatgttctgctgaaactggtctatgtcatactgtctcctgttatgagaatatcagttggtataaagagagagaaagagaaaaacatttcagcccttagatgaggtcttacaccaacccccacttggctgttggctgtcatcttgaactctatttgaatgtgacttaaatcacaagtaacgtgttttgttgttgcagttgttttgaaacaaaattatcctattattgaccattgctagagacccacatcctacaaaatcctgacaccataaccttaagccatgcctttccttccatcttttagggaacggggagtggatccaggacaggggaggttgtaacccctgagaaatgaacattggtaggagcatttaagagaaaacttgcttatttgctaatgcctaaaggggtctcactttaccaattgttactttcaatgtgaggaatgaatgataaattaagagaaaaaaatatcaggaaggtcaatatatgcctaacatttctaaactggccacataaccttagatttttaaaggaatatttcagagtttaatctttttggagaagttatgttctttaatcgggtactaccagtcttgaaattttgccaccacagaaagaaagatgtttttaaaagcttggcccaaagaataggaacttagctagcatgtatacaaaatatatttgaggttactaaatgaataaaaactcggaattaggccaggagacatggaataccattcatgggatggttatcacaggagtttagaaagactctgcctcccagcatcttgaatatctccagcctgttcactgttttcttcctacatgatctttacctgttgttagactgtggccacagccagtaaatcaggccagagtgtctcaaactggacaagaaatgtgctgcattgccgagttcttattttcaccttttcataatcccaactacaataacaagaattttattgactaataagggaatatgtatggaagaaggaagagaaagcctttgtctagcatttattaggaggatcagagtgagtgggaagtttcacaacggattgatctgatcaatcccttcaaggagctgaaggcaaaatgtgtaaaacccctaaatcagattgaaaagcctatttcattgatatccaacatgtttgatgtttaagctagctttacctaagccacttctcagcctccagaatactctctctggggttgtgagtcagtcagcccacaagcattcacagagtgcttacctgccccgagggaagtccagcagctccaccagatagagatctggagatgcttctctcactgtgcttggcttcatctggggtgcaagggaaggcattatcgggtggctcccttgctccaggaactgaacgaggcccttttcataccttaaatatattctgcacaacaaatgggtattgttagtctccatttcatagatgaaaatagtgaagcccacagaaaataagtagctcctccacaggttgtaagctaggtctagctgactgcaaaggtcaagttctctttactccgtcaccatatccatatggaataagggctcgtcctacctaaagcttcctgccaataatgcaagaagccagctgcaatttcccagaagcatttgtctctaacccatgtgggtagcccgaccatgacagcaccacgctaacagtgacccagagccatactgccttgggtcagtccagccccctccacatcactgagccatcaatgagctgagagatcaatgactttttaggcagctgtgttttttaagccatatacaagagtaagttaaaaggggccaagtaaatgttgcttgttatttggtagagattaggctcacaaaatatttctccatttccagtgatttgttcctaaggtagaagggaaggaggattgcagctgggattaatgttcgtctctctctctctctctctctagcttctcatctcattgttaggatctaatgttctgcctagaatagcaggactgcaaattatccttctgcctgcccctgtgacacacacacacacacacacacacacacacaaacaatccagtgttttgtcatgtggaaaatcaaaacaagttagaaagcattcagattgtttcttttaaactcactttaaaattttggcaaggaattcatgcataactgagacttggaggcagcccctgctcacttcacgctgttccttaggcacctcgggattggtatcaaaggcttccactgccttctgctgaaggcatgatgtatgcggctccacttgagaccaggtatcaggatgttcagagggagccagctctttatgttggccccaggccagtactaagcaaattaaaaagaccgacatgggcttcctccctcatatcatttcattctaaagcagcaagcttgtcatacccatggggtcctatgttgatagaaatggagaggtagggatacagtttattctccaaaaatggactgcccacttccatgctgagtgatgctcagggaagtgatgcccgcagaaggcgtctgggcctaaggatccatggaagtcaggagcattaaatcccaaaccaaatcaactccagatatatcagtgtcaaaagcccaagaaaagacaaaaaagaaaaaaacaatccccaggggttctatgaccctattgactcctacagttctttcccttctcttggcaatggaagctccagtacccagattggagattaggatgagacaactttgtgtatatgtgcacgtgtgtggtgtgtgtgtgttttattaaggactaagatacacacttatctattctgtctccttctagcttttaggcagcctactcttggaaactggaggaaactgccctgagaattattagaatgctaataatagtaattggtaacattaacaatcagtgttagacaacagtgaggcatatcatgtgtttttattaaaaatgataaagatgtgtttcttctcatctaaaggaggtaactttgtgataattagtttgattaaaagtttgaagtatgaggactccttgttatgcctttaaggtaatttttaaaaaaaatctgagtagagatagtactaatattggcaagaaggtccccaggatagacctagcaaggagataagaatagatcattaaaaaataaatataaatggattggatagaattcccattcagctgttttaacacagaaattcaaaatagtgacttaacatggaagctatttctctcttacttaaaggcaaactggttttacagctctggtgtgtgatgttaccagacgcctaggccctctcctgttgctctgtcatcctaatgtgctgcatccacctcatggaccaagatggctgccacagctcctgccatcacatttacatttaagatagtagagaggaagtggagggaagttgcacatattgcttccagtcacatctcatgggttaaaacctagacatttgccacatctagctgcaaagaaggctagggaatgtctttattattgattgtcatgtgccttgataagcataggaggttctgttattaaagaaacaatgtgaaataatgtggaaattaatactgataaagactatcagtatctgatacaaaagggaaccaaacgatatttaagtgctttttaatgtcacttacttcatcatatgttttgcgaaagataagactaaaattcatcactttgtgtagcatttaatggttttcagaacatttttgcatgtgctgtctcatttggtcctcattacattcttgtgtgctaaataggacctctattcattacaccacttgctagtttgggatggagagtcagatatgttgaaagatttcccaacgactctaatttatgagcaagaaagttgcttagagccccagccttttgacttcatagtctttccgactactttatgcagctcagcatcagtactgggattgggaactgcaagaatatgaaatgtaaatctttattgatttatatccttccttaccttttttgacatggaaaatgccaaagacactggtcaagtttactctcagctccctacctccagtgagggggcctcttattaggaatgaaatatccaagagatgggcggtgctgcaggggagaccaaaactcagaggaggcattcaaacacttctagcaggttgtctactccatccaactcaaaacctattcaatatgaaggccgagggaatgtgctcacaactccctattaagggaaatcaatataaacccgcccccaccaaccaaaaaaaaaaaaagaaagaaaactctccctttttaatgtcttcttccccaggctcctggtactttgtcagcaacatactgctttcattcttaaaggtttcattggctgttaaatgagtccctttgcatactcactggagagaggaaatgctttaagttgtcctaagataacatctgcacacagagagtttatctgattccttatcaaccatgatctctatctgaggtcctgtatagtgggatcatttagagatgggggttagggagagtaggagtaactctagagaaaattgtggctcctaaaggaggcagatctttccaaggtggaaaggtaatgaattaaatatatgacatgtaatactgaaaaaatagaaaaatgactaagatacagtctctgtcctctagaactagggcagcctggaaacatatggactataattattttagctatttaaaagaaatgaatgaagaggatcttgagacaggaccagagcattggaatggttgtagggactgaaagctgagttggaaggatcagatcaaagagaaagctgggttggacttacacaagaataccctgatctgatcgcagctgtgactccaaggttttcctttcccatagttgctgtgaccccattggtcaccagagcaactgcatgtcttcaggctgggtattagggctggctgggtctgatgattctacccattttgtgccatctgaggagcatgcgagggttctttctccaaggcactttcggccttccttcttctccccttccgccatctccactggacataagccaatgcctgctctcttctcaccacattcacctggacaaatctgaactaattc

SEQ ID NO: 6311 - DNA, 6000 bp, Homo sapiens
ttcagtgcctgtagcttttccaggcacagggtgtaagctgccaatgaatctactattctggagtctggaggacaatgtcccccttctcacagctccactaggcagtaccctggcggggactctgaatggggctccaacaccacatttcccctccacactgccctactaaaggtgctttgtgggggctccatccctgcagcaggcttctacctgggcacccaggttttctcatcctctgaaatctaggcagaggctgccaagcattcttcgctcttgaactctgtgtgcctgcaggcttaacaccacatggaagccaccaagacttacggcttgcattctgtaaatggcagcccaagctgtacctcagcctctttgagccatggctggagctggagtggcctgaatgctgggatcccaaggctgcacagggcagtggggccctgggtctgacctataaacccattcagtcctcctgggcctctgggcctgtggtgggaggggctgctgcaaaggtctctgaaatacctttgaagccttttccccgtagtcttggatattagcacttggctcccttttagttatgcagatatctgtagcatgcggttgccccacagcctgcttgaatttctctccagaaaaaactttttttttctttgccacatggttaggctgcaaattttctgaatgtttgtgctctgcttcctgtttaaatataaattccagctttaaatcatttatttgacccttcagctaagataggctgttagaagcagccaggttacctcttgaatactttgctgcttaaaaatttcttctaccatatatactaggttgtcactctttagtgcagagttccacagatccctagggcatgaatagaatgcaagtcaagctctttgctgagacgtaacacgtgtgacctttgcacaagttcccagtaaccttctcatttccatctcagacctcagcagcctgactttactgtccatatcactatcaatgttttggtcacaaccatttaaacagtctcttaagaagttccaaactttgcctcatcttcctatcttcttctgagccctccaaactctgcctgtttcccagttccaaaaccagttccacattttcaggtatctttataacaacaccccatcctcggcaccaattttctttgttaggctcttcttgcattgctataaagaaatacctgagactgggtaatttataaagaaaagaggtttaattggctcacgattctgcaggctgtacaagcatgcaccgacatcactctgcttctggggaggcctcaggaagcttttactcatggcaggagatgaagcaggagcaggcgtgtcatatggttacacaggagcaagagagagtgggggcaggtgccacactttacaaacaaccagatctcacaagaactcattatcaggaggacagcaccaagagagatggtgctaaaccattcattagaaattcaccctcatgatccagtcacctcccagcaagctccacctccaacactggagaatacaatttgacatgagatttagacaaggacatatattcaaacacatgcgttgtgtttccatctggattataaattctttgaaggcaagtgttcatgaatttgtattattttgtcatccaaaatgtctagtataggactttgtgggcattaaatacatgtattggctgattgagtttctcgtggtcttcaggatctgttgttgtaaatgttctttggttttcaaatatattgcaaattctactatttttttcctatttaataaattggcttctcctgagatcatcgttcctgctcctggaacacttttccaccctaaattttactttttaaatctttcttattgtttttgtttgccttctgttgctttacagtgagactaaggtctactctcaacttcaaagccctttttctggcttttaattgtgacagttttcaaaattcaaaaagttgaaagagtagtgtaatgatcacctttcactcacctagaccacctagaatcaacagttgtttacattttttcatacttgtcttatttgtgtgtatttatgttttataggggtgaatgtcatgacatctgtggcatactttcacatggttcagcttgaagctctttattgaactatataaactccccggcagtctcatttcctttcttccaatttttaacaattgttccactgacatattaggaggatctcattcttatgacacttttgaaatttctttgtcttgctgcaagagttgatatttagagttattgcaaatgtagcatatttacaaatatattgtaaatggctgtattctatattctgtgttaaggttgactttaattttaattgacttcacattcctcagcatgtgtgagatggtaattcttgaaatttcagatcctcacaatttagaaaaggaagaataaaagtgctgtgaaagctaagatgaactgaatattcaagctgtgtttgattactttgctgaacatcaaaaataggtccataatttagtgttgatatctatgatagactttcttacaaaagtagtgtggaaaggtgtcagaagagacaagaaggaagaaaagtagaggaataaaagcatcagaaataaaaagttacggtagcaacagttgagtttacctactttgtttctgcagtccagctttttaacttgtttcctcgtgttaaagaagcaaggaatccctagttcatgaggctactatcagaattgtgcgtgatagttattatcttccttttccctagactagtggccaggacaagtataatggataggcattaataaggttcagaaggctgactgtcttagtgtcctttaaaaacactggaatagcctagttgcactacttggatggatgggagacgagaggaaggaagagcctttcacagaaacccttatgctgataaacctttattcagactcaggaatggcagtttctttaagataatagattacagctgctatgtttattatttgttatagttattgtgtgccaattatggaccagcttctgcgtgtactgttttctattttattatgatatcattcagttcccacattcaaaattattacttgcccaagagcacttaataaaagtagacctaggatttgaagtgaacccagcattctgatgatacattctttctaaggagaattggaagctgcttcatcagatcaggaagggttgacaaataaggtacatttaatgggtattagatattagatgaaatgccaaacgtagatggataaaaactaataacatgtagataagaaaatgagggaggaaagggtgtgaaaaccccccgtgggctatgtactgaaatggaataagagtgatagtaattggtttaaatgacaccaagttttataaacagaagattaacatggtttctggaaaagaagttttcctggtctctagagttactggaagatttgctgtagttttagaaggagccaatgagtttgatttctaaagttttgacaacattgttttttaaaggttaaaatggaatttaaaggaagtgtggcttgggttggcttaagggctgagtgaggtggagtgagagaaatccatggggagtgctgacagtggagatttccaggactggtgcttgaggctaatttgggttttaaatttagaaaagagaatgcacatgaaatactttaatttgctagtggtacaaatctctgtatgtagcataatgtaaagctaatgaaaatatattttcagaagctctcttcaagttatatgagacagcaaaaagtaaattaatttgctcaaggacaaattgagaaagtatatctgaagagaaacagttaccatgtttttgagatgatgagctccaagctgtcagtttagaacataggaaggaaataaagaactgtccatgaagaatttaagcttctgggtagaaaggctaatgaaagtaacagtgttattctatacttacatgaaactttaacatgtaaatcttaaactttgctgtaattctctatgacatgccttttaagaaggatatgagaatagggcaaggtcctgagaagagcagctggcatgatcaaggagataggtgattcagaagattgagactcaaaggagataggagagagtgcagaaaatgagaataatgttttccctcaatcttagactcttagagccaaaagttgtcccatgaaacttcagagaggacatcataagctaagcaaaaatttgtattacttcatcaattgggtagaaatgggagaaacatttaccctaaatttatatgccctgagacagtgtcctaaaatttttcacatggcctcaggctttcaaactttatgccttgtgttcgaccctctgagatttgaattcaaataatagtgaaaaatacctggaaaacagtgctgaaggaagtactagaattctaatccagcttactgcttgtttttatagggccttcaggctaagaattatttttacatttttaagtggttggagaaaacaaatcaaaagaaggataatatttagggatgagtgaaaattacatgagaataaaatatcagtgccgtaagtgaaagttttattgggctacagccatgctcacttgtggatgtagtgtctacggctgcttttgcactacggcagtggcagagacccaatgtcctgtaaagcctaagacattactctctggccctttacaggaaaagtttgccagcctcttggatagactaataaaattagcgtcatttttccaggaaaagaaaagattgtagtggctagaggaaaaatgttaaatagatgaagaaacactgtatacagtcatgaaccgcataacgttttggtcaacgacagaccagtggccttataagatgataatggagctaaaaattcctattgcctagtgacatcatagccattgtaacatcacagtgtaattaccttatttttaaaaaatttagcatagcctaagtttacagtgtgtaagtctacagttgtgtacagtagtgtcctaggccttcacattcattcaccgctcactcacccagagcagcttccagccttgcaagttctattcatggtaagtgccctatgcaggtgtaacattttctccttttagactgcattttgattgtacctattctatgtttagatgtgtttagctacacaaataccattgtgttaacagttgcccacagtatttagtacaatcccatgttgtttaagtatgtgatggaccacaccatatatatacccccaggtgtgtagtaggctacaccatctagatttgtgtgggtatgctctgtgatagtcccacaacaaaatcccctaataacacgtttctccaaacacatccctgtcgttaagtgacacatggccgtaaagggtgctgagcatcatgctgttctttcccgtgctgttctttctgtttctggtctaacacagaggccgttagcctcctgggactatttacatttaattaaatacaacttaaaattcagttcttcagctacattgactgcattccaagtgcccaatagccacatgtggctggtggccaccatatttgaagaacatttccatcattgcttaaaactctgctggacatggctatgtaatagtaaatacggtactttatgccaggtgctgctcttgaatcttctcaaaaacttcttgaagtagggattattatcacttctgttctacagatcagaacgttgaggaacagggaagtgaagaaacttgcctagaatcacacaactagtgtcagaggcaggatttaaacccacacagcctagcttcagagtcttgcttcttaatcatttcgtgctgagaaaggttgagagtgaggaatacgcttaattgtagcaagagggacatggcttatgtgttgacagtgctgtacagattttgaaaaacaaaacatagaaaagttgtgtagagtataatagctgcattccttcctagaaggaaatcg

SEQ ID NO: 6312 - DNA, 6000 bp, Homo sapiens
ccggcgcacacgggaacacgccgtggcgccgagaccacctgcgttctgcaaaactttggaggaataaacgtgtcactagtcctcacgtggggcatatgttacttccagtggatggctttcttttaacctgttcctacggaaaagaaaagcatcacaggcctcagatgtatatgttatatatgtgcgatttgcacatatatgcccgtgctggcatctctgcgtatctgcatgcagttcacttctccgtcactgtccccaggaagggtggcagcctcatcctctgtttcctacttctcctcacctgggcgtttgcccattcagacgtgcaattgtgcaattccaagcccgcagttcttcagctcctgtgcttcccttattccttgaataaggctgggctacaagatctcagtggagttctgtgagcacgctggactcaggaaagtccgtcgcagggccctggtagagcggttactggagctcgctgtctgccgtggaagtgggcgtgtggctgaacgtgtggcttcaggattccagcggtgcctggtagaccttccagccgagggacctcagaccctctgcctcccgcgggtgcatggcccgtccctgagcctgtcgctgtctcagttctgggctcgggcccctcatgggagcggccctgctgggacagtgttttcccaagacgccccaagccctcgccctggcagctccatgacaccccatgcagactccaacaggggcttcgagcctcttcctgctggggtcccacggatggtgcaggcagaggcccgagcactcctggtggccccgtgtggcccacgtcgctcagtatctttcctcgccttgcagaggggtgtgaagcacaaggctccagtccaggccgcacagagcagcgatgggcccctcctgaaggacctcctacggcggccaaggcgcagttagctccacgctaggtaactgtgcggctgctggacgccgcccgtgtgctgtgactgtcagacccgtttttcctccaaagttgtgctgtgctgtgctgtctttgataacaaaggttcacggtgagaaagagcagccctctttacacacacatgcatttgctgtcccaggtaagtaacacgcctgagggcaagctgaccacacatggaacatgctgtgcacacacacgtgtgcacactcaccccacacgcacggcacacagcctgaccagacccagcatcgtcagacacaggctcacgatcctggtctttcgggggacacagcttcacttaaaaggcccatcaggaaggaccgtgctttgaaatcaaacgtggttattgcatggtttgtgtggaactggggcccaggcaggtgtgagtgcaggtcttctgtgtgccagccggagcacatagcttgtcgcctctccaacagacatggaggccatgaagacatctgctcctgccagcatccgccgctgccccctggtctaaaagtgggctgacctggggacggcccctcatcagacagatgcgtgctgccggcctcctgccgctccccttgctggtcagacccacagggcccgtgcacatccggggccccagtgggctgtcagaagccatgcaggccccatccgtatggtgacatcctaggcaacatgtcaaggggatgcaagctgggcacgtccagtactaaatcaacccggtccctgtggggtggggcctgccttccctggggcagtgagttcgccttttgttcaagggtctctgggtaccggtatggcgttcgagctcactgcacaggaagccagctacagggaggaagctcgtaggtttcccgtccatggcctgtatccctggggcccctgggttcttccctgggatggtgggacagggggacggtcactctgttggtactgaaaaggagaggccctcattcctagacagagacccctcgcctccatatggcttctctggtggggtggatcccgcccggcctgccctcaggacgagggtgtgtcctgagttgagtctagcagttcctgcaggaggcgatggtagtgagtgcatcccagagtggctcaggtcaccccaggcagccccgtgggtatccctgagactgaccatgtgtctcgttctctcagcagaatgggtgcgcacagcctcgggaccgcgactcagaattcacccctcttgcctctctgcagagcccaggctaccagagcacctgtccctcggccgcctggtacagctcccactctcagcaggtgacactcgcggcctggaaggagaaggtgtccacggagcccccacccatcctcggcggttcccatcaccactgcagttccatcccaagtcacagctgccctaggtcccgtgtgggaatgctcgtgtgatggatggtcctaagcctgtggagactgtgcacgtgcctcttcctggcccccagcaggcaaggaggggggtcacaggccttgccctcgagcatggcaccctggccgcctggacccagcactgtggttgttgagccacaccagtggcctctgggcattcggctcaacgcaggagggacattctgctggcccaccctgcgcgctgtcatgcagaggccattcccccaggcctgtgtcttcacccacctgccatcattggcctttgctgtcactgggagagaagagccgtccagggacccatggtggcccacatgtggatgccacatgctgctgtttcctgcttgcccggccaccacccatgccctccatagggtgaggtggagccatggtggtgcgtcctttactcaacaaccctccaatccggatgctgtgggaagggccgggtcactcggataccatcatccctgcggatgcaccgccgtaccctgctcatctgggagtggtttccctgcggttacgtccaagcccgcctgccctgtgtgttggggctggctgagtttcggtctccccatcaccggccgcctcgtggagaaggcagtgccacgtgggaggacaaggccacgccggcagcttccagccctgccgcagaagtgccaggatgtccatcagccactcgccagggcacggagccgtcagtccactgttacgggagaatgttgatttcgcgggtgcgagggccgggagacagatacttggctgtgatgagcagacatcctctgtccccgtggaggggtcaacaccaaggtggtgttcgtgcaccagaacctgtctcgggctgacgggggtggcacacaggacacgggtggatcccaacaggcagcaccgcacctctgcccgcctcccgcactgcagctccgcccgccgggctctgcgtccccacgtcccctcgtcccatccccacgtcccctcatcccgtcacctcgtccccacatccccttgccccgtcacctcgtcctcatgtccccttgtcctgtcacctcgtccccacgtcccctcgtctcctcatccccacgtcctctcgtccccttgtcccgtccccacataccctcgtccccatgtccccacgcagggctctccttcgtcttaggatctgtccagcgctgctctgggtgggttagcaaccccagggctgctgtgataggaagtccctgttgttctccgtactggcatttctatttctagaaataatatttgacatagccttaatggtccttaaagaagacatttcagtgtgagattcagacttcagacgctgaaactgctgcctttcaggaaagcaccaccaacgctggaggaggagccggccctcacgcccgccccgcgccacgctgtggaacggggctccggcaagtgaaacccagagggtgtttccgaggtgctcgacagtaggtatttttggaagctcagatttcaccatttgattgtataatcttttacctataaaatatttatttgaagtagagggtaaatcagcggtaagaacagtgaacacagtggttgggataaaataaggtgacaaacatcacaccaaagatgagggtagcgagcaactggcttgagcagacagaacggggaagactccactctgtcccgaggggccagccgcaggcgtccccagggccaccctgccctgaggtccttgtgtggccgccctggcttggcagccctgcccacgctgcccccgcaaacaatggtgtgtgcgtttttacagccctttttaggaacccaatatgggcataaatgtaacacctgtagcgggggcagattctctgtatgttcagttaacaaattatttgtaatgtatttttttagaaatcttaaaattgcctttgcactgaagtattttcatagctgtttatatctcttttattcatttatttaacatactgtctaattttaaaaataggtttttaaagctttcatttttaagtttatgaaattttggccactttacatttagattctggtgagagttttgactgaatgttccaatctctgatgaatgcgaattttcagatttgattttattctctacacacacctcttcttttcttggtatttctggtggcagtgattagttgaacagcacatttaaggcacgataatttgctacactttttctttacaatttgttgcaatttcatctgctttctatgtttcattgttaattgccatccttcagccttaaaaatagaagattctcacgtgaaggtttagtaagttgggtcccagctctgcctgtgtggagatagtcaccatgtacctctgacaacaagttttagtgtgaaagtcactaaacttttacacactcccaaacgtctttttaaaaattgcttgggaaattattaaatgaatgtgcctgatgatttgaaatagacaaggggcacgagataaaaaagaaaaggatgagaagatcctcagtgaatgacgttgcagggtcttcatgcaattttccacctcgcagtagttagtatttacttgccttaaactaactttgaagcaagtaatgtcaactttgagcactttgttgagttttgaaaaatcttatttgttgctgcacaggttaataaattatcaatttgtaattcagcatgttggtcagagacacggtcactgattcacacccagtccctgccacagaccgtctcagacacgcacagtgggcctgctgcatgattcacacccagtccctgccacagaccgtctcagacacgcacagtgggcctgctgcatgattcacacccagtccctgccacagaccgtctcagacacgcacagtgggcctgctgcatgcgtgttacctggcttttggctccacgctcactcatagccatgtccacatgggggcttgcacacaggatcactcacatatgtacatgtacccaccacaaacgtgcaagctcctgcacacatgcatgcacacaaacgtgtacacaagtgtgagctcctacacgcatacacacacacacgtgtacatgcaccaaagcatgtgtgacctacagacatgcagaacatgcacgtgtacacataccacagacacgcgtgtgcatgctcctacacaatacatatgcacatatcatgaacagcgtaagttcctacacacggacgtgtgatacacacatgcatgtacaggtaagcacacatgtacaagctcctacaggcttgctctcacacacgtgtatgcacagcagagagacgtatgagcttctactgcacacatgcacacacacacgcacacgtacattcactacaaacgtgcagcctcctgcacacgtgcacattcatgtgtacaccacaaatgagttcccagacgtgtaaacacacgtgcacacatcgtacacatgtgagctcccacacgtacacacagatgcacatggacacaccccaaacacgcacaggctcctacacacatgcacacacgtgtacaccacaaacgagctcccagacatgtaaacacacgtctcccacacgtgagctcccacacgtacacatgcacatgtacgcaccacaaacacatgcgcaggctcctgcaggcgtgaatacacacatgcacacacatatacacacatgtgccacaa

SEQ ID NO: 6313 - DNA, 6000 bp, Homo sapiens
aatttttgtatttttagtagagacgaggtttcaccatgttgggtaggctggtcttgaactcctgacttcatgatccacctgcctcagcttcccaccaaagtgctgggattacaggcgtgagccactgtgcccggcagcaccttttctttatggacatagattttggtatttcctttaccaaagggaagataggtgggactacttctggttatatgcttcgctttaggcttgaagaacagttgctgtaaagattttattttgtgaaagacccaaggttgaaatgagtcggattcattggaatccattacttttccagggaataggattttaaatgaaaagctaagcatcctctctttcaatatctgccctcacagtgtgcctgagttgcatttacacttagagtgacagatgagactcgggtgtgtgtgtggttggaaggctgtgctcacgcagtgtgagatcagcccctgggtggtgagtgctcactggactggcatgcacgaacttgtagtggcagagacaagtgaaagcatgtcatttctgcacggattccagtggtggcagataggtgtttggcgttagaacaggcagaaacacctgttttccaatctgtaatgaaagaactgtgtaataacgtgcaatttgtacaattaccagtgtctctaccgtagtgatcagattacatttgttgccaaacatcttgatcagggaagtggagtatgagtaagtcagagaggaaatatttagcagtgaccactgtccagctggaaagacctatagagcttccattctgtccctttgcttcaggatggggaagggaagccactccaccgatgtgtagtgctgtgaggacctttctgaaattgggcaaagagctcagcactttgagtccatgagaaataaaactgaccagacgttaagtagcaggtgaggaccacagtgaaagatcctgcagcctctcccatggatttctgcagatgggtgagttgtgccttcaaggcaccacgtcttacagagatcctctgagaaaggcggaacagcgtatgcctaggatgatgcagaaattgacatgtgccttcctgataagtgttctggaataaagcactaaatagcaatagactaggttggcaaactcaatcagatgggcttagagataacaattccagaatagtatccgaaagggacagggcaccaggtgaactggctgcgtaatccatgtgtctggttgttcattgaatttaagaaacacagtggaggctgggtgcagtggctgacacctataatcccagcaccttgggaggccaaggtgggtggatcacctgaggtcaggagttcaagaccagcctggccaaagtggcaaaaccccgtcgctactaaaaacagaaattagctgggtttggtggcacgtgcctgcagttccagctacttgggaggctgaggcaggagaattgcttgaacctgggaggtggaggttgcagtgagctgagatcacgccactgcaccccagcctggcgacagtgagactccgtctcaaaaaaaaaaaaagagaaacagtggaatcttgtaataaaagccatcactgctacagctgtggaaaatggaaatactcggtcgtattttctggacagtttttgatggtctccgtcttccctggaattgacaggcctcatgcattgtgcgtcagcagcaatgtttatggtgaaaaatggcaacgggaccgcgtgcataatggccaacttctctgctgccttctcagtgaactacgacaccaagagtggccctaaggtaggaaacaccagggcacttcatgcttcccttgtgtgtgtggaaagatgatttttaacatttcaaccaagtctttgaaaaatggccccatctgaacatggtgcttttcctatctgcatatctccttctggtgttgtcagtaacctgcgctgtcatgtgccatagccacaggcacagtaacaaacctgtatatgtgctgcacctcactgttcatcatgaacattttcctttttttttttttttttttttttgagacggagtctcgctctgtcacccaggctggagtgcagtggcgcgatctctgctcactgcaagctccgcctcctgggttcatgccattctcctgcctcagcctccccagtagctggggctacaggcgctcgccaccacgcacagctaatattttgtatttttagtagagatggggtttcactgtgttagccttgatggtctcagtctcctgacctcgtgatccacccgccttggcctcccaaagtgctgggattacaggtgtgagccaccgcgcccagcctatcatcaacatttttctagttttcttttttttttttgagatggaatcttggtttgtcgcccaggctggagtgcagtggtacgatctgagctcgccacaacctccgtctcctgggttcaagcagttctcctgccttagcctcctgagtagctgggactacaggtgcccaccaccacgcctggctgatttttgtatttttggtagagacggggtttcaccatgttggccagggtggtctcaaactcctgacctcaagtgatctgcctgccttggcctcccaaagtgttggaattacaggggtgagccacccctcccagctctagttttcttcgtgattgtcttttataatcataatgtaatactttattatgttaattcaccataatttgttacacactcccctattagtaattggtaagttgtcttgaatctttttcatgctctgtgaatgtggcttttttgatttagagagttatactgcaagaaatgtatataaatggttggttgacatgcaatgcaaacactgtactagtttgattaaaatgttccttagtggttttgttgaaatggctttgtgtttctttgggatgactaaagccttttggaataacaaaatattttaaaaatccaagacatagtaagatcttatctcttttttaaaaaaaaaaaaaaaagccagacatggtggagtgtgcctgtggtcccagctacttgggaggctgaggtgggaggattgcttgagcctgtgaggtcgaggctgcagtgagctatgatcttgccactgcactccagcctgggtgacagagcgagaccatctccaaaaaaaaaaaaaaaaaaaaaaaatccagtctcaaattataaatacttgtcaaagccttttttcttttttctgagacagagttgcactctgtcccccaggtggctggagtacagtgccaagatctcggctcactgtgtcttccacctcccaggtttgagtgagtctcgtgcctcagcctcctcagtaggtgggacatcaggtgcatgccaccatggccagctaattatttgtatttttagtagagacggggttttgctatgttggccaggctggtcttaaactactggcctcaagtgatctgcccaccttggcctcccaaagtgctgggattacaggtgtgagctaccgtacctggcctccaagcactttttttttttttttttttttttttgaggcagagttttgctcttgtcacccaggctggagtacaatggcgcgttcttggctcactgcaacctctgcctcttgggttcaagcaattcttctgcctcagcctcccaagtagctaggattacaggcatgcgcccagctaatttttgtatttttagtagagacagggattctccatgttggtcaggctggtctcaaactcctgacctcaggtgatcttcccacgtcggcctccccaagtgctgggattacaggcgtggcccagcgtacctggtctccaagcactttttatttaatttctacatcacttttttaatgtttggttttggtggttggattttttaaatattctattataaattatgtttcacaagtgaggtcacctatatgctgttatgcactttgttatttcacagaacatgtctttatcaccttgtgtagtttcgtgttgttttttggcccacgttagtatactgcttcactgtagttcatttgacctatctagtttactttgatgaacattaagtggttttccagttgctcgttttgcttatagtagtaaatttaaacatttctgctataaacaccttctttgtttaaagaaacattatttaaatgaacatttctatagtaaaaaagtagtgatagcttttctcaaatatatatctcaccctgaagctggtgtgaattgtttcaatttcaagacgctttaaattctgttataaattatattaacataaaatgaatttatggggttgttttgttttgtttggagacagagtcttgctctgttgcccaggctggagtgcagtggtgcagtcgtagttcactgcagcctcaaacctaggctcaagcaatcctcctgcctcagcctcctgagtagctgggacgacaggcagacaccaccatgtctgattagtttattttgtttttgtagagatggggtcttgctatgttgcccaggctggtcttgaactcctgggctcaagcaatccccccacctcagcctcccagagtgttagcattacaggtgtgagccaccatgcccagctgcaaatttttgattatatgaattattaagccaactttctcttacacctgaaatacttttcagtcttttactgacatgtaatactaacctttttttggtttatattaaaaatgagtacctcagtagtgatatcttagttggaaatgaagtataagtttatatcagacttacagaaaatctctttctttgaacttttaataacctgcatcccaattgggttacatttaattgtgtttattctagaacatgacctttgacctgccatcagatgccacagtggtgctcaaccgcagctcctgtggaaaagagaacacttctgaccccagtctcgtgattgcttttggaagaggacatacactcactctcaatttcacgagaaatgcaacacgttacagcgtccagctcatgagttttgtttataacttgtcagacacacaccttttccccaatgcgagctccaaaggtaagaaccaaaatgggccgattatgaagtgatagaaaattgggttggaggattgtctaaagttacttttacctaagaagtacaggctgggtgtggtggctcacacctgtaatcctagcactttgggaggctaaggcagacagatcacttgaggtcaggagtttgagaccagcctggccaacattgcgaaacactgtctctactaaaaatactaaaattagccaggtgtggtggcgggcacctgtaatcccagctactcgggaggctgaggcaggagaatcgcttgaacccaggaggcagaggttgcagtgagccgagatggtgccactgcactccagcctaggcgaccaagtgagactgtctctaaaaaataaaaaacacacagccaggcgcggtggctcacgcctgtaatcccagcactttgggaggccgaggcgggcagatcatgaggtcaggagttcgagaccagcctgatcaacatggtgaaaccccctctctactaaaaatacaaaaattagctgggcgtggtggcgcgcgcctgtagtcccagctactcaggaggttgaggcaagagaatcgcctgaacccagaaggcggaggttgcagtgagccgagatcacgccactgtgctccagcttgggcgacagggcgagactctgtctcaaaaaaaataaaaaacacataaagtaaactaagtactataagtagtttgcaattgtgattttttttttttaatctagaaatcaagactggaatctataactgacatcagggctaaaataaaaaacacataaactaagtactgcaagtagtttgcaattgtgattttttttttttttaatctagaaatcaagactgtggaatctataactgacatcagggcagatatagataaaaaatacagatgtgttagtggcacccaggtccacatgaacaacgtgaccgtaacgctccatgat

SEQ ID NO: 6314 - DNA, 6000 bp, Homo sapiens
ccctctctcttccccacactcgcccgacggtccctgtcactctcagttgtgctgcctttactagacagttttactgaactattggaaccggcgccactgccatggattgaagccacctcctgtctcttcaggttcccttcctgccagtgctccccatcctgagcatcttcgtgaacgtctatctcatgatgcagctggaccagggcacctgggtccggtttgctgtgtggatgctgataggtatgtgatgctgctgccagcacgtccaagatcctggcttcccctgggggtctcccttgtttcagatttcataacagaatgacgcacatccagtcagcagctttctcgaagataatgctgaatccctggtaggctgtgagtcctctcctccctgttagatactttttgtttccattgcttcttgtccaaactatttattcttttgggcaagaccttgatattaacaggaacaaggtgatgagtctgctgcagataaggtaccagttattttcaccccagacaggaaagtctggcctgtgcctcctggccccctggcctgcccagcaccaaattggtacgggcactaggcccaggcagggtggatgtcatgggctcctctgtgattgcgtcttctctgtggagggagagtgctttggagcctatgggagatgccactagggtggggagcttccacatgagatagatcaccaggggtgggtgcagcctgtagtcccacgcctctgggcatctcaccccaggggctggaggggaggatctcatttccttcccctcagcatctgagtcatagtgctgatagccaggaaagtggccctggccattgcccctcaggaccatgtccctacagcctcgcagccctgagtttgcatgctacgggcagatggctgctgcctcatctcccagggccctcgaggggtgcttttcctccaggaaatactttgcggcccactgtctgctggcagccgggtgggtcctcattccctgcaaagtccagcctgttagacagacgtctcctagagcctttctgagaaaaagctgctcacagctcactggccacttcctccaggcctggtgaaggcagaggggcgcctcttcccagcatccctgtcaaagtccctgtgtgcaggagcctgagctcctttcctgggctgtgggtggctgagtccttgctttaaggcctgttttcctgtgtcagccacacaaggtggccccagcccctgggcaggtggtaagaagcataggtcctggacccaccctggagtcccgtgtgcaggaacaggctgtggactcctatgtgaagtccattcctggggctcagtgtctcctgcagtctgacgctcagttatgtggagaaatgggcagtgggactgtccaggctgagagcctggagacctccagcacctgcgggaaaccccatctccatagtgcacattctcgatactctcgtggcctccgggggcatcagggggctaagctgaaggacccgatggcctctggtggccctggcccagctgctctgtctgctcaggaaacaccgcagcataaggccgtccagaggaacgtagggctttgccagatgtcgaagcagacagtggccttcgtgtggcagctgctccagatgtggaaaggtcacaggggccgctggctgcgggctcatgccaggcaggggcaggccgcctgagagggtttgctgtgggaccgccctgggctctgagccctgcctgcggtggtgcaaccggcggtctgttcacgcccgtctctgctgtcggcccgcaggcttcatcatctactttggctatggcctgtggcacagcgaggaggcgtccctggatgccgaccaagcaaggactcctgacggcaacttggaccagtgcaagtgacgcacagccccgccccccggaggtggcagcagccccgagggacgcccccagaggaccgggaggcaccccaccctccccaccagtgcaacagaaaccacctgcgtccacaccctcactgcagccaaaggtgcaattacttgacctgcagccccagcccaccctcggctctgcagccggttctccgggccctggtcacctccagacagctgcctggccggggccactaggctgcggctggccactgtgtctcctcacttctctgaacaaagcagttcctcccctaccagctcagccccgagctgccgcagcctcaggcagaacggaggtcaccttctctccttatcttgggaaccaggccttcctcccggggactgttctgggattgaaattgtgcatactccaaactttcgcagccatcttcccgctcagccccagacacccagcaatcaagccagatgagtaccacaaaacagtgtgtccccagcagctccccaccccagagccaaatgacagtagtgcacttaaaaaggaaaatcaggcctgttgtccttctccggttgcattcagatgggtcattagggccggaccctgcctgccccttggcttctcagggctttgctctgacaccatgacagctgcccggggctgagggcagctggctccactcaaatgaggaagaagggatcactcccattagggcctgctttgcttatgcatgtgtgtgcacatgcatgtaaaccagggaccttcagctcacggcctccaggcctgggccagttcttgctgctcctgccgtctcccccgactggctgtgtcctgagtaactggaacatgagacagtatctgcaggactggccccatggtggccgagtcagaagtctgtttcctgtgagtcgccaccgttcactcagtcttgccctcccatgctttggagccagtctggtggctcctgtaaggttctcaaggctggtggcagctcagtctggggtcaggacatgtcggggtcatgcgtttctggccctgacataagctgtctggcctctctgtgacatgatgaaattgaaatcaatccacagtccatgaaattgtgacactccaccagattaagttagggcataacattaacttggaaatggccatgtcatcacccctgcggctgtcctatagctgagatgcgtgggtcgcaggggaggtgatttctaggcatattgctgtcccttttgtgtatctgtcatccggatgcttcggaccccacgcctctgcaagtgggagagacccgagcatcctccccacccccatagctccagtgcacgccacccccgtcttgcctgggtcggggcctgcggccagcaccatttcacacacactccttgtagatgggagccagaggaaacctgaacgtgggtggagcgttccactgagtctacttcaggagacagaaggcccatgctgatgggggaggaggagggatgtgggcattttggacaccaggggaaatggaaatgctgctttcaaaacttagtttcctttccatttcttcctagtctggcctttgacacaaatctggtagaaagaagcctgataaattgagggcacttgtaccctccctgtgcccccagaaggttcttggagagaagtgcaagaatttgtgaacacggcggtggagggcgggtggatggccatgggctgagcctccgtatcaggcctgctcaccttgctgggagctttattctgatctcattttgaatgttccagagggagcatcataagagcccagagctccgatttccaaagagtgatattgacatttatggagattggtgttgtaacatattttgataaatactaacttattttgttggggttttggttgtctcttgtcttaggacctggtagttatttgcttgatttttttttccgttattttctacataggcaaagagaattcgagggatagacagtctccaagaaaagtgaagtggtgggagagaattgcttttttcttttttttcttttctctagtttttctttctggctgagatttccgtgcaagacagcacccaatagactatttagagttgacatttgacattttaatgggcgccatggctcattttgtagattgagaaggtgcgtctcccctgctccaagtctcatcatgacagcgtgctgacagctgggagtctgtggccttcctcacgcagaggccttaaagctggacacagaagcacgcctaggctgggcagggatgggacccatgccccctccttagaggacgggcttcctggttaggaaaggacacgtgggggtgccttgcataatagttcactggtcaccgtgcttttatgagtagtgtttttgtgcacttgccaggggttttctctctgtgtgagaggggagtgatttaagcaatggtgtctggagtaagccttacaattttaatagactttttcttatcatatccctcatttctttccctgaaataaaaatacacacaagcaaaaaaaaaatgatagtttcacatctcttagttcccttgcccaaacaagaatattcttagttccactggccaggattttcctacatagtcagaacttacacattactagaggcacacccaccaaggagtattgtgtctacttttatctgtgcaccagccacaaatacccacattggaaagacccatttgtgatgggtaaacatcccttcctgtctcccacaacccctgtgactgccctgcatgtgttcatgacctccgaaggcccaaattcatgaagcagcaaacccagcagatctccacccccctgcctcaggacctctgctgaagagggggatgaagtgggtctccagggaggcagtgggggccttgttggcagctggctcgggagccggcttacaggagggcagctctgcagttgggaggggcaccgtccggaggagaccaggcctctacacaccccccactctacttatcatccctgctcacacacccttgtccaaggctttatgcatcggatttatttttccaaatcaagaggacagtgatagatgcattttccccaggctgtctcagaaaggtcgctaaatgtatactgttgtcagaattgctgagatctccccccacttttggtttttgcagcagtaaaaactctttccactgtgacttattttctctctcaggcagccagccacctggtcccttgtgctgactctagcacagtggccaggatccaatacgagtccaggggtgaccgcaggatggtgggggcagcgggcttctccacctaccccagccaccaaggccctgacgcactgcctcctgcaccttcagcacatccctgtgcacagctggaagggtgcatggcccgctcacctttgttcagatgggtggaaacgctgatgataccagctcctccctgccgtgcccctgccacggagcaggcattgtgaactggctggtgtttgcagtcccacgtggcatggcctccagcccaacccacagtggagactggagacagggcaatgagtctggtggggggcacgtggacatgccccataggggccccacccagacttaacaggcaaggtcctgggcattgcgcgacgcaggactcaatgctaaagcaagcctgcctggctctgtgccagggcccctcttctgattcacacatcccatttttacacagacccttccttcttaataaaggctgacagttctgttggcagccaagaacccacaccatgaagacagggagtgaggggcctttgtgcccaactccagcacagctgcgttctggggtgtgtgagaggcatgttcgtgtctgtgcgctggtggtctcgtgagacagttccgaggacggggaaattgcagggtggtgggggcgtgaggcttatatgtggaactgatgcagagttcgcctgcagacggatctggatatacactatgtataattgttacgtgtaatttaaaatatatctgtttgccatcgtcatgagaagattatatgtaaggctctgaagggagagggagatgtacattctgccaggctcctggggaccttatccgagtcatgaaattgattactgttgatccagtggtgca

SEQ ID NO: 6315 - DNA, 6000 bp, Homo sapiens
gaaccaagaggtagatgtgagaatgattaaagtacattcagagatacatcagtttggactgtttttatggcaagtgaagaaaaccaaaaccaaactggcttaagtgaaaaaggaaatgtattcttttacatagcctgaaagattcacaggttgagtctgagttcagtgatggatggatccagcactcagttaatgcttggtttcttgacatcctccaaccctgcctccctgtgttggctttagtgttggacttcacatggttcccaggatgggagaagcagctccaggcctgccagtctctcaaaattgggattcattataaatgtgaagttccagcaaaagtcttaccatgtcctattgatggggtcgggtgcccatcttgggccattcatgggtattggggaatgcagtaaactcaggcttactcctgagtcacaagcccaccccaaccctactcccagagataggagtagggtcaacttcatcaggatcatggaatgtgggagtgaggaggtatgcaaagggaaattaaggtatagttaaccataggcagagtaaacagatgctgtgcttgaaaatcaagtgtccagtaaaggaagacaatgagtctactgatgccataggatcattttgagtaataataggtatacaccctggaagtttttattggaagcacattgcaaaggctgggacaaggaattgggctttatgaggagctgtaaataaattggaccttgtagaaattgacctgacagctgtgtgcagaatggaccggaaggtgggtgctccagagagaagcagatcacctctattgtactttctcatatctcaaaagccacaaagtttttgaagagagagaaacagatcacttccattatactttcccatctttcaaatgccacaaagttcgtagaatatctactgtgtgctgtgaactgtggaaaacacagagacgatgtccaacgcttgaccttggtcctccaaagagtctacaaagtggtagggaaaacagttaattaggatcaattatggtgcaggcaggatgaacaacgataatggtactagactgtcatggaaacagagaaggaagaagttcctaaaatactttctctaagcagagtgggcgggggcccagaaggagagacctgtagtcagagacaccctctggaacatctctgagagcaggtcagttgggaatcctcaatgctggtttgagaatattatgaggacctgaggggtggaaaactgcacctctgtcatcagactcaggtctccttaggaatttatgagcatcaaaattcagaatgtgtacacgggattgtgtacatggtggatcctatctgctctacaaagagaagtttctctgatcatcaatgtggagaagccactgtcttttggtctttgatactacctgtggccaatgtctttccctagctcatgctggctgggaacagagaagggttgagctgctgggagtgcagtgactttaatttatcatttcaataaacttcagagtaaatgggaagaaactgcttgggctttgcacaggagaagactgagttctgttcctagttagcaatgcacatgggcaagtctctccacatgcctaggtctcagtttccctgcctgtaaagacagaacattggacaaaaatgctttataaaccctcattcaactttaagagtctgcaaatccaatagagacaaccttgaaccactcatgacacatgcccatgaccgtgatatatttccaagaatacgtgtcatgaggatcctggggatccatgcacctgaaagctcaggagcatttgtgcatgaggtcttatctacaaaggtgaacatttagaaagctgctgagtagggaaatctgtaggagtggccagaactgactacttcaacagggacaggggaagggctttctaggcaggacaagtaaggaagagaatataattgttcttacaaggatttgcagaaatgaaggtgaaagtgagcgtgaggggaccatccaagcatgggctcaatattaagtgccaccagcttctgcataaactgaattacagtatttgtggagaatggtgtatttcagtggctgcagccaagagtgtgaagtattgagtggataatggggaaatgaagtaaatatcaagaaggtgccagtgaaactgaaggaaagagggaaagtactgagttaaattctaatgtgagctttgtgcacattgcttttctatgacctgcagttacttgattttaaaacagtgtcttacatcaaattgtaaacaaaagaacaccttacatttctgggagtcttggctgtttagaaagcatttgcacatccatttctacctacagcaactctgtgagagtggaaaggtgcttcttatttaaaagatgagaaacctgggtggatggtcagcaatggacagagtgggacgcaaaatccctgaccacaaacctgatgtgcttttcttccccacatctgactgcctctgttcacaagtcagaattcattccaatgccaatgacttttttctttctcaaggaggtagaaatagaaagattttttatggccaagaggtgtttatattacttttggattaactacaaaatgctttttatgtaagacagactaaatagacgtctgttttttttacaaacattcaactctacacaaacagaacatttcagtttgctttgaaagcaaaataccatgtgtcgtaactttacaatgttttaaataaagttaggaatttgggtttatgatactgaaaatatcataaaatcaataggtttaagactaagaactatatgaggatccttaaaaattcaacaagaatcaaaggtagacgtttcaacagaccagttactgaatcattgtattaacaatctagtgagacaagaagtgaattattgaagtttatcttcctcattggtttgtaaccctgttcattcagtgtgtggatagtttctgaagtagagcagttcagcctaacgaagccatttactgtactggttctacacactgcctctctttatctctttattacttcattttggaactttgattggcctattttagatctaagattgccctaatgctatactgcaattgtatgaggggcttagttttcactttgttctcagaaccaggctggctgtaaatttatctctgttctttgaaggagctaacagtaaattttcaagaggaaaaatggtggcatatatccctgtagaagaaaagtaatctcttaaaagcagaataacctccaggctacatcctttttaagggggattttcaaataagaacgccttcaacttttatatgtgttctatatttttcttcagacctcatacctactcttctgctttctgtgtaaggtttctctgtaatgaccccatttttcccccacacccattaaatctgtgatgaagtcatgctgtcccccattctgatgtcatgataacatccagagctacaggcagataacacatccggggaatcatcggaggtctcctcaggaaattgaggcatagagactgggagttggaatacctacaaaattgaatctcagtttcataaattaccaaatactatgatgaaaatgaactttgtaaagtgaaatccgtgggaaggtttccacttggtttaattgcattcaaagcagtgttcaatttcaggcattggtttcattaaaattaaaccaatccttcccagaaattcagccacactccctcatcaacagataataagatcatttagagtgaggaggtgctaaaagaacaggatgagccgtggctccgtttccatgtctgactgacaacttcatcacctttcatctgtattatgcagctaccctgagctgcatgttaattgaagttgcccagggagcatttttacacacaggactcaggcaccccttttcagagaaggtgggagtgtcctctggctagcctaggagccaccaagggtaaataaatgtgcagctagcaaaagtctggggaggagtggggaagggtcaaacccagtacaccatccatcctgcctgtgcctgcagatgtcatgaccaggtcccttaaagacctggatttgtggggagcagagggctccctgagagtggtgactgtcaacaaaaagtgtgccatgatggacaggtgaacttggccagtgtattttttctgacctcagaaagttctagaaagagtttgttttgccatttccctcgccctaattgtcctctttctcattttatgcccctgctagaccaccgctcttgataaggagaggcaggttttccgacgaagacgcaaccaggatgtgaggagccggtacaaggcgcagccagctcctcccgaactcaactcggaatcggaagactactccccaagctcctccgagactgttcgctcccctaactcgcccttttaataagacccttttactcaaagtcctagcttaaccctttgagactctgagatttttttcccccaaatttgtgtaaaacagtttcatctgatctatctagcgctcaatgcttgaatggcagaactgaaagtgttttcaggtatctttgtagcggtttccctttactgaataagatgacacgtggtgattgtgaagatggtaatttgctgctaatagagtcctcaaagggttaaggccaatttgcaatttttttttaaacttagaagcaatgaatgttttcatcagtcaagctaggatctgcagtatgtaatatagcacttgttaaccctctgagtgcatagaattttattgagaattcttgtttgggaatttttcaggcctttggatgtatacacacatgtttcttgattttactgcagatcaaggggtgttgttagatgctgaaatgtccagaaaagaaggacatttagaatgatatcttgtttgtccttttctgtgggtttagaacgtggcaggtttataacttcgacacacgcacggttctttcttcttcacaatcctattcagaaacagattttttttttcattagagatatgactgtcagttgcagtgagttctgcatcccaagtggagggaattgggtttgtggcaaagagcttgacccaggaaatagatggtgccccccaaattgtctccacatgaagatgtactgatgacgccccagaaatgctgcttccatatcagctgctgctagcgccagcgcagactctcagggagtcaccacagcttgtcttgtgcttggtgagtgagggtctctctactcagtgtcagacatctacaggaaagaaacaactggtggaaaagagcaataaattgcccggtgctctgcagggctggaatttcaaacagaaagagggaataagatcctgtgatttttctcacctgcttttccacgcactgtggtcatcactgtgcaatctacatctagtatgaaatccacacataggagagctggggcacaaggggactggaggcagttgctttgcaagatggctgaggagaaagcacactgggaacacaatccagaatgttctaacaataagttttcagtgaataaaccactggcaagacaattccatgtgcacctttaggttacctatatagtctcctaggaagatcaggatgaaagacctagatgatacccctgaggataaaacctccatcccctaaaatgattttttttaaataccactgtctttagctgtccaggaggtcagagtgttttttctgtctttgggccaagtcctgtctgagacctgtattttcactcttgttaccaaatctatctccctagtgcagtgtctccaggcctgagtttcttctggaacagattccattttagaatggggattcacaggttctgtgcatcaccacagtgctcagagaggattctcctggggtgtcttagaggcaggtgcccaactcaaatgtattcccaaggtttgctgggctctgggatccacgagacaaccagagagggatatctcatgaaatttgcatctggtggctgaacagtacct

SEQ ID NO: 6316 - DNA, 6000 bp, Homo sapiens
agaggaagggccctcatgtccacggattctctatttactaatttaaaaataattaaacctaaaaagtgttcatgtcaaagcctttaatatattttcattccttatcaacagttctaattggcatttacatccatttctaggtctacattatcttatgataaaataactttattttactatgaaataaatatgattaaagaaagaaacataaccaaaatccttggagagtaaaaaatatatacataggtcattttttccccttctctgctattataacacctcccgttatcagttctctaaaagaacaattccaaacctcagagtgtgctgagtcagtttatcagcttctctgccacttgcttactagtattttttggacaacaatcatacccacctctctgccacactcgcaggaaagatatttatttccacatatgccctcctggcttctgcacatctagattcctgttcccctctccaaaagctgttgctagcagtcacatttttttctgctgatcaaagaagaaaagcaaaatccatctctccttctctccctccctccttttctctctccctccctccttaaatccctttttcccacttaacttttggaaaaacaattgcgcaagaaattagaaaaccccaaagatagtattttcaaatttcaacaaaattataaaagatacacctttttatttgtgcctcaggatgcacagaaaataatggattttcatatggaaaaaaataaatttcaatgtttcaagaaaaaaaatgtagctggaccaatccttatcaagccttgaatgtgatccctttactcttgacaatcaaggactctaatctacaggtcttttacttctaactcattctaaaatacatttcaactcacagttccaaaattcagcctcttgaaccacttttcctgtacttaaacctcattacctatctcatttttcatgactttctttgctataaaggtcatggattaaattaccatatttcttccccttataaatcagcaggtattaattttcttaatgaatcatcaactatttatcaagagcctatcatgtaccaggcattgttttaggtgctgggctacagatattaacaagacaactaataagaagttgcactaataaatacacaacacaataccaaaaagtaatgtaactatcaacaatgacctatatgaaaaggaaattaagacaatcccatttgcaatatcatcaaacatagtaaaatactttggaatacatctaaccatggaggtgaaagatttgtacactgaaaactataaaacattgattaaagaagttaaagtaggcacaaataaatagaaagacatcctgtgttcatagattggatgaatcaatattgttaaaacatccatatgactcaaaataatctatagattcaatgaaacccctgtcaaaatctcaaagatgtttattacagaagtagaaaaaaaaagctctaaaattcatatggaactccgaaagaccccaaacatccaaagaaatcttgagcaaaaagaacaaagctggaggcattgcacttcctgacttcaatatgtattacaaagctactgtaaccaaaacagtatggcacgggcataaaagcatagaacagtgaaacaaaatagagaccccagaaataagcccacatatgtatggtcaactgattttctacagagtgccaagaatacaagggggaaggggtagtctttcaataaatagggttggcaaaactggatatccatctgcagaagaatgaaatgggatgcttatcttttaccaaacacaaaaattaaccaaaattgattaaagatttgatgtaaaatttggcaccatacaacacctagaagaaaatgtaaggaaaaaatgtctcaacatgggttttgacaaaaattgtttctttgataggacaccaaaagaacaggcaacaatagcaaaaatagtagtgagactataacaaattttttaaaacttctgcacagcaaagaaaataatcaacagagtgaaaaggcaaactatggaatgggaaaagatatttgcaaaccatatatctgataaagggttaatatccaaactatataaaggatttctgcaactcgagagcaaaaaataagtaatttggttagaacattggaaaaggaatcaagtagacatgtcccccaaaaggacatacaaatgccaacagataatataaaaacatgctcaatatcattaatcaccagggaaatgcaaattgaaaccacaaacaggtatcaactcacattggttagaatggctattgtccagaaaacaaaagataacaagtgttggtgaggttgtggagaaattagaatcctcatatactgttaataggatgtaaaattgtactgctgctatggaaaacagtatggcagtttctcaaaaaactaaaaatagaattaccatatgatacagcagtccaacttctggagataaagatagatagatagatagatagatagatagatagatagatagatagagatatgtgtgtgtgtgtgtgtgtgtgtgtgtgtgtgtatcaactgaaatcaggatcttgaagacatatctgcactgtcatattcactgcagcattattcacaataaccaagatatggaaacaacccaaatgtccatcacagatgaatgggtaaagaaaagatggcacatatatatatatatatatatatatatatatatatatatatatatgtatatatatatgtgtgtattttatgtatatatatatatatacacgtgtatatatatatatacacgtgtatatatatatatatatatacacgtgtatatatatatatatatatatatatataatagaatatcatttagcccttaaaaagaaggagatccctttgggagtctgaggcgggcagatgacctaaggtcaggagttcgagaccagcctgaccaacatggtgaaactccatctccactaaaaatacaaaaattagccaggcgtgatggtgggtgcctgtaatcccagctatttgggaggctgaggcaggagaatcacttgaacctgggagccggaggttgcagtgagctgagatcatgccattgcactccagcctgggtgacaagagtgaaactccatctcaaaaaataaaattaaatttaaaaataaaataaaatgaaggagatcttaccatttatgataacatgggtggatctgtaatacgttatggtaagtgggataagtcacagaaggacaaatactgcatattcctcttatacgtaagagatacctaaaataatcaaaggtactgaagtagacaatagaatgatagttaccaagggattggtgggagggggaaataggaagttgttgttcaatgtgtataaatttacagttatacaacatgagtgagttccagaaatctgctgaacaacccagtgactatagttaacaataagattttgtgaacttaaaaacttaaagagagtagatctcatgtgaagcgttgttaccataaaaacaaaacaatgggacacaaggaaaatttggaggtaatggatatgtttattacctggcttgtagtaatgataacgtgagtgtatgtatacacttgtccaaacccaccaaactgtgaacattaattacatgcagctttttggatactagctgtacctcaataaagctgagggggaaagtgatattactgtaaacaaataatttggcctcatgacgggtggagaaactattttagagagtgtactagggaagacttctccaaggagaagacttgagaaggaagtgaggaccctaataaagtgagagatcaatacaggcagacaactaggatagatcatttcagtctgggagaggtgggaatgggggaagaagttcagcaagaagaagtccctgagaaaaggttcagcatggcatgtttcaggatctgcaaagaggctggtataggtggacatgagtgggggcagggtaagaaaggaagttggagagcttaccagaatggatcatttagggccttgtaggcaatggcaatgagttagaaatgtatttggtgtttatcttccaaattatatttggaaatatatatgaactttattcagctactgggagacattggaaagtcttaagcaggggaatgacttgaattgacttagacttgcatttggtcttgctggctagggtgtggagaattgactatagacatagcaagagtgcagggagacatctcagaacatcctctgtctctcctggttatgcagacttggacatttctcggataaggcacgaacattccatcttagcagttcactgtctgccttttcctcatctatcttgcctaactcaaacctaagactctgccacctttctgctgcatcaacctaagctgctccctgctaatggagagcaatccatacacccacagctgacttacatttattggagtccatttaagggaggataccacccctcatattgtcttatgcccaatttctgcctctgaagaaagaataagtaaaaactaaaaggcagaaatgaaatccactggcagacagtctggtgccacaccctgggtctggtagttaaagatcgacccctgacctaaccggttatgttatctatagattccagacattgtatggaaaagcactgtgaaaattcctgtcctgttctgttctgatctgattaccagtgcatgcagcccccagttatgtacctgctgcttgctcaatcaatcacaaccctttcacgcagacccccttagagctgtgagcccttaaaagggataggaattgctcactcagagagctcagctcttgagacaggagtcttgccgatgcttctggccgaataaacctcttctttctttaattcggtatccgaggaattttgtctgcagcttgtcctgctacatttcctggttccctgactgggaagtgaggtgattggtggatggtcgaggcagctccttaggtgacttaagcctgccctgtggaacattccggtgggggactctggccagcccgagcaacgtggatcctgagagcactcccaggtaggcatttgccccggtgggacgccttgccagagcagtgtgtggcaggcccccgtggaggatcaacacagtggctgaacactgggaaggaactggtacttggagtctggacatctgaaacttggtaagactagtctttggaacttgcccactccatttgagtagaagcgtggcttgctcacccacggtgtgcctttattggcactttggttttggttttggttttgacttggtttgaattgcttgacaggactggtcttgggaacttgcctactccatttgagtggaagcatggcctgatcaccgatggtgtgcctgtaccggcactttggtttctgtttttgatttgacttggattgcttgatactttggttttgtctttgacttggcttgaatttctggatactctgattttggttttgatttttgtttggtgtaaactgtaaaagtgtgtgtgtgccctttttaccggttctttgttttgtggtgtgcatgtggtgtgagcgtggtgttttgcctcaaagaagcatgggtcaggcacaaataagcccaccctactaggaactatgttgaaaaatttcaaaaagggatttaagggagactatgacaccaggaaaacttagaactttatgtaaaatagactggccagcattagaggtaggttggccatcagaaggaagcctggaaaggtcccttgtttcaaaggtatggcacaaggtaacctgtaaagccagggcacccagaccagttcccgtacatagatgcttggttactgctggttttagatcccttcacagtggttgagagaattgcagcataagtggctggcagaggcagagagagagagagagagaggcagagaggagagagagagacagagaagagaaagacagagatatacaagtagttaagaaaaaaagtgtaccctattcctttaaaag

SEQ ID NO: 6317 - DNA, 6000 bp, Homo sapiens
tcgggggccacaggcaggagaaacgcagcagaacgtgccagttggctgcttataagaaggtcccactgaggggcctctgtgcaggaggggagacagtgggagcaggagccggggccctggctgagactccgcggcccccagtgcttcaggggaaactcaccggccccaagcagccactcactgcccagccctgcctgtggcccgagaagcagctgtccagtggtggttttctctaagcacggtccttggttactgagctctttagctgtgcagttccacagcgggcacacgtgttcatgacagggctctgtgcatgggacacgtgttcataaccacatcccatacatggggacgtggcagacacacatgtaacaaggacatcaggcacagaagagacagcagggctgggggtctgaccccgagagagagcaggtgcagcttgggggtgtctgctgggcccctagctgtggccacagtggtgtggcttggggtttgcacgagtctcagccccacctggcccctgggtgcatgtggctgcagaggtgcttggtcaaagatgcctgagcaggcaggagttgaactcggggggttaggagggcctctccccgcaggagtctgggctcttccatgcactgtgcacgcagcctccagagtcggggctgccgagggccacgcccccggatgtgtctgaccacaggccctctgctctgcaactcatctccaggatgggtgggcactttgggaatgccagtgaggaccctccccgtcccaccctttgtttagaagcccctgtattgctgtgggtctctgcgtcccacaagagccccgggaatgcttatgaacagctacacagcgggacctgcagaaggcataaagcagggggtgggaggggctggcgggtcacggtggggggcaccagtgtccgcccagagtgaccagaagaacttgcacgtggtggcgagcctctgactaactcagctctgtctcttgtttctctttccttcccatttccttccgtcttccgaccgctttgcctaaatcctcacaccttgttcacacacccctgtgtgcgtggccgctgacctcgggactaagactaagagccagtgcctttctgtcgagcagtcaaccatctttatgctttctcagacttccagcagcctgagtttctgatggaacaaggtgatgctcctctgccttccacgcacctgggatggtagacacggggcagcagggccatgcccatcaccagagccctgagtccacgtgctctgacgcagcgtccaccaggcgctgggtacagcagcctcacgtcgggaagtcccgccaccacttacaccttctcatgcacagactgatcatgggctgtgctttccatcagtcacagttaaccagggtttctccctcagcgtccgtgcagcctcagaacccacctgtgtgagggttcagacacagctgacagcggagagctggccacatgacccctcacacaggtgtcagaggggttcctaagcaggaaggtgtgagagtttgcaattcacaggtcatccaggctctgagctcacacacccttccctctgcagcctgtagagcgtggatcacaaggcctcctccctcacgcacccacttctgtgcccattctgcagctggaaagactgagggcagctaggataacacggtttgctcaggacccatgcacatttcagaaaaggggagccaggctgagccacacaactggagacaaagaggggacggaagtgtttggtgtcaaatgtttgaccaaattccctttttactgttttttaaatgaaaacctcattgtttttcaaaaaagccttctattaataatttgctttaaaaatgacgaccttggcctttctgggcaatgtagaggcgttcacacgccatttttctgcggtggtgtccatgataagagccgagattgcaggggcctgcacgccgtcctgaagtcgcgttctgtcttttagccgtgtgctcctgcaccaaataccgccttcacgcatgcctccaaatcagtgatgctttgaaaatgcatacttggtattactgttttaccaaatgcagcttagaaaaatgcccaaagcagaaaaaggcttcttttccctttaataacatcatcttctatatattttaaacaggatttttaactgacaaaatggtccttttttaagtccaagcaattaatcagaatcaacagttttctaatttagtgtcatcagaatttgttagattaaattgcagaatttcatctcaccatttctgtacttgaagacatttaggatgaaattattaggaacattttaatgactcataagaggtccttaagaaactgattaaatcatgccaactctgagctaaaaataagcattctaacgattcatgtagtttgttgagagctgatttgcttctgagcatgtacggaagctgagcccggctgcgtagagacagtggcacggagtttctcctgccccctgcgaggccttgggccccggcatgacccccacagacagggccggcgtccacacttgaacagaaagcgcctgcagccagcacatgcccggcgcacacgggaacacgccgtggcgccgagaccacctgcgttctgcaaaactttggaggaataaacgtgtcactagtcctcacgtggggcatatgttacttccagtggatggctttcttttaacctgttcctacggaaaagaaaagcatcacaggcctcagatgtatatgttatatatgtgcgatttgcacatatatgcccgtgctggcatctctgcgtatctgcatgcagttcacttctccgtcactgtccccaggaagggtggcagcctcatcctctgtttcctacttctcctcacctgggcgtttgcccattcagacgtgcaattgtgcaattccaagcccgcagttcttcagctcctgtgcttcccttattccttgaataaggctgggctacaagatctcagtggagttctgtgagcacgctggactcaggaaagtccgtcgcagggccctggtagagcggttactggagctcgctgtctgccgtggaagtgggcgtgtggctgaacgtgtggcttcaggattccagcggtgcctggtagaccttccagccgagggacctcagaccctctgcctcccgcgggtgcatggcccgtccctgagcctgtcgctgtctcagttctgggctcgggcccctcatgggagcggccctgctgggacagtgttttcccaagacgccccaagccctcgccctggcagctccatgacaccccatgcagactccaacaggggcttcgagcctcttcctgctggggtcccacggatggtgcaggcagaggcccgagcactcctggtggccccgtgtggcccacgtcgctcagtatctttcctcgccttgcagaggggtgtgaagcacaaggctccagtccaggccgcacagagcagcgatgggcccctcctgaaggacctcctacggcggccaaggcgcagttagctccacgctaggtaactgtgcggctgctggacgccgcccgtgtgctgtgactgtcagacccgtttttcctccaaagttgtgctgtgctgtgctgtctttgataacaaaggttcacggtgagaaagagcagccctctttacacacacatgcatttgctgtcccaggtaagtaacacgcctgagggcaagctgaccacacatggaacatgctgtgcacacacacgtgtgcacactcaccccacacgcacggcacacagcctgaccagacccagcatcgtcagacacaggctcacgatcctggtctttcgggggacacagcttcacttaaaaggcccatcaggaaggaccgtgctttgaaatcaaacgtggttattgcatggtttgtgtggaactggggcccaggcaggtgtgagtgcaggtcttctgtgtgccagccggagcacatagcttgtcgcctctccaacagacatggaggccatgaagacatctgctcctgccagcatccgccgctgccccctggtctaaaagtgggctgacctggggacggcccctcatcagacagatgcgtgctgccggcctcctgccgctccccttgctggtcagacccacagggcccgtgcacatccggggccccagtgggctgtcagaagccatgcaggccccatccgtatggtgacatcctaggcaacatgtcaaggggatgcaagctgggcacgtccagtactaaatcaacccggtccctgtggggtggggcctgccttccctggggcagtgagttcgccttttgttcaagggtctctgggtaccggtatggcgttcgagctcactgcacaggaagccagctacagggaggaagctcgtaggtttcccgtccatggcctgtatccctggggcccctgggttcttccctgggatggtgggacagggggacggtcactctgttggtactgaaaaggagaggccctcattcctagacagagacccctcgcctccatatggcttctctggtggggtggatcccgcccggcctgccctcaggacgagggtgtgtcctgagttgagtctagcagttcctgcaggaggcgatggtagtgagtgcatcccagagtggctcaggtcaccccaggcagccccgtgggtatccctgagactgaccatgtgtctcgttctctcagcagaatgggtgcgcacagcctcgggaccgcgactcagaattcacccctcttgcctctctgcagagcccaggctaccagagcacctgtccctcggccgcctggtacagctcccactctcagcaggtgacactcgcggcctggaaggagaaggtgtccacggagcccccacccatcctcggcggttcccatcaccactgcagttccatcccaagtcacagctgccctaggtcccgtgtgggaatgctcgtgtgatggatggtcctaagcctgtggagactgtgcacgtgcctcttcctggcccccagcaggcaaggaggggggtcacaggccttgccctcgagcatggcaccctggccgcctggacccagcactgtggttgttgagccacaccagtggcctctgggcattcggctcaacgcaggagggacattctgctggcccaccctgcgcgctgtcatgcagaggccattcccccaggcctgtgtcttcacccacctgccatcattggcctttgctgtcactgggagagaagagccgtccagggacccatggtggcccacatgtggatgccacatgctgctgtttcctgcttgcccggccaccacccatgccctccatagggtgaggtggagccatggtggtgcgtcctttactcaacaaccctccaatccggatgctgtgggaagggccgggtcactcggataccatcatccctgcggatgcaccgccgtaccctgctcatctgggagtggtttccctgcggttacgtccaagcccgcctgccctgtgtgttggggctggctgagtttcggtctccccatcaccggccgcctcgtggagaaggcagtgccacgtgggaggacaaggccacgccggcagcttccagccctgccgcagaagtgccaggatgtccatcagccactcgccagggcacggagccgtcagtccactgttacgggagaatgttgatttcgcgggtgcgagggccgggagacagatacttggctgtgatgagcagacatcctctgtccccgtggaggggtcaacaccaaggtggtgttcgtgcaccagaacctgtctcgggctgacgggggtggcacacaggacacgggtggatcccaacaggcagcaccgcacctctgcccgcctcccgcactgcagctccgcccgccgggctctgcgtccccacgtcccctcgtcccatccccacgtcccctcatcccgtcacctcgtccccacatccccttgccccgtcacctcgtcctcatgtccccttgtcctgtcacctcgtccccacgtcccctcgtct

SEQ ID NO: 6318 - DNA, 6000 bp, Homo sapiens
ggcggaggttgcagtgagcgaagatcatgctactggactccagcctgggtgacagagtgagactctgtttccatttaaaaaaaaaaaaaaaaaatatatatatatatatatatatatatatatatatatatatatatatatttacacacacacacacttataccttgcctctagaggttgtgattcagtgcctgggatggtatttttttcctttagttcttcataaatgattgtgcatcattggttaagtagaataaaaataccatatttaaaagaatcaagccaagaaaaactaagatgtgatttcttttttttttttttttttttttgagacggagtctcgctctgtcgcccaggctggagtgcagtggtgcgatctcggctcactgcaagctccgcctcccaggttcacgccattctcctgcctcagcctcccgagtaccagggattacaggcatgcgccaccatgcccggctaattttgtatttttagtggtgacagggtttctccatgtttggtcaggctggtctcaaacgcctaacctcaggtgatctgcccacctcggcctcccaaagtgctgggattacaggcggtagccaccacacccagcctaagatgtaatttcttaataaattgttttttcttctttttttgagacagtctctttatgttgtccagtctggagtgcagtggcacgatctcagctcactgcaacctccacctcccgggttcaagtgattcttctgcctcagcctcccgagtagctgagactacaggcatgcgccaccatgcccgtctaatttttgtatatattttttagtagagacggggtttcaccatgctagctaggctagtctcaaactcctgacctcaggtgatccgcctgcctcagcctcccaaagtgctgggattacaggctgggattacgggctgtgcccggcctaattttttaaaatgaagttttttactcatttcttcagatggtaatctttaatgtcaaaagcgagtatttcttaatttttatttattttaattcaaaaaaattaaattttttttttaagagacaaggtcttgctgtgttgaccagcctggtctggaactcctaacctcaagcagtcctccgcttcctcagcctcccaaagtgctgagattacaggcatgagccactgcacccagccagtgtttcctcattggaagcccgttccctcagtcatcaagtgctggagaggcagcgtggctcagaagtggcacgtcctgtgagtcagaagaccccttctagatctaggtctccgccactcactagctgtgtgacctgggtgggttagttgacctctctatgccttaatctccctatgaagagttgtcatgataactgggatgtgcttagagcagcacctggcacaaagtaagtgcattccaagtgcttgttaaatgagatagtttttgatgttttgtgtcagatactgaggattgaatgatgaacttgatgggaaccctctgtacctgtgcagatgtttaataacagctgacatcaaagctggcgtcagtgccgggcaccaaatgctcagctgctccgacagccctgaggccttggcactctctcctcctgctcgtgggtgcagagactggggattgggctctgctactggccatggttgcacagctagtaagtgctgcaagaacctccaagaactgagggctgtgactcagaagcacgcatgcttcccacagcggcacttgtttcagagaacagaatttctcccaagtgggggtattttgaagccacagttactcctttatgtgatccctggagaagtggtcctgttcgtgtctgagtacaggactgccggagatagcagtcaccagtaggccagggtgcccaccttggagatgctgccaacggctgtcctgttgggctgtgacacctgtcaggttactggaaacattgtaacttacttgaggttttttgtctttttttttttttgctacccagttgccactgttgtggaggtttttaaaaaaacttctgacccttatagcatacatacatttcctcctcaagctctgtgtgctgatgctcttattttcttctataccaaaattgccttctgagggtaagtttattttaataactcaaaattcctgggtctctccagagtaatacaggcatcttgtgctgccaaagcttactttaaatttatttaaatgatatttctttgttttcctctgaaagctgagacctggctgggcatggtggcttacacccataatcccagcactttgtgaggctgaggcaggtggatcacttgaggcgaggagttggagaccagcctggccaacatggcaaaaccctgtctaccccgtctctactaaaaatacaaaaagtagccagacatggtggtacaaacctgtagtcccagctactcaggaggctgaggcacgagaatcgcttgaacctgggaggtggagggctactgcactccagcctgggcaagagtgagactcagtctctaaaaaataaaaataaaaaagctgaaaccctcagcatatttactaagtgaaaaaaaaattgtataattgaaaaatgacttagtttgaaatatttcctaatgaagtgcttcgggtcagtgaaaagtgtttgaggaaacttataaaagggcagcttaataaaagccagcctatggctgctcccatgtgggcatccgggttgtcagtggtgactgtgggccctgtgactcctcacctgagggcggggtgggcagtctccctgtccacgctgagctccagtcaagtgttaagtctctggcgtctgctgtgtctgcctgtccgctgcttctgccttgctggcgtctgctgtagcttctgtacactcatctgatctttcacaagagtgagaatattttgtctgtttttagaaacctttactatgtcaaaaataagtggtagaatcttccctagattctctagattcattggaaatgccgttagtatgatcctgcctcagtgttgcagagtgtggcttgaaaaaccaagcaaagcagacagtagattggaggtttccttgcacgccctactttgtttcattgtcgtgtagcaccttttctttttctttttttttttttgagacagagttttgctcttgtcacccaggctggagggcagtggtgcaatctcgactcactgcaacctcggcctccctggttcaagtgattctcctgcctcagcctccctagtacctgggattacaggcgcctgccaccatgcccagataatttttgtatttttagtagagacgaggtttcaccatgttgggtaggctggtcttgaactcctgacttcatgatccacctgcctcagcttcccaccaaagtgctgggattacaggcgtgagccactgtgcccggcagcaccttttctttatggacatagattttggtatttcctttaccaaagggaagataggtgggactacttctggttatatgcttcgctttaggcttgaagaacagttgctgtaaagattttattttgtgaaagacccaaggttgaaatgagtcggattcattggaatccattacttttccagggaataggattttaaatgaaaagctaagcatcctctctttcaatatctgccctcacagtgtgcctgagttgcatttacacttagagtgacagatgagactcgggtgtgtgtgtggttggaaggctgtgctcacgcagtgtgagatcagcccctgggtggtgagtgctcactggactggcatgcacgaacttgtagtggcagagacaagtgaaagcatgtcatttctgcacggattccagtggtggcagataggtgtttggcgttagaacaggcagaaacacctgttttccaatctgtaatgaaagaactgtgtaataacgtgcaatttgtacaattaccagtgtctctaccgtagtgatcagattacatttgttgccaaacatcttgatcagggaagtggagtatgagtaagtcagagaggaaatatttagcagtgaccactgtccagctggaaagacctatagagcttccattctgtccctttgcttcaggatggggaagggaagccactccaccgatgtgtagtgctgtgaggacctttctgaaattgggcaaagagctcagcactttgagtccatgagaaataaaactgaccagacgttaagtagcaggtgaggaccacagtgaaagatcctgcagcctctcccatggatttctgcagatgggtgagttgtgccttcaaggcaccacgtcttacagagatcctctgagaaaggcggaacagcgtatgcctaggatgatgcagaaattgacatgtgccttcctgataagtgttctggaataaagcactaaatagcaatagactaggttggcaaactcaatcagatgggcttagagataacaattccagaatagtatccgaaagggacagggcaccaggtgaactggctgcgtaatccatgtgtctggttgttcattgaatttaagaaacacagtggaggctgggtgcagtggctgacacctataatcccagcaccttgggaggccaaggtgggtggatcacctgaggtcaggagttcaagaccagcctggccaaagtggcaaaaccccgtcgctactaaaaacagaaattagctgggtttggtggcacgtgcctgcagttccagctacttgggaggctgaggcaggagaattgcttgaacctgggaggtggaggttgcagtgagctgagatcacgccactgcaccccagcctggcgacagtgagactccgtctcaaaaaaaaaaaaagagaaacagtggaatcttgtaataaaagccatcactgctacagctgtggaaaatggaaatactcggtcgtattttctggacagtttttgatggtctccgtcttccctggaattgacaggcctcatgcattgtgcgtcagcagcaatgtttatggtgaaaaatggcaacgggaccgcgtgcataatggccaacttctctgctgccttctcagtgaactacgacaccaagagtggccctaaggtaggaaacaccagggcacttcatgcttcccttgtgtgtgtggaaagatgatttttaacatttcaaccaagtctttgaaaaatggccccatctgaacatggtgcttttcctatctgcatatctccttctggtgttgtcagtaacctgcgctgtcatgtgccatagccacaggcacagtaacaaacctgtatatgtgctgcacctcactgttcatcatgaacattttcctttttttttttttttttttttttgagacggagtctcgctctgtcacccaggctggagtgcagtggcgcgatctctgctcactgcaagctccgcctcctgggttcatgccattctcctgcctcagcctccccagtagctggggctacaggcgctcgccaccacgcacagctaatattttgtatttttagtagagatggggtttcactgtgttagccttgatggtctcagtctcctgacctcgtgatccacccgccttggcctcccaaagtgctgggattacaggtgtgagccaccgcgcccagcctatcatcaacatttttctagttttcttttttttttttgagatggaatcttggtttgtcgcccaggctggagtgcagtggtacgatctgagctcgccacaacctccgtctcctgggttcaagcagttctcctgccttagcctcctgagtagctgggactacaggtgcccaccaccacgcctggctgatttttgtatttttggtagagacggggtttcaccatgttggccagggtggtctcaaactcctgacctcaagtgatctgcctgccttggcctcccaaagtgttggaattacaggggtgagccacccctcccagctctagttttcttcgtgattgtcttttataatcataatgtaatactttattatgttaattcaccataatttgttacacactcccctattagtaatt

SEQ ID NO: 6319 - DNA, 6000 bp, Homo sapiens
accaggatggtcttgatctcctgacctcgtgatccgcccgcctcggcctcccaaagtgctgggattacaggcgtgagccaccgtgcccagctgcagcatttttttttcattcctaggaacagagtctgactcctagcttaaatggaaggaatcgatggtaaaacattggaggtggaggttgcagtgagctgagatggcgccgctgcactctagcctgggtggcagagcaactgagactctgtctcaaaaaaaaaaaaaaagaactaccatcagaaaggcggagaggatgagagtccctcaggacaggtgaaaggggcaggagaaggtcagaggcctgacacacccaacattgtcacaaaaaactgtaagagaggctgtgggagctatgagtcgggaacctgggtgcaaaccaatctcatcctcacagacacccttgagggtctgaattgcagcttgcaggttgatgtgagtatctgctgttgccgggagaggaggaggggccttcagagcacatgagctttggaaaggcccggctgtgtgctgctctccggagggtgctggaggaggtgtgacagtggaccctcaggtctccccagaggctcctgtgccaccatctccccccgggcagcgcagggcactctccagtgcgttccgtgatgagctctccgtcactgtcctccgccctcagcaggaaagactttggtatttagtacgcattcagggaaggagagtgtgggtttgcgtttgtaattcaggtagaaggacgagggcattttatccacacttatttctcaagttccagttttttaaactggtggttagacctgatgatgttttatttgtgtttccagcttcttgtgaccactctacagaaacagggtgggaaatgaatgtgccacatggatcacaggtgaaaaacaattgtcaaagcagcgtaggttacactttttctgtgcgtcgtgtggccatctagactagaatttggacaagactggccggttttgcacatttaacttttgcctgtttaaccctggtctgtaacattttataaaggaaccgtgaagctgcttttttttttttttttttgagacagggtctcccaggctggagtgcagtggcacaataactgctcactgcagcctcagcctcccaggctccagtgaccctccctagtcagccttctgagtagctaggactaaggcgcatgccaccatgcctggctcattttttaaaaaaactttgtggagatgggggtctccctatgttgcccaggctggccttgaactcctgggctcaagcagtcctccttccttggcctctcaaagccctggaattacaggcatgagccactgcgcccagcaagtgaagctgttttggaaaggactggtcaacctgcagcttcgccaagggcagtgagcaagggtccctgagcacatcccaggttgggacggctcccagtggccgtcagtgcctctcacttcagagtttggtgtggttactgcagctcctctctgccatcttgtgctctgtccagaaggggcttttacaccggggtgcgggggcactcctgtgtgtgtctcagaacccgttggggtgcagtcataggcgacgttgcctgtctctttcctgccctgagtagatgggatatgaaggtgggaattggccactgaatgttgagatggaagcggaagcagcaggtgactgatggagttatgagtggcagattccctgcagggttgcccaccctggatatgtggggctcacgcgtggtgactcagcctagcagagatgtggaaaggatcgaattgggtggaaattatataaatattattcttgagtatccacagaaacaaggtggtaaaagaaagaacctgatttcaaggttgatggtgtgttagtgagagtgttggccacagaagactcggtagagctctacctagggttcagtctgtcttgactttgaatataaatttgtgttgtgaacatcttggtgggtgaattgctgaaggacagagtcacattcagactgctgggcattccccaggggtgccatgtgcccccccacccccacggattccctgaactgtgccctcttgtctggggatttcagacgcacccacactcactgccttctccctcgtgaggatgcttgcccatcccccacagccccctccccaaatgaagacccaacacagctggctagccttgcccgcctttgagtctctgctcacacgtggggtcctcatggagactgcctgacccctgtcctgccagagggcctccttggctgctctgcgtcccacctggccggtctgtgtgtgctgcagaccctctgtttccctctgggtagtgtttccagcacgatcctggcgctcacccgacagctcagggagcagtgtctgagtcgtcaccatttcccatggggtgaggtggccggccacgcagcacagcttcctgcgtccactccttcgtgacagcgttcaaggctttctcaccctcactttaggaagagggtggcacagtggcccctgtccagccacggggcttggggtgtggtgggcggtgcctgctgcccaggcagaaccgtcctgggtagtgggaggtggaggctgagggtgccccacgggcctgtgcctaccgccctgagccgtctgcaggacccagctctttcctgcgcgtctagaaaggcattagcgagagccaccttgggagactgagaaaatagtcaccaaggacgccagagtccacagatgtagttttgtttctgagtttggatcttactgtaactgctgatggttatgagaaacccagacctgaatctccctccactgcacctgcagagacacgctgtgaacaagacaggccttccccaaccacagcgccccctgcgccacccagcccctcgccctcacccgtgcccaagagcccctctgtggacaagtacaacgtgagcggcaccaacgggacctgcctgctggccagcatggggctgcagctgaacctcacctatgagaggaaggacaacacggtagggctggggcctcacctgggagagggggacggcacggtagggctggagcctctgctccctgtgcactgagaacacgcgtctctgcacgtcatgctgttaagtcaggatgggagcttagcttgcaggacgtgaccctagaggacaagagctggcgtctgtgtcagtgagtccattttgtaggatcacagccgtcctgctggttccatcatccaaggctggtgtcccagcatggcctattgggcagtgtggcccacagagcctacaacttggcccctgatagaacctaagttttctttacatatttatcatggaaacatttaagtgttacatttttatagttttcttttgaaatagtttttctcccctagtagtgacaggctgtggggttgtgggggtcgacttgcgtgccgtggggtgagtttgcagggctgactgctgcagggggaggtggtgctgctggttgccctccacgcggggacgctgcactccaagagcagctgtcacggggtcagggagagtcatcttgggatcccgaaatctgtactagtgtggtctttcagtgttttccttctggttttggttaaaacaaatgtggccttgaattcacggtttcaggactgtttgtcttttcgagagtgtggaggacctgagctagggtggtgacttgcttgcttgtcttatgcagacggtgacaaggcttctcaacatcaaccccaacaagacctcggccagcgggagctgcggcgcccacctggtgactctggagctgcacagcgagggcaccaccgtcctgctcttccagttcgggatggtgaggctggggcggcacctctctgggggcgcccactgtgtctccaccacatctttttgtgccctgggtctgctcatgggaggcagcgttaggaaggaggcggcctcacttttttctgccttccctttatcctgggctttttagttccttggttcccctcccccctttccattccattcatagatgcagcagatgatgtgggcggggctgctgtgcccacagttggagtggctgcaggggagggcatgcaggccgtgcggccttctggcttcagatgctgctgccctgtggttccgtggtggcatttctgcctgggaggactcctgtgcagttagcaacataagacatgaagcatataattgtcacttgtcagtctttttaaatcgctgtgcaaatgaattaacagttcagtttcttataattttagctttccaaatcatgctttcctgtgctgtgatagctcctgcagtccccgttttccagagactgactctcaagaggtctggaaggaccagcctgggcagcacagggaggctccatttctgcaaataataaaacgagttagctgggcgtagtggcgcacacctgtggtcccagctacttgggaggctgaggtgggaggatcacttgagcccaggagttaaggttgcgatgagccgtgatcactccactgcactccagcctgggtgacagagcaagactctcagagaagggtctggaaggaactaaccaaaattttcattccccagagatacacaacgccttttatagacaagatcttttgcagttttgttctaatactagaaatgtaggaagtcaggtttattacccaatgaccattcacgtttgatgataaatgtgtgaatctactggggttaaagatcatctttctatgaatctgctccgtgattaaagatcatttttctttttaagaatgcaagttctagccggtttttcctacaaggaatccagttgaatacaattcttcctgacgccagaggtgagaacccacaatctctgcgagccccgcccccgcccgcgcgcccagggtattctggagccactagacctctgtgtgtgttgcagaccctgcctttaaagctgccaacggctccctgcgagcgctgcaggccacagtcggcaattcctacaagtgcaacgcggaggagcacgtccgtgtcacgaaggcgttttcagtcaatatattcaaagtgtgggtccaggctttcaaggtggaaggtggccagtttggctctggtgagtgtcaccgagggcagctgtcgcggggtgtggaggacgtgcttcagactccgcctgtggacgtttagtcgcttccgtgtgggctggggcgacgcccctgttcctctgcaaggagctgtttcttcttgccggtctgagattctagaggtaactccccctgctttagagaggcccagcgtgtctctcagctgggagcccctggtaccatttgagagtaagggaatcattttaagaaacagtggtggcgcttctcccatgaacgttgaatacaacactgtcatctgatgtgcacagaggccctggacgcagcacagctgtccggccacagcccctgattccagacgggggagagacgtgtgtggtttcctcgccgtgcagagagcaccagtctctgcagcggcttccccaagtgacaattccagctagagctggaaccttccgccagggttcctctttgccttttggctgatgtgggggagtggtggggagagaggcctgtttgcaggcccctgtgtgagcagagccctgacaccatccgtctgtcttggcagtggaggagtgtctgctggacgagaacagcatgctgatccccatcgctgtgggtggtgccctggcggggctggtcctcatcgtcctcatcgcctacctcgtcggcaggaagaggagtcacgcaggctaccagactatctagcctggtgcacgcaggcacagcagctgcaggggcctctgttcctttctctgggcttagggtcctgtcgaaggggaggcacactttctggcaaacgtttctcaaatctgcttcatccaatgtgaagttcatcttgcagcatttactatgcacaacagagtaactatcgaaatgacggtgttaattttgctaactgggttaaatattttg

SEQ ID NO: 6320 - DNA, 6000 bp, Homo sapiens
cactcagctaggaatttggtagatttaatagttttgcttagtaatttggactctttggactctttgcccttctcactccattgacttgccccgaagtattaagtgcagaattctgacacccagctggggtttagcatttgcctggtatcttagtttgggctcctgtcacaaaatgccatagtttattaacaacacaattttatttcagatagttctggaacatggaattctgagatcaggatgtcgacatggccaagttctagtgaggggcttcttccaggttacagactgtatcggcttttcttcacatggaggaaagaggacaaaaaaagctgcctgggattcttttcataagagcaccaattcccttacaagggctccaccctcatgagctaatcaccttccaaaggccctacctcctgattccatcacttagggcttaagatttcaaccttgaattttgcagacacaaacattcagtccataacacagagactgagaatattcgggcagggaagtaacagcaacagaaaaatagaaggtatgactaaatttgaaaatgcttcaaatcgctgcagtggtcgtacttaaaatttccgggtgacagtgtcccataggtgcaggaagagtttgcctctttctcacagttagaggtgtaggaggttagacatgtgcaactaactatggagacaacagttgtcactcagaacccaggtgctgtagctcaggtggtttggatgggaggcaggcaaaggcttctgtattgggacagatgagcaaggcaagtacgctctttgcctctagctgcagaaaccaactgacctggccttggaggaacccgtgggtgatttacaatatccaagaggtatgggatatgaaaaacccaggtactgatgttgaggtgaagtgaaggtgtgcttcaatgcttagtcgggagatggcaagaggaatttagagggcagtctggttctaggtctctgggcagattccatctagtagggtccagagataaacctgaagtttggtgtctcctgagtccattcaccccttgtgatggtggtggggaaaggcttctgggcactgttatggctcattagtccaaactttctctgtggagggtgtaaagcttctctttttccccccaaattagtacatgctacctttcaacacttcagttgttgcctttctgcatttgcgtagaagtttgccctgttttccattagttgccatttttactagtttggttctgcattttgtcaacaggaatgattttgctgcagattgaaaacataagtatttggctgaaaattctgtaattgggggttttgatcttctaaaccacaataacatggcaaaatttaggtagttcttgatataggataggcttagggagtgagaatgttgatttggtgttcaggtcaggctgaggaataaccttaagaactcgaatccaagtatgagttgctagagtgggctacatgagattgtaggtacaagggcataatcatgaccctggagagaatttgagttgcctatgttctttaacttgtacaatttctcttgcttggaaatcactcccttttcttcaacactaatttttaaaaaaataagtattttctccaatagttatttaagaatttccttcacaattcttattaaatcaatccactcattcatgcatgcatgcattcatttattaaatatattcctcagtgtacaaacgtttattagacaccaaatgccaagcactgggctaggtgctggagattgaaaaccaatgaagccatggtctccatccctaagaagctcagcacctggcaaattcttcacacttcaacccatcttgggtctctggagtctatccagtcatttctcagtattcatttaactggttttgtgttcaatttgtgtttattcctagtatattccctgaagtggcctgccttccgtaagtgactaggcattttcattagaaaaaattatgcattcttctttccttatcatcatagggcctgatgttctgcacagagtaggctctaacacacactgttaactgagggaccactttccagggtaaataaatggggtcagctgattattacttatatacacgattgttgatattgctaatagaaatttgagggttgttgacgatgtagtcaactgatatgaaaagcctctattaccaatctgtagaccaaacacagcctctgttttcctcatatacaccagataccccatagataccctcctgcaaaaatgcagcagtatgtttgatttttaatgacaggaggattaaattaaagttatgtctacacggatgtcttccttgtgtgttgcaactgttcaagaagtacggtttggggaggtcccctaatgaagtgcataaatagtaactttctttcaaactgtcagtgaagattgctgtattactcatgtgaatttcggtgaccccttactctagaaggagcccagggtagaacacatttttacaaataatacactttgctttgcagctctgataattttgttcctgtctttgagtctgtcatacaaccaggaggctgcttgtttcttaggacaaaggtatttgcagggaaactgatcaaactatttttattaataatctcattattattaataatctcattacggaggcatcaccaatgcttttgtgcatttgagggctaccaaatagattaaagttttattctggaaactctggagccatacaagaacaaagaagcttatgagcacagtgggtggtggttcttccctggctaaggcacatttgtgcttgggagaactgctgtcccatttctgcagtattgccacccctctggtaaggggtcttctaatgaattggccataggagaccttaaaggtagtcatgactacaggctataccactgttaatgagattttctttctgacagggcaccaacatgctccttgaaaaaaggtacaaggaaggctcattacagccacatgcagaggctactagcaaatgagaacagatttgccatttgttttggtgggaatcgggaggaagaggggaattgtgctgggaggtagagacacattcttctccttatgtccatattcattgcattcaatcttagaataatggattcagtctcccagttttcattctcacacattctgtatgcattccctgccttggactggggatctaagtggttagaacatttgaccaaagaggccaaggctgaactgcttcccacagagaacaatgaactttacagcccacatttctccctatctgttcttcttcactctctatccatccatttgtggttttcctgtctccccttccccctccccaccaccccagtttctgaatagtgtaccaggggtttaagaccctgtttctcacattagcactgtgcttattctgagagtttgtgtggagcttctggggtggggtggagtggggcatgaaccttctctccttgttttgaacccagcaatcttacatattgatctagtctttaggaaattaaacaaacaatgaaaaagctgacatttttatggcacgtcaaaagtcataagcaacttcccatacaatatttcatttaattcaaacaatttaggaattgttacaaccctagaggggctaagtgacatgctcaaggccaccgactcattgtgacacagcttttttgtttgtttttgttcttttgagacagccttactctgtcacccatgctgcagtgcagtggtgtgaacatggctcactacagccgcaacctcccaggctcaggtgatcctcccacctcagcttcccaagtagctgggaccacaggtgcataccgccacacttggctatttttttcattttttgtagagacagggtctcaccacattgcccaggatggtctccaactcttgagctcaagccatcctcccaccttggcctcccaaagtgctgggattacaggtgcgagccagcatccccggcccagagctgggtcttaataccgagactaacacctttttctttctccagggaagaaggcagaggtcacaaaggtgtgtgaaatgttgagcagggcaaatggatcctggagcccagggtcagagctgctgagcaagagaaaatgcatcttatttctcagttttatgaagaataagcttgagatcttgaatgcctggctggctcacaagaagctcaggggcaatagaggtcaaagttttctggagagagaaactgctcctggggtcctccttgactgggtttgaggcagtgccctggcctgggagagcgggcactgggtcatcgggatccctttgtttatttgggtgttttctcttccctatatgaagcatacagtggtgagtacttgatagggcagagtcctacctggttggccagggaacaaaacgttgctggtctttccttcagagtggggttgttagacaactttgtctagaaacagtcactgtaaggaacaggtcaacgacaacttgggcaataggaactgaagagggaagctcagtcgctcctggaggagagccacagtccctaaggcaagttccctaactgtctgtgaaaagtagtattcagtaaaatgggggagagcactagaagtgctgtgaggcaaaggactgagggttgcttttcctccatggagcctccaaactctgtgtcatccacaaagactactttggtctcatctctttcaaggaagtaccaagtgggaaaccaaatattgggctttacaaagcacatttgagttaatgtttggcaggggatatctggatccaagggcagctcacagagtgggcctcactgacaaggtgtgggccatgactcagattcctgggtgtcctgaacctcctggggcagttcacacgttccctggccactccctcttttcctacatgctggccatggggaaatcaccactgggcactataagaagcccctgggctctctgcagagccagcggctccagctaagaggacaagatgaggcccggcctctcatttctcctagcccttctgttcttccttggccaagctgcaggggatttgggggatgtgggacctccaattcccagccccggcttcagctctttcccaggtgttgactccagctccagcttcagctccagctccaggtcgggctccagctccagccgcagcttaggcagcggaggttctgtgtcccaggtgaggaggccccagaatctgaatgagctgcattcattcccttccatttgcttttgggtacctgaatacaatttcatggatggctagacctgggcactctaaaagatttacgactcattttgttaactataggtgccccggaaatgaattaaagcctcagtaaaataattaaattgttagcaagagagacgatatcgcagttctccagctgggacttttgggaatatctatgctttagaggaattctcaaatctggctgcacattagaatgggtggccggggggactctaaaagtacagatgcctgggttctgtacttaaaaaaatcctacatagatgtatacaaatcaaatattttaaaaaacctctccccaggtgattctaatatatagtccaagatgggaactgttagggaaagactctgtgagttgcagctctgggaagtttgtccagttgttttgctgcctggcaggatcccggaatggtgaacagtagccctcgagggagtgagagccgcagtgccctagttgaagccctgaccatttctcttggcctggtttataaaggaggtgggtgtcagaaataaggggggagttactggtctttagcaaagtgttattaccagtggacattcgcctaggggagtgttcactctttgcagtcttctttacagggaatcttcaggaccatttccagctccaaacaacagtagcaacaaacaaacaaaaccaaaagtcatgcattacaacgaggctggtacagctaggctaagtgcattgaaggcatagtaagccagttccgtggg

SEQ ID NO: 6321 - DNA, 6000 bp, Homo sapiens
agcactgatggattggctgacttgccataaatcagtgaagtacagggcaggattgtgtgttaagctattttttattaatgtagttaagaaaattatttttctgtgactataaacttttcaaaagattctgaaccaaaacgttttgatttgggttacaacgtacctgtttagcacttttaacttcaacagaaaatttcaggaaataatgtttttactcgaaatcacttgatcagagaggaaggacaggtattaactacttccattttgcagaataaaaaagagggatttgcatcatgtcacatagctaactaatgacgcacctacaacaggaaccctaagtctccgaagtcacatttgggtgccatttctaacagatcaagctactttttcaagtgtcatgtccaaaaagttgcattatagatatttctaataattttggatgaaaaaaattgtttcttatgaaacagaaaattcaaacatgttttaaaaaactagaaacttttcaaaacaacaaattttactgacagtccacatgctcatatagaaaatttgaaaactatgataaagattctatgaaattgcaattttggaatcaagactagtaaaatatgagtatatagaatataatgtgatataatgttgcattttaaaaaacatttaaaaatcagcacctttttagttttcataaaaattctcataaaaattcattaaattcttataattttcaatggttgcattaatcagatatgtcaatttgtttaactcatgcttcttatatctgaaagtaagtcttaactatcatcctactttttgataacataaacctagtaatgaagccacatggaaatgatgggtcaaagtgcatgcaactcttaaagacatttgaagcatattggcaaaccgcattccataaaggttgttccaacttctgtacttacttcttctgctgcaaactttaagactgctgtgaaaggtgtactttcaggaacactgagtctgcaagaagaattttaaaacagtttcttttaaagtcaccattttctaaaaaagcccctttgttccttatttccactactgtagccaatctggacaaagctgtcttttcagtttcaaagttagtgattttgattgcatactacattctttaactcaaaataataataataataataacaacccaaacagcaaatagccttagagctgggatggtgcccgagctccacttgagaattaacctttaaggtgtagatttatatatttctaacactttcatacatgtaagtctagcatatgaactgctgtttgtttctagagatggatttcaaaaaggtgaagctctccttggtcttcagtccactttacctcccatctaaatatctatgcacttgacccagtaatgttatcattttcattataagtagaaggctacttgggaagcatcactggatcataaagcttttgatgaaccttctgtgtactcttaataatcatgttcaaaattagtagaccaaattaatgaaaatgcatgaagttcattatgtcaaaatgccaataatgaagtgatttttctaccatcatttaaagtgggctaagtaaaatgtgaaataacattttggagagggatgagtgattttgttaactgactcatataacggcaagtattttaaagatcatgaataaatatattttttttttcttaatgacttagtcccagggtcaatctgtatgaactttccaataaaaaaaatcaaaacagaaatttactttataccttaagaaaacactttaagacacagtaagaggtttttaaaacttcttttaaaaaataagatccctaaggtaacataaattacaatgagtgaaaacagaaaacaatctttcaaagcagaggagacttacaagctaacatttctcactgaaacttctctatttgtccaccatattattgtattgttcttaagtgtctcaataccagctaccattattctcatgtatatgcccaggctcctcactcagtctacagatctctgactataagaatcattataacaggaacagcatatggtaccagttttcagtaatagaaatgtgaatagatttcttggctgccctcattccacaactccaaaatactattaaaggatgaaaatgggtatcatttttaccctttctttactaatgtttttggggggtggaaaaaaataaaaacatataaaggatagccatttgtttaaaaactaacgaactggcaatgtcatagtttacaaactaggcaacagtattttacaaagtatttttgcagtgtatatgtagttaagaatctgagattcattttcctaaaactctgcatcaattggagaacttctaaacccttggagttcaattcacttttaaatcggagacttggaaatgtccttacaatatacctagatgtcatactgatgctcattaaaataagtttctatctgtatattaagttggtgagtgtccacagacaagccaataaaaacaaatcaaaaatgaaaacatcttttaatgcaagttctaactggcagaaaattagaaaaaatgagagttacagtgactccacagatcttatctagatttaaagttgtatttgccagtcatttcataaaatcggtacttaaattatcccagtgttttgaataaatttacattaatgagaatttttgaagtaaattactggcatcatttgttttttaaataaatatataaacaaaataataacataaattggtaagaattattataaagactaagtccacaggtaactcaagaagggcgagattaactctgtggacaattagaaaaatctttggccagaaggggtggctcacgcctataatcccagaactttgggaggccgaggtgggcagatcacgaggtcaggagatggaaaccatcctggctaacacagtgacaccccgtctctactaaaaatacaaaaaattagctgggcaaggtggcacacacctgtggtcccagctatttgggaggctgaggaaggagaagaactgggaaggcgggcgttgcagtgagccaagatcgtgccactgcactccaacctgggcaacagagcgagactttgtttcacaaaaaaaaaaaaaaaaagaaagaaagaaaaaaaaacaaacttcatagaggtgagatttttattactataaaatatgttgtgatcatgagactgcattctaagcacagaaaagaacatgtgtaaaggaagcaaagattaaaagggcaagcttgtcaagtacccaagtactagttaccatgtactttgaaaagaaaatatagcacagatacccttgtacacacatttacacgttatgtgaattttccacacacacatccttatacacatacacacacaactacacacgcacacatacatactaaacaacagttgtacctactaaattcattcagtcaccacatattaactgaactggtacaatgttccaggctcttaatgttattgtcctactctatcattttcttccttccttctcacgctctctttcgagtacatttgcatattgatgagaataatccagtagaaagggaaaaaccaatcatgaggagagagggggcactggactccatctactttaaccttgacaagactgaaatagatgggaactatagctcaagtggtttttcataggagtgaagtcattttttccattctaacaggatgggaaattaacggatttatccatgtagtggtaggtttacattggtgtaaagatgatagaatttccctctgatggcttgatagcaagggagacagcagctgtggaaagtttgaaatttttaaacaatcttttctgagaataaggaggaaaatgagcaaacttgaagaatgtattaagtactaggtactattaattgtagtcatgaatttaatgtaaaccctccagtctgttattttctccaggggcagtcagctatgtacagataatacaaacagctggtttcagagttggtgtttcactaaccaaaatatgctgagaggagagacagggccaccagagttgagggtgtttgcatgagaatgatttaaaggtggaccaatggactcttaactatataaggagtaaggtaaggaatagaagtggggatagctacagataaaaaatcactgtgattaatggattaaatgaaacgttgtagatgagaaattatagtaaatcatgtaggagagaatgtatttatccataagagtgcctgtaaacgacatctcagagatggagcaattattggaatcttaaggttctaggctgcaaccatgaacacctgagataaagtgtaacagggatattttggagatgaaaagatcaagggaggaaaaggctgagaggttgtacggatcatggattggtaaatcattgaaatttatcagtcagctaggtaggccaaggtactaattaattatgcaaaaaattctattgtaatcctgttctttgctacatttcatgctacttccaactgcaataacctcaagagtgtttacttaaaatctatcactcaactgcgaaggataagtaaaggccccacatggataaactatcccctatctgcatttcccattcctaccaaatactctattaaatcccagcataggaagggtgtgatctgagtctcattactttgtgatgcccgactgctgagttactcatacacaacgaaactcagaagccgcggaataacaaatgttcaagtaatttcaaagtcttgactatcaagatggaatgtcttccttaacttcctcaaccagctggccaaagcggtgaaacgcttttctaatatccagcagatggggactgtttaagaatcccaacaaattaccagaacctggtccacctgtcctcccgcgccacctgcccaccaaatgaattccgaggggaggtcactaatcagaaacacacccacaccctcgtgacggggccaagctgccaagctgacacttagcgagcaagtacggacctctcctcgcaggctccggtgggaaaggctcctggaagggcgcgagccaggaaagtagatgaagtgaagagatgaagactgcgtggggtagttgttggaaaagctcggatcatccccaacccagccccgtcttgtccggccccaaaaggcccatctcggccgagctactcacactttgtacggcagccgtgggtccgacgtcagcgtgatcttaaaggaaaccttcgacctgaggaaaagagcgggagagagtcagggtcgggcagctggaccaggaattatggcagtcggtaagcaaacacttacatggtggtgccggaatgaatccagaacacacgacaactccgcgggggtagcacgacttcctctagtgtgctggggaccgccccgctccactcacgtccacgtctccctctgcaatctggggacctccgaagttgttgctatccaacgcactgcctgaaaattggccctaagagctcatgctagatggcgcttttaaattacaaatatcttgtgcttttgcgtttatatatctaagaaaaaagtatggattatatttataagatatctttctaactttggtaatttgctaccatatttttagtcaggcagaataagcgtgggcatagagcgtaggaccctaggttccagttggcaggttggggcggaagtaagggtatggggtagtcggatgaagagcgagatggacttggggcgaagctcggggcgaggccgggggcggggctggggcggacgcgctctaaagtttctaaggcaacctgagcgcggaaaagcttaattggtgctccagaagcaggaattgtaacactgctttatcattagttttcttccgtctttccagcaaaccaatcctgttatatcctttacatttctcatagtttctccttcacgctttactttccgatactgatttataactattgaatttcggttaagtaagagagctatcaagtacgaattatctatgcc

SEQ ID NO: 6322 - DNA, 6000 bp, Homo sapiens
tgagtttgttccacaatgtcagggtaatttaacaatggaggaaaaagatcacacattatctcaaaagatgcagaaaaaaaagtttggtaaaccttggcagccatttataattttttaaaaaataaatcttagaaaacttggagtagaagagaactttttaaacctgataagtggcatttacaaaaagcctacagcaaatatcttactttatgctgaagtactaaatgatttcctttaagattataaataagagcaggataatcactatcatgatttcagcattgtactgggggcctagcctatgcagtatagcaataaaaaaagtgattaggattggaaatccactctatagtaaccccaagtaaatcacaacctctctttgagtgtggatgagacctgagacatgcttacaacaacagaatatggctaaggtgatgggggtagtcactgctttgattggttcatgttatatggcaaaagtaatggaatagttactcttgtgattatgttatgttatagaagactgcttgttagcggactagagtgtgctatcatgttgtaagaaggcctgtgaatgagccacctggcaagaaaccttggggaccactaggagctgatggaaactcccagctgacagccagaacaaggcagggacctccatcccacagcttcagataactgaatcctgccaacaaccacctgagcttagaagaggacactaagttttaaaaaggaccacagtctggctgtcaccttgattacagccttgtgagaccctgagcaggagactctcagaaactgtgagaaaataagtgcatgttttaagccactaagtgtgaggttattcattatgcaccagtagacagctaataaaggaagaaagaaacaaacctgttattagagactagattacatagaaaacaaaagaatctatggttaaatcataagaattaacagaatttatttggcacttttgcagttgcatttctatatgctagcaacaaacatgtaaaaatataatttataaaaaacatttacagtagcatcaaaaatataaataaataaaatcttaataaaatatatgcaagaagattttgagtaagatgttttaaaactttaatgaaacacagattagtaataaaaataataaagagatatgggctgggtgcagtggctcatgactgtaatcccagcactttggaaagctgaagccaacagatcacctgaggtcaagagttcgagaccagactggccaacatggcgaaaccccatctctactaaaaatacaaaagttagttgggtgtggtggcacacgcctgtagtcacagctacttgagaggctggggtgggaggatcgcttgaacctgggaggttgaggttgcaatgagctgagattacgccgccactgcactgcagcctgggtgacagagctagactttgtcttaaaaaaaaccataataataataataataataataataatgagatttaattgggtagataagttctagaataaagagactcaatatcatgaagatgttaattctttccacattaatctctagatttaatgcagtttcatacaaaattccaataggatttattttattttattttttgagatggtgttttgctcttgctgctcaggctgtagtgcaatggcacaagctcagctcactgcaacctccacctcctgggttcaagtgattctcctgcctcagcctcccgagtagctgggattacaggtactcgcccccacacctggctaattttgcacttttagtagaggtagggtttcagcctgttggtccgactggtcttgaactcctgacctcaggtgattcacccactttggcttcccaaactgctgggattacaggcgtgagccaccatgcctggccccaatgggatttgttatggaacttcataaatgtattgtaaaatcatcatagggagaaacaaagaaccaagaagagccaaaatactcttgaaaaagaggacaaggtgagggagttgccctaatttggaagctattaagatttattataaagctataataattagacatgatacacacagatagttaaatggactggtggaacagaatagagaacacagaaatagaatattagtatatggaaatttgacacgtgataaaatcagtgctatggttttgtattagtccattttcatactgctatgaagaaatacccaagactgggtaatttataaagaaaaagaggtttaatggactcacagttccacatggctggggaggcctcacaatcagaaagcgaaggagaagcaaaggcacatcttacacagtggcaggcaagagagcgtgtgcaggggaactgccctttataaaaccatcagatctcataagacttactcactatcacaagaatagcatgggaaaaacccacccccatgattcagttacctcccatcaggtccctcccacttcatgtggggattatgggagctacaattcaaggtgagatttggatggggacacagccaaaccatatcaagtttgaatgtcccctccaaaactcatgttgacccttaatccccaatgtggcagtattgagaggtggggcctttaagagttgattggatcatgagggctctgccctcaatggattaatccacacatggattaatggattaatgggctatcatgggagggcactggtggctttataagagggagaatctagcatagcacctgagcatgctcagccacttcagaactctgtagagtccccaccagcaagaagtctctcaccagacatggccccttgaccttgacatctcagcttccataactaagaaatacattcatttctttataaattctctgcttcataccatacatacaaaaaatccaattctgtcggatttatgatttaaatgacaaacaagatttaaaatgtttgaagcaggctgggtgcattggctcatacctgtaatccaagcactttgggaggtcgaggtgggcggatcacttgaggtcaggagttcaagaccagcttagccaacatggtgaaaccctgtctccactaaaaatacaaaaaatttgccaggtgtggtaatcccagttattcgggaggctgaggcaggagaatcacttgaacctgggaggtggaggttgcagtgagccaagatcgcgccactgcactccatcctgggcaacagagggagactccatctcaaaaaataaagaaaaaagaaaaaaaaaggctgggcgtggtggctcatacctgtaatctcagcactttgggaggcgcaggcaggcacatcacgaggtcaggagactgagaccatcctggctaacacggtgaaaccctgtctctactaaaaatacaacaaattagccgggggtggtggcgggcgcctgtagtcccagctactcaggaggctgaggcaggagaatggcgtgaacccgggaggcggagcttgcagtgagccgagctggcgccactgcactccagcctgggtgacagagtgagactccgtctcaaaaagaaaaaaaaaagtttgaagcaaaatacaggagaatatctttatggctctggtgtaggcaaggatttaagatatcaaaagcataatctctgaataaatttgactatgttaaaatttagaacttcttttaagcaaaaaggcaaaaccaagagtgaaaagataagcatcaaacttggagaaatattcacatataatcactaaatggttagtattcagaaaatataaagaacttctgtagccaaaagtaccatttatgaatctacttattgatggatgttttctgaacttcttttgcccagaggaaaaatagtgcattaaaaagcttctgtccggccgggtatggtggctcacacctgtaatcccagcactttgggaggctgagataggtggatcacctgaggtcaggagtttgagaccagcctggccaacatggtgaaaccccatctctactaaaaatattaaaaacctagctgggcatggtcgtgggcacctgtaatcccagctactcaggaggctgaggcaggagaattgcttgaacccaggagacagaggttgcagtgagccaacacagtaccactgcactccagccttggcgacagagtgagactctggctcaaaaaaaaaacaaaaaacaaaaaaacacttctgtcccaaacaaacaaacaaacaaacaaacaaacttctaaaaatcaaatagaaggtggcctgggcacagtggctcacgcctgtaatcccagcactttgggaggctgaagtgggcagatcacctgaggtcagaagtttgagaccagcctggctaacaaggtgaaaccctgtctctactaaaaataaaaatttagctgggcatggtggcaggtgcctgtaatcccagctacttgggaggctgaggcaggagaatagcttgaacctggcaagtggaggttgcagtgagccaagatcgcgccactgcactccagcctgggtgacaagagcaaaactccatctcaaaaaaaaaaaaaaaaatcaagtagaagacaaccccccaaaatagtgggcaaatgccatagcatttcatacatttcatagaagaaaaaatataagtggctaataaagatataaaataatgctcagggaaatgcaaattaaaaccatattgaggtagcatttgtaccccttagatgcataacccttagaaggccaaaaaatcaaaagttagctggtattactttcacactgttggtggcactgtaaattggcaacccccttttggaattacataattatatttataatatatgttctatataattatataacatttatttcatattcatattaaacaagtatattcatgaatatataaataattgtgtatatgtattgtatatatttatatatgtaattacataatttatgaaaatcaatcctgttcctggagaacatacccccccaaaaaaacctcttgcagataaggactgggaagcaagtacagaaatgatcgaagcagtacaaatcaggggagaacgtgcccaagacctggagaactgataataaattgtggtttatccttgcaatggaacactatatggaagtgaaaatgattgaaatagagctatacacatcatcacagacaaatttcagaaacaacgctgagtgaaaaagtaagttgcagcagaatacatgcaatataatagtattttataaaattcaaaagccaaattttgaatatactttcttagctataaatgtgataaaactataaagaaaagcacaggaatgatcaacataacacggtgattgaggagggacacacaggggcttcgacagtactgtctctgttcctcaagttggatggcaggttcacaggtggtcatttcctcatgctttcatgttatactcattatatgatgactatattataattatagtatatgttatgcatattatacattatattatacatattttgtatgtaacagtgtttcataatattttaaggaatgagtggaaatgagcacataatgtagacatgcagtgcctcgtcattagtagagtctcagaattatcagattccaagataattcctacacaaaaacaagcaaacaaagagcatgttatctagaatgaaaagaccatccatattctaataaactgagacaatcaaatagggaatccctcttttaaggttggcattcgttatatgcttggaagtgatttgaagcagaaattagttgtgaataaatcttctccttattaataaaacagaagcttgtttttgatgtcatattatccctgccaagaaattaaaaatcctggaggtaggctgggcatggtggctcacacctgtaatcccagcactttgggaggccaaggcaggcagatcacttgaggccaggagttcgagaccaacctggccaacatagtgaaacctcatctctactaaaaatacaaaaaatagctgggcatgatggcaggcacctgtatgtagtccca

SEQ ID NO: 6323 - DNA, 6000 bp, Homo sapiens
tacttaaatgtctccagattaaagaagactcccctgacaactggttaaaattgcaacccaccaccaatatctgtcaccatcagcatttttagtccccatatcctgttcttttttttttttttttttttttttttgggacaaagtctcgctatgtcgcccaggctggagtacagcggcgcaatctcggctcagtgcaagcttcacctcccgggttcatgccattctcctgcctcagcctccagagtagctgggattacaggcgcccgccaccacgcccggctaatttttctgtatttttagtagagacagggtttcacggtgttagccaggatgttctcgattcctgacctcgtgatccacccacctaggcctcccaaagtgctggattacaggcttgagccaccgtgcccagcccccataccctgttcttttaattgccttctaatatagtatgtaattaacttatttaatatatttattatttttgtctgtcctcttcaaaatatcagttcagcaacggcagtatcttatctgttttgctcacagatgtatgggaagcacctagtacaatgctttgcactccataaaatatttaaacatagactctgtaaatattcgttgaatgaatgttgagactgggattttaaatttagataacatgattccagggtctatgaagttaatgactaagcaattgccttaaacatgaaatcattttttaaaagcttgaaaaaataagtgaatatgagaggaaaaagatattaggagcattaaagcactaaaataaattatcagggaaaatttgatagtttaatgtttgtaagaatgaaacatctttaaaataaataacattacctccaaatttaacaaagaattaaaaactgagaaatatcttccataaatatgggaatgtactaatgttcaaatattaagagttattataaaccaaatgggggaatagcaacaaaaccccgtaagtattgaaaaagtatgtaaactcacaaaaagaaacaagtagcaaagtacacaaaatataaaagtcaccgtttctagttaacacaactcattgagataccattttctttcaagtaggaaatcagtcaaaataaaaaaagaaaagaagaaaaaggaccttaaggatgccccgtattgatgagggttcaatgcaacaagctcccttataacatacagcatgtactttaaaatatttctgcatcatgacacagggctgtattactaggaatctattctgaggacataattagagatacagacaaaaatgcttgtgtaacggctttcaacaaaagtataccagtagggaataatagtataaaaacaattacactttcaagacctgaaaaatacttaagtatttcatagaaataagtagtgattcattaaaattaacatttttgaataacattttgataacttagaaaatgttaatttttttaaaaaataggcaggtaaaagctgtgtgtatagcatggccatgtaggttagattgaagcctcattacattgatgacagaacagaggattctaaaacctggagcaggagccaaatccaaaagttaagctgaggtggagccccttcagtgagtttgggtgagcccttgtgcagtaggaggtaaaggcctggtcacaaaggtggaagacaggtcacatgggcatcaaagacaatgataacctatttcttaatttatcttagcatcagaaaggccaatatcatatacttcatgatggcatcatacacagatgcattactggcacataaaaatgctgatggtgacacatgtgcatgaataaattctccaaatacttgtctctgtgactttgtctctatgtctgaggtataacagctttgaaacagtgtttcatacatgttacatgtcagctcctaaacagaacaataacctttaggagtaaagtgaaaattgtattcctaaaacaattgtgatcccaattctacaatatactttagctataaatagacattacagagaattgttttactgctatcatttcttgggtcacttgtctcttgctaatttggaaacatgagtgctttcttgttctgtttaataaggtactaaaataaattctagatagcatataacattttattgtaaatttctttgacttcaatgaattgcattttatgtggagtgcaggttcgtagaatgctgccaaactcatatgtttaaattgttaaaaataaactctttggattgctaatgactgtagtatatgcaattcaccagattgtttaaacagatttcaaataattttcctgtaattgctaatcattttgtaggagacctgagaccagcaatcaataatcacatgaaactgttgaaaaggaggctcagtgatcaatacaaattcttctttccgtgggaatacagcctgctcagatggttgacatatatagtgctctccttggtgttctcttctgttatgtatttattgcagtttcataggcacctttttatggaaagaaataacaaattagaaaaaattggtataatatctctttgctgacatcatgacagagataacatttgctacaaagaacaaatccttagagggcaggagcatctaacttggtacagatgctaaggttgcaaagtaaagttcatcacttctaaacaatggacaagtttgtcactgatcagcttttctcttgcatgtattttaatatgcattataaagacctatactcatttcagtatgtggaattctatctaccacgggttgatctcaaagatataaactcaaacacagtatgtagaattttgtttttcaggctaagaagaaacattgtcaataaatgtcacaaaaatacttacagttccattaaataaaatagatttccatatatatgtttacagtctcccctcccttgttagaaagtggacttgaatttattataaagttattaccttgtctactgatagatacattttgcatatttttaaaagccttcatttaatgttaagaaaagtaaagaactgtttaaacatgtcaatatattcttcttgtagtaaagagtaaaaagagattcaaggaaggagaaaagccttttgtcgttctctcctttgtttactgcagtagcattgtagaaaccaggtttatctcaatgtatcttagtattttgggaaggacttagtatctcagaaatttagaataggggtctagctgagctgggaacaaacccatagaggagcagttaggcagggagaaagataaattaacaaataagaaaagtgacttaaaaaaaaaaagcagcatgcacagttaccccagcgtgatctctggtaatatcctctttactcatgtgaaaactatttacaaaaacctcaactcatgtgaactctgaagtgggtaggaaagataaaaaaggaaattctttaattttgtgctttagagtctgaatatggatgccagtttgtcagtttatattccttgggaatattccatgggaagaaactggtccgccttgcagtcggcacagcacagcttcccaggtgtaacaacttggttgggataggagaaaacggttgctcctaagcttttgcgcagactggaagctgaatcaggcgtctgctgggatacaatcagagaccagcagctaacctcagggctttcagaaaataacggcaatcaggtagaaacagagtctcgaggagggtaattgccagctaggattcctcaagggctccactctctatcttacacgtgaactctatctttctctgggtcatggggtcacaaccaattaagactttccgagtgacaagctgggaatcaccgtgttgcagttacagcaagtgttattgccaactttgccaatagtgtgtgtgtggtttgtgtgtgtgtgtattcctctctgtactttaatcttattttcatatgtgaacactaaagagattggacaagagataacgtttatcttgaaatctcactctcagtaagatggtaccagtatcgcacacacacacactcgcacacacgcacatcacctgcagccgcagaaccttgcacccttgggctggctcgcgtcttagggttttggtatatttggtggaaacttgctgatttcctatgccttttggaaagaccaagctggatgagggtggttggaacgctgtggctcatcatttattcattgcgactgttttgattgttgacactagtggcaagccgcatcctccagctcttgcaagggaagtctgacaccttgaggacaggagagggggtgccagtcgcccagagaagcgggagtgggagaagctttgagagttgcaggggactacttttttccggtcgggcggcgggcctcatgggtgcttgtttaccgggctgggagcagggcattcaaaagctgggtgtcggagcgcactgaagtccaacacgcctgcagagaccgccctaagcctggaggtgtgtctggcttgcatccagaaccacagggtggattctcgccaccgacttggctggatgacggctggctggtggtgagctcccctgcccactggctgacctcaagcagttggccccggtaggtggaggctattcgagggggacaagctggggacgcagcgtcagctcctgccagcgcgcgggtctcctccacctccaagcagtgtggtgcgtgggacgcgcatcttcccggactatccctttccagcgcggtctgtgcggaccccgagcccggcagccaccagggacggagggcggggtgcctttctctgggctcatccgctgtcagccgtgggaactcttaactttatccagagggatctgtgcaggcgggggtgggagaggttctcctcccctggcggttacctccccctcccgggccgcccctcccccgcctcccatggcttcgctttcagagcatcctcactccgcccagttcggtgccagctgcgtgggctccagcttcgatcgttttccttggaatgctccaaaactcagcagcgactaagggaattccattggaatttgccgggcgtgctctcaccccgcacggcacccgcgccgtcagtcctcggatcccatcacttcagcccgaagattgcaactttgcaggtaaagaggatgtcgcctcggggctccgttcgaccggagctacacctcgccttctttctgggatctcggttaagtttcctaagctgcctgggaagccggctctcttctgggaggcggacatccctgcggggttaggagttcaaaaggttctggctatgtggtttctcttcaaggctcaggaaaaaaacctgtgaagctttcggtgcttgactcgggctgagcaggagtttgggggtgctcctcagtcttccgccgcactcggctttaaagcaggggagagggcgaggagtgaacccccggtgtgacttatatggtaaacaaaggagctgcagccacgccgtggtgctggggaatgtggccgtttttagccttttatgcatttggggaaaatggagatctcgggggcatctgggtgcatataagtgaggccttagctctccggcacttaaagtagggtaacgaaggaaggagagtgatcaatgttctaccgatcgattacattctgcgtcgttttcattctctgtcaagaaacagaaacacttttatccgtgttgcccgacccaggctagtgattcctagttcgcctggcaaccgagattccaatgaagccaatgaagccaatgacccggtttgctacttggttaaatcactgggattcactgcacaacttgttgttccagctgtgaagtcagctgtcttttgcgactagagacaagagaatactggaaaggcatcgagggtttaggagagctgaggaaagggatctcttatcttgtctgcctgcattcactatggtgtatccactatggtgtatccctgttcacatggcttcttagagaggcccttcccagtgaaattccatagctataaaatgcagcaagttgcttaaggagtaagcaccaag

SEQ ID NO: 6324 - DNA, 6000 bp, Homo sapiens
acataaacttaattgataaagctgtagcagagtttgagaggagtgactgcaattttgataaatgttctattgtgggtaaaaagccattgaatggcatggcatgttacagaaaaatctctcatgaaaggaagagtcaaccaatgtggcaaacttcatgcttgtctatttttaagaaattgccacagccactccagccttcagtaagcaccagcctgatcaaccagcagtcatcaacaatgaggcaagaccctcctccaacaaataggttatgaggggctgggcacagtggcttacgcctgtaatcccagcactttgggagtccaaggcgggcggatcatttgaggtcaggagttcaagaccagcctggccaacatgatcgcaccccgtctctactaaaaatacaaaaattatctgggcgtggtgatgcacgcctgtagtcctagctactaaggaggctgaggtaggagaatcacttgaacccaggaggcagaggttgcagtgagccaagattgcaccattgcactccagcctgggtgacaagagtgatactcaaaaaaaaaaaaaaaaaaaaggttatgactcacagactcacagaaggctcagatgatcatttgcattgtttggcaataaagtatttttaagttaagatatatatatattttagtatacagtacagtgtatacataacttatatatgcattggaatataaaaaaaaattgtgtgacttgcctcattgtgatatgtactttattgcattggtctgaaaccaaattgcactgtcttccaggaacgcctgtacatgtaaatccatgttagtgaggcaacaagcaggagatgcctattagttagcctgtttacatttttaggtgtgtattctaaaccttaattttccctgcccaaagagcatctaaaagttcatcatagcaatatttggtgacatgtgggtcttgaaatcacagaacataaacaagtgtatacggattaaaactaatcttaggccgggcgcggtggctcacgcttgtaatcccagcactttgggaggccgaggcgggtggatcatgaggtcaggagatcgagaccacggtgaaaccctgtctctactaaaaataaaaaaaaattagccgggcgtggtggcgggcgcctgtagtcccagctactcggagaggctgaggcaggagaatggcgtgaacccgggaggcagagcttgcagtgagccgagactgcgccactgcactccagcctgggtgacagagcgagactccatctcaaaaaaaaaaaaacctaatcttaatgagagtctcaaaaatattacagtcttgtgtagttactaaagcataatctactcataaatcaaatgaaacataattatattcgagcagaattcttctccaattgattcagtgtctatatttccatagagcacaggacagtccctccatggattttcaaatttctcttttagcatgcctattgttttcccagtaactcaccatggtgtccagtgaaatactaattaaggtggaaataagcagtaggaacaaatgagttagtgaaaaacaaataccctgttttcatcaaattcttgctgtcttgcatttcatagctacttcctgtattattagtctgttctcatcctgctgataaagacatactggagactgggtgatttacaaagaaaaagagatttaacggactcacggttccccatggctggggaggcctcacagtcatggtggaaggcgaaaggcacgtcttacacggcagcagacgagagaaaatgaagaccaagagaaagggccttataaaaccatcagatcccatgagacttattcactaccacaagaacagtatgggggaaactgcccccatgattcaattatctcccaccaggtccctcctacaacacatgggaattgtgggagctacaattcaagatgagatttggatggggacacagacaaatgatatcacatccattccaaagcacttgcaggaccatgaacacaatttcatttaaaccaaaggctactactatcttggttgtgcattggcttggcttcatcctctttattgtaaaactttctgtattgactgctttctctgtgtttgacattatcctttccccaatctcataccgtcaaatacagatttaattgtataggctcctacatgcaaacaccttccagggccaggaattgaagcaggctggggacatggaggcaaatgggaagtatatgcccacctatgggaggcacaggatgcccctattggccccctaccacttgggaatgcagaactgacctggccagatcttccttccttttttttttttcaagacggagtctcactctatcacccaaccaagctggagtgcagtggcacaatctcagctcaccacaacctctgcctccccagttcaagtgattgtcatgcctcagactcctacaggtatggtggcttacgcctgtaatcccagcactttgggaggccaaggtgggtggatcacctgaggtcaggagttcgagtccagcctggccaacatggcaaaaccccgtctctactaaaaatacaaaaattagctgggcatggtggaggctgcctgttatccatatcttcctatttttcctgataaaataaaattcttgtggttttcaaatgttggtaattgatcttaatttgtcaacaatatacattgagtcatacaaaacacacctgaattatattctcagtttatattgaacccacaggccagcaattgacttttactggattccagcaatgaatgtagttacagggccaattcaacctggaaaagatatttgttcatcctttctacttttgctttgaggatgcagtgagctataatcacatcaatgcactccaggctaggcaacggagataggccttgtctctaaaaataacaaagaaaacaaaagaagagagatactgagcaggtagaaggggtactatgatattttggatgtacctgttttttaaaatgattgtctactccaatacacagtgaatccctatgcattataggatgagtgtgctggattccatgacttccttgaagcccatgaattctctgagactgtctccatcatcattgggattgtttggctcatgagcatgaattatagagacttaacagaggtagttcaaccaaggacagagaaaggtctgaaatgcctgttgggtgaggagtggcactgagattagtaaaaaatcactgccttgaccacttcaaaacattataaataaatgtttaaatatttccttaatataatttactaacagataattcgaacgaatgtcaaggaataacacactatcattcagctaccatatatatatagctatatatttcagtttgtgaaataaactagtatttagaacaagcaattgaaagccgcaaataaagatgatgaaacaagttggtaaatactttttctaagcaaactggttgtagatttagcattgtttaaattactgtcaattttttcttatgaggagtgatttcatcatttgtttaaaacctggcttttgacacagtttttctgaagtctttagaaatttgaaaaattatctcgcatgactctgtatttcatgaaataccaatattttaacatttccctgtaaacaataaaacgtactaatatggattatgaatgtgaacaaattgtgaatggactttttaagaaagtagattaattaaatatctgtaaccagaaaatacatttttaaaatgtaggtttgtgtagttttacttctataccttgccacataacattttgtgatagacaaatgctctttgtttagaatttctcttgtagagaaagcttcattcagttgtttctttccctttatttatatgcctgtgtgcatgatgtctaaatcactggtcaggagttccctggggattttcgtatctgactacatggcaagattccagacccaaagtaaacctttcagagagtgggaatgagtgggaggatgtcgccctgggcatggtgcttaggaggccagatttccctaaacctgctctgctgggagccctaggaagcctcagatgcagtctgctgtccaggtatactcacagggtatggggtgggggactgtcaatttctgaatagactttgtctcatccacacgacaacatattttaattttaaaggcgaacgtcaacctatttagaaaactataagtgtgactgatgcattcattatttaataactccggggtgaaacttgaggtgaacggtttcaccctttcatactcaggaatggaactagtcctcggtaccgtgcacagtctgacctcacgctcgcacgctgggctcccggcctcctggcagtgcacttaagtgtaccccgcgtgtgcccggcggactcccgtgcacaccgccgccgtgctgttgagtacgaaagacccccgagaggagctcgcagatgagagcctagctgttgctgtgagactgactgcgggtggcagccggcaagaaggaactgccagtaccgaccctggcgctccccaccaactgcggcgcagcctcctctgcggtgcccgcccttcggcatcactgcagtccctgtagcaaagctaactttaaaaatttaaataaaataataattttttaaaggcccgaaaactccggctcccacccctcccccagcctgcccggcggcggcggcgctcagtgagtgacacggcgagcgtgagccgcggccccagccgggccgagcgcgctgcctgagctgagccgccgtaggtgaggggcccgcgtccccgcccgccctgggcgccgcgcctggcactgatcctgccggtcgcccactgtcgccgccgccgccgcccgcgggcaccatgacagctctgagcgctggggttacaggttggtcaccgccgccggtgcccgggaggctgcggcgcggccggctccgtgccctgcgcccgaggcccgcgatgcgcgctcgttagttccttggccggtccgggccaggacggctcaggggcgctggggctgcgagaggggctgctagaggggctgcgggcgggggccccgcgcgggggaggggtggggaggggcgcctccacccgagagcggggcggtggggtccttgccggcctggccggggcgcgggagccgcgatgcgccctccctattcctgcgcgtgggtgtcgggggcgcctgccgcgggatgcccctgggctggcttgggaagcccagggccggcgacacctcgggcctgccccgcctgggcatctagcaggtgttggggggcaggtggctgaggacgaggccactgggcatcactacagcgctgcacctgccccctcggcaccagggccgctgcctgggtaaacctctgggccaacgcgcgggtggggaggtgggggtgggcagcctggctccagcaggtctccgcgggggctccgcggccttgccccacccccatgctcctgtggattgctccttgctaaatgtcccttatgatattcattggccttgttaagcagccgtcattagggtggctacaccgaacgcaaaacagtgtcctgccaagcaacaccattttgtcactgaatctttaagacaccagcaaggatggcctggctgggatccctctgggggcccagatcgcagtcattttgctgacttaatgttcctctttcaggatggtgtgagaatgctgaactcagacccttagtgcttgaaataccttagaataaatctttcagtttcaggtacaatttttcagacactgtattattaaggatgtgtgaatacacgctcactttcaggcctcagaaggttttactcttaatctggtgttcgtgtggtcatcagctaggcccgactgccctggtggtgaaatgtgggttgaggaccagtgaccttcgtgttagtagttggtggataacacctctaataggggatcaaaaattaacaggtggcgattttgaaatatatatgtatgtatatatatatatatatg

SEQ ID NO: 6325 - DNA, 6000 bp, Homo sapiens
gttcagtgatattatccaaggtcacacagcttttaagtgttcttatagccatctcagacttaatatgtccgcacgtgaattcctaatcttctccctaaaaccagtcctaactcctatcttctccatcttacaatatcctttactcagaatcatctgcgtgctcaagccaaaaatctcatagctatgcttaactcttcttatagcctgcatacaaacattttggaaaattcggttcaatctatcttcagactagatcttcaatccacctctactttgcacaaattggtcaacaccgtatttcctggtttgtttcagtaggttcttaactgttctccctgcttccacctttgcttccccaagtctatcctcactatagcggcaagaaaaatactttacaacataaatcagctcagcctactcctcaacctggaacactgttcaccagggaatccctacagccagttctctaacctacagattgttacttaaatgtctccagattaaagaagactcccctgacaactggttaaaattgcaacccaccaccaatatctgtcaccatcagcatttttagtccccatatcctgttcttttttttttttttttttttttttttgggacaaagtctcgctatgtcgcccaggctggagtacagcggcgcaatctcggctcagtgcaagcttcacctcccgggttcatgccattctcctgcctcagcctccagagtagctgggattacaggcgcccgccaccacgcccggctaatttttctgtatttttagtagagacagggtttcacggtgttagccaggatgttctcgattcctgacctcgtgatccacccacctaggcctcccaaagtgctggattacaggcttgagccaccgtgcccagcccccataccctgttcttttaattgccttctaatatagtatgtaattaacttatttaatatatttattatttttgtctgtcctcttcaaaatatcagttcagcaacggcagtatcttatctgttttgctcacagatgtatgggaagcacctagtacaatgctttgcactccataaaatatttaaacatagactctgtaaatattcgttgaatgaatgttgagactgggattttaaatttagataacatgattccagggtctatgaagttaatgactaagcaattgccttaaacatgaaatcattttttaaaagcttgaaaaaataagtgaatatgagaggaaaaagatattaggagcattaaagcactaaaataaattatcagggaaaatttgatagtttaatgtttgtaagaatgaaacatctttaaaataaataacattacctccaaatttaacaaagaattaaaaactgagaaatatcttccataaatatgggaatgtactaatgttcaaatattaagagttattataaaccaaatgggggaatagcaacaaaaccccgtaagtattgaaaaagtatgtaaactcacaaaaagaaacaagtagcaaagtacacaaaatataaaagtcaccgtttctagttaacacaactcattgagataccattttctttcaagtaggaaatcagtcaaaataaaaaaagaaaagaagaaaaaggaccttaaggatgccccgtattgatgagggttcaatgcaacaagctcccttataacatacagcatgtactttaaaatatttctgcatcatgacacagggctgtattactaggaatctattctgaggacataattagagatacagacaaaaatgcttgtgtaacggctttcaacaaaagtataccagtagggaataatagtataaaaacaattacactttcaagacctgaaaaatacttaagtatttcatagaaataagtagtgattcattaaaattaacatttttgaataacattttgataacttagaaaatgttaatttttttaaaaaataggcaggtaaaagctgtgtgtatagcatggccatgtaggttagattgaagcctcattacattgatgacagaacagaggattctaaaacctggagcaggagccaaatccaaaagttaagctgaggtggagccccttcagtgagtttgggtgagcccttgtgcagtaggaggtaaaggcctggtcacaaaggtggaagacaggtcacatgggcatcaaagacaatgataacctatttcttaatttatcttagcatcagaaaggccaatatcatatacttcatgatggcatcatacacagatgcattactggcacataaaaatgctgatggtgacacatgtgcatgaataaattctccaaatacttgtctctgtgactttgtctctatgtctgaggtataacagctttgaaacagtgtttcatacatgttacatgtcagctcctaaacagaacaataacctttaggagtaaagtgaaaattgtattcctaaaacaattgtgatcccaattctacaatatactttagctataaatagacattacagagaattgttttactgctatcatttcttgggtcacttgtctcttgctaatttggaaacatgagtgctttcttgttctgtttaataaggtactaaaataaattctagatagcatataacattttattgtaaatttctttgacttcaatgaattgcattttatgtggagtgcaggttcgtagaatgctgccaaactcatatgtttaaattgttaaaaataaactctttggattgctaatgactgtagtatatgcaattcaccagattgtttaaacagatttcaaataattttcctgtaattgctaatcattttgtaggagacctgagaccagcaatcaataatcacatgaaactgttgaaaaggaggctcagtgatcaatacaaattcttctttccgtgggaatacagcctgctcagatggttgacatatatagtgctctccttggtgttctcttctgttatgtatttattgcagtttcataggcacctttttatggaaagaaataacaaattagaaaaaattggtataatatctctttgctgacatcatgacagagataacatttgctacaaagaacaaatccttagagggcaggagcatctaacttggtacagatgctaaggttgcaaagtaaagttcatcacttctaaacaatggacaagtttgtcactgatcagcttttctcttgcatgtattttaatatgcattataaagacctatactcatttcagtatgtggaattctatctaccacgggttgatctcaaagatataaactcaaacacagtatgtagaattttgtttttcaggctaagaagaaacattgtcaataaatgtcacaaaaatacttacagttccattaaataaaatagatttccatatatatgtttacagtctcccctcccttgttagaaagtggacttgaatttattataaagttattaccttgtctactgatagatacattttgcatatttttaaaagccttcatttaatgttaagaaaagtaaagaactgtttaaacatgtcaatatattcttcttgtagtaaagagtaaaaagagattcaaggaaggagaaaagccttttgtcgttctctcctttgtttactgcagtagcattgtagaaaccaggtttatctcaatgtatcttagtattttgggaaggacttagtatctcagaaatttagaataggggtctagctgagctgggaacaaacccatagaggagcagttaggcagggagaaagataaattaacaaataagaaaagtgacttaaaaaaaaaaagcagcatgcacagttaccccagcgtgatctctggtaatatcctctttactcatgtgaaaactatttacaaaaacctcaactcatgtgaactctgaagtgggtaggaaagataaaaaaggaaattctttaattttgtgctttagagtctgaatatggatgccagtttgtcagtttatattccttgggaatattccatgggaagaaactggtccgccttgcagtcggcacagcacagcttcccaggtgtaacaacttggttgggataggagaaaacggttgctcctaagcttttgcgcagactggaagctgaatcaggcgtctgctgggatacaatcagagaccagcagctaacctcagggctttcagaaaataacggcaatcaggtagaaacagagtctcgaggagggtaattgccagctaggattcctcaagggctccactctctatcttacacgtgaactctatctttctctgggtcatggggtcacaaccaattaagactttccgagtgacaagctgggaatcaccgtgttgcagttacagcaagtgttattgccaactttgccaatagtgtgtgtgtggtttgtgtgtgtgtgtattcctctctgtactttaatcttattttcatatgtgaacactaaagagattggacaagagataacgtttatcttgaaatctcactctcagtaagatggtaccagtatcgcacacacacacactcgcacacacgcacatcacctgcagccgcagaaccttgcacccttgggctggctcgcgtcttagggttttggtatatttggtggaaacttgctgatttcctatgccttttggaaagaccaagctggatgagggtggttggaacgctgtggctcatcatttattcattgcgactgttttgattgttgacactagtggcaagccgcatcctccagctcttgcaagggaagtctgacaccttgaggacaggagagggggtgccagtcgcccagagaagcgggagtgggagaagctttgagagttgcaggggactacttttttccggtcgggcggcgggcctcatgggtgcttgtttaccgggctgggagcagggcattcaaaagctgggtgtcggagcgcactgaagtccaacacgcctgcagagaccgccctaagcctggaggtgtgtctggcttgcatccagaaccacagggtggattctcgccaccgacttggctggatgacggctggctggtggtgagctcccctgcccactggctgacctcaagcagttggccccggtaggtggaggctattcgagggggacaagctggggacgcagcgtcagctcctgccagcgcgcgggtctcctccacctccaagcagtgtggtgcgtgggacgcgcatcttcccggactatccctttccagcgcggtctgtgcggaccccgagcccggcagccaccagggacggagggcggggtgcctttctctgggctcatccgctgtcagccgtgggaactcttaactttatccagagggatctgtgcaggcgggggtgggagaggttctcctcccctggcggttacctccccctcccgggccgcccctcccccgcctcccatggcttcgctttcagagcatcctcactccgcccagttcggtgccagctgcgtgggctccagcttcgatcgttttccttggaatgctccaaaactcagcagcgactaagggaattccattggaatttgccgggcgtgctctcaccccgcacggcacccgcgccgtcagtcctcggatcccatcacttcagcccgaagattgcaactttgcaggtaaagaggatgtcgcctcggggctccgttcgaccggagctacacctcgccttctttctgggatctcggttaagtttcctaagctgcctgggaagccggctctcttctgggaggcggacatccctgcggggttaggagttcaaaaggttctggctatgtggtttctcttcaaggctcaggaaaaaaacctgtgaagctttcggtgcttgactcgggctgagcaggagtttgggggtgctcctcagtcttccgccgcactcggctttaaagcaggggagagggcgaggagtgaacccccggtgtgacttatatggtaaacaaaggagctgcagccacgccgtggtgctggggaatgtggccgtttttagccttttatgcatttggggaaaatggagatctcgggggcatctgggtgcatataa

SEQ ID NO: 6326 - DNA, 6000 bp, Homo sapiens
ccttggcctgaccaggcctttgtgacggccttaacaaacaggtggtgggggcgatgctgcgtgatttccaaggctaggttagactatgtgatacagcttctgcctggcactgtctcttgggatgtccacccttgggatgtgaggcagtccaggcagaaaggccacaggtaggtataccaggtgaccacctgacagccccagctaaggttccagctgtcagccagcatcaaatgccagacatgatgttaatgaattagtgaaataattttgggggagggggtctggggcaactgcctcatttgttgttaggaagacagagattcagagttctaaatagttcttccaagtctcgtttgggacattgctctctaaaaacaatgtgtaaaatgagaagaattatgagaagagttaagagtcatcaaaatgcatttacagaatgcctaataagaacctcataaaagaataaagatttctggccgggcacagtggctcatgcctgtaatcccagcactttgggagtccgaggtgggtggatcacgaggtcaagagattgagaccatcctggccaacatggtgaaaccctgtctctgctaaaaatacaaaaattagccgggcatgatggcgcgtgcctgtagtcccagctactcagggggctgaggcaggagaattgcttgaacccaggaggcggagattgcagtgagctgagatcgcgccactgcactccagcctgggtgacagagcgagactccatctcaaaaaaaaaagaagacgaagaagaaagatttccattaaatcatctcccttcccggatcctttgcccaatgctgtcggggtgtctcttttagttgttagtttttagataataatcaagagagaggaaagagatcctatgaagatactggtctgcggacagagggaaaggaaagggattaggggtgagtacacaaatggctttcaacaggcctatactgctttgtttcctaaacaggagaacaggtacaaggatgattggtacatgcttacgtataatttttaacatgctacttatatgccattttctttttaaagtgtttatgtagacagatgcggtggctcatgtctgtaatcccagcacttggggaaggtgaggcaggaggatggtttgagttcaggaatttgagaccagcctgggcaacatggtgaaatcctgtctctacaaaaaatacaaaaagtagctgggtgtggtggcacgtgcctgtggtcccagctatttgggaggctaatggaggagaattgcttgagcctaggaggttgaggcttcagttagccatgttcacaccagtatactccatcctgggcaaaagggtgagactctgtctcaaataaaaaagtgataaaatgtttacacatatatacatatatgtatacagatataaaaggtaaagacgcacacataagcattttaaaaaggaaatggggcttttttagtttgaggaaaagaagggcttaagagatggcttgaagtcttcgtttgtataaaagaacttcttgagaaggatgccaactgactgttttctaggaccatgaagactaaaaaggaaggataggcttaagttaaaatagtagaaatttaagatgttcagaggacaaactgcttcaaaacactagttcttgaacactggagtgggctgccaagagaagcgatctggcctctccttccttgggaatcaccgggaaagggagaggcagcctctgtgccgtcacagcactggagggtcggatcctctcctgggagatcagtctgtcttggctcaacttattgcataaggagaggggcacacagaataatgagaggatgacgacagctgcctttcagggaaagaaaaagaattctccctttcccttcacttcctcctccaggaggaaagggctgctctggcttagttaagttcaatgacactcatcgacccacagtgctagggacttggtgtggctcctactgggggctgcaggctgcctttctacctgtcttgtgaacgcgtagggtcgtggctctaagaattgaggcaaactctctttgttgaggagttcttgctttcacagacagagcacatttccctgactgtcctggttgcggtgccttttgcgtttgctgtttctcctcacaggcttctttatctcctttggttctaacctaggctgcctctggcaagggtgaaaggatgtctccaagccaagcctgggtcacagggtgatccacatcggcactggattctaagcataataataaatactgtccatttgctagcttttgtcctttgtgcatatatttcccttgaagacctcagagatgggatttaggtctgactctggccaatgccaacctactgatctccccaacattccaagaggcagtcagatcaggggaattaaccaagacatcaaagagacaacacaagttgctgtgaaatattcacctactgctccttgcagtctatgctgtgatcttcaaggtgcaccaactgaggtatatttcacacacctacaaagctgtcagggcagtttggttattggaagataaacatagaaagagcagcaacaactctgtttcatgatggggctgcacaaagtcagggtgggacatttggtcactcttcagtgatcaaggcaaatattctatatataacatactctgcttcttaaaaattaaaaataacctttatctactctttctattcccacctaagtcagagcaaaaaaacccaaaatgttttctatttatcttgaagtttggggattgaaaaaaaccacattttccttttaagttcctttcaattctggttaggtcctcaaggtgttatcatagacagaagatttactgaagcatagtgacaagtttttgacaaatccagtcctaggattagccccagctttaagatttatcctcagcagcaatgaagatccactgagaaaacctctcccactctgaagcttagctcaacaatttagaaaattttattttgattcatcttcctgataaagattcatttcttatcagaaaaattttttgagggcccagaagagacaggtaaagaatcctacctgaagctacatttagtgtagattcttgccagcctgcagttttcagtgtaagttgcctgtccctttggatgttgttttttgttttgtcttgttttgtttttggtggagtcttactctggcacccaggctggagtgcagtgacatgatttccgctcactgcaacctccacctcctgggttcaagcgattctcctgcctcagcctcccgagtagctgggactacaggcacctgccaccacacccggcgattttttttttgtatttttagtagagacggggtttcaccgcggtagccaggatggtctccatctcctgacctcatgatctgaccgcctttgcctcccaaagtgctgggattacaggcgtgagccaccacgcgcggcctggatgtttgttcttaagaaaattagaagcagaggccgggggtggtggctcacgcttgtaatcccagcactttgggaggccgaggcaggtggatcgcctgaggtcaggagttcgagaccagcttggccaacttagtgaaaccccgtctctactaaaaatacaaaaattagctgggcgtggtggtgggcgcctgtaatcccagctactcgggaggctgagacacaagaatcacttgaacccgggcgacggaggttgcagtgggccgagatagcgccattgcactccagcctgggcaacaagagcaaaactctgtcaaagaaaaaaaaaaagtaaaagaaaataaaatcagatgcagaggccaggcaggaggagctcaggccgcactgctgtctttgctagcacagattctttttgctgaactctgtactactccttgtcagtccctaatgttaatttaggttaaaagaaatgtaatgctcgcatcagtaaaagcaaggtcagactttcacctgaacagttttatttttgttttgttccgtttttactccgaggtcagaatgtcatcaggcacaataaagatagcttcttatcttcatgggattgtgcccagaaagaccaagcacagtctaaacattacgcgataagaaaaaacaaaaaatagatcaagtgaccttggacaagtcatcttacctctcgatggttttgttttatgaaagaaggtgtgtgtgtgtgtgtgtcgatgggtgtgtgtgtgtgtgtgtcgatgggtctgtgtgtgtgtgtgtgtgtgtcgatgggtgtgtgtgtgtgtgtgtgtgcgtgcgggggttgagaaggttgctgttaaggttccctagggctacctgcagctttaatatgcgtagttagaatgtcaggcaggttgtggagagtggggggctggagacccccgacttctctgagtgccaagccacacatcagacaccttggaaataacccttccacgaagtccctacacagatcccaccaggctgggcacggaagaacagaaactgcgaaaagaaagggactggatgagtcctggggaatcacagcgcctccacttgcacaggacaagtgacaggcaggtaaataggtagcagacaggcagagactccgagtcccccaggtgcacccctctcctggaagagcccccgaaagtacaggcccaatctcccaccccaccaagccctccccatcgccttccccgacacctaaaagccccggtcctgcgtaatattgcggatccctcccagcctcccgtccgctcctcctcccgcggggctccgctcagggccggtcccccgcccccacgccgcagcccgggccagcggggcccgccgcggtggcgttcgcggatgctgccgcattggccgctgcggcacggacggcgcagcctcgggcgcggcccggcacaggcgccggcggtccccgccagctagcagcccggcgaggcgctggcccacccatggtcctcgggcggcggcccctgcgcccagccctgcgcgtagcctccgtctctcgcccggggccgccgagcccccgacacgggcgagatgctgaacggcgcaggcctggacaaagctcttaagatgtccctgccgcggaggtcgaggatccgctcgtccgtgggtgagctgggaggggcgcggcgagggagggtgggcccggggcgggggcggcgcggggcgcgcctgcggttatgcgacactgccccgcccgcgccccgctcccctccctgggctccctgggctctctgggctgcaggatccgccgacgcggcgcgctggccgcacgggggctgggcgtcgctgcacctgcggggccaaaaggctccaggccggggcgaggtgagcggcgggcgtcagagacccccggctcgtccctgtacagatgtgtgtgtgtgtgtgcggcctccctgtgcgcgtgcccgtgcgcccctacgcgcggatgcggctcagggatgcgacctaggcggcagtcaccgcgatggtgggcacggtttggcggcgcagagaagatgcagccttccctgccggcggccggcaccgctgtgctgcagagctcaaaagcagagggggaaaaaggcatccgaagggtccctcgagtgattctcaccacttggagccccgggtcctcgcgcgctcacagcggcgacgtactggctcataaccatccgtgcatacaaccatctggagacgaacacacacacgcacacgcgcgcgcacacacacacacaggtacacacacacgtacacacgcacgcgtacacataccctgcctgcaggcgcctgggtgttggaactcgaaacctaaagccaaacacgcatgtaccatacccgaccactcacactgttagaggcccgcgttctatgattatagaacacatttagaaactatgatgtcgtggagctggatgttatgtggctatgacacttgatagggttacctagaccattagttaatgcagacgtaaagaggagccccaaaaatgatttcttaccgtttcaggactgcg

SEQ ID NO: 6327 - DNA, 6000 bp, Homo sapiens
aggaggaggaggacaggggtgcttatctcattagtcttgcacttcccacccactttggggcttcatcaaaacctactggcccagatattgctgtgaagactttcctctgccagattcagcctcctgggtctggcttgtagcatttaacagcatctgtgctagattatctaaaatcctgggcacctggtggtgatctacaggtgaataggaatttgtccctcctctttaaccctttttgcttttccatcttatagggaaaaacaggttctctgcatactgctttaccacactagttaagatacgtggttatgagaagtttatagaatgatcaagtggtggctcatggaacccaaaccccctaatgcagctgggatctcggagaggactggacctaggacccaaaaaactgctgcctcatctctatctaaaaaaaaaaaaaaaaaaaaattcctttctctgtctcctggtccactcagagggtagaagacggccatctagagacctggtgtgtatatgttaataggtcagccatatgcagaaatggtccctaccagttcccatgtcaaagttcccagaagagagacccttggtggcccaatttggaccaagtaaccatccctggtccaaagagctgtaacaagtagatggtattgcacggtatgacctagctgatgggctccctggcttgtatgaggaaagaggtctggttcaagggagacagagaagggagcagctggttcagcggctgggcaggtacctaaaaggcacctactacattagcctcttatgtattcatttgacatattctttcagactgtctactgggtgctaggcatgatccagggcactctatccagggatagagctatgaatgagacaaagtctctgccctcacggccttgaccttccactctcttgtctgcatttccactttgcagggtgggggcaaatttagtgcttttctctttgcttactcttgttctctcagttctttcccttccctttggtttctttctcagctaatagatatttattgaactcccactctctgctgacacagcacctgtttaaatggtggaggtgtaagcatatactcattttatgtggtagtatttgcaaaatgcattaactcagaattatctcatgaaaccttagtcataatgtgctttgctgtagatggtgtaatgtttccttaggcaatatgttttccacaaattttttttgaaaatttttttttctaatacagggttaggttgagatgaggccactgaggtagaaagaatttatctgaatcttggggacaggtgcggggtggtataactatttctacctaggaaaaaatcccaaggttttccctgttgtggtatagaaagctgtgttgacctgaagcatgctaggtagataagtgggagatattattccacttcattctgtcatcactatttactcgtgtcaataatttttttcactccaatatttgttatccaacatctaaattcttgtttggaaaagttattgttcctgttatttatcagtgatttttttttttttgtcccagtcttcttcaaacctcagtggtcttgtgtttcttcctttcctggtgcacacatttaaacctcacctccccagaaatcttgcagagttttctttctttctttctttctttctttctttctttctttctttctttctttctttctttctttctttctttctttccctccctccctctctctctctctttctctctttctctctttctctctttctttctttcttttttggtagagatgaggtcttgctatgttgcctaggctggactcgaactcctgggctcaaggcatccttcccaacttggcctcccaaagtgttgggattacaggcatgagccaccatgcccagctgagggttttcttttcagatgtttcttatgtccatccttttatcccaacctccatttaattcatgcttttatcatcttgcttctagattgtagaattaatttcctacctggttcgcttatctaaaaattctcctcttctgctcttccccctttgccatcactgccagatgctcttctctcctgctcagaaacttcctgtggcctcctgtgaccttcaggatgaagttcaagcttctttgcttggcattgagtcatccacagtctggccacaggctattttttttggtgaactttttttctactttttcccagtttggaccctcagggttgatttgttttttttagttggccctgatacaattttgtctgcttgggcctttgcttaagctcttcttgcccttgcccacaatgcccttccctttcctacaatgcccttccctttcctaatccacacctcacccacattgccaggctcttctgtctgtactcagaatctattccaccacctgccctcccagcacaaagaggctgctgacctctgagcctccttagcacctttgggcccactcttagtcacacactggtaagtaaccatggttacacctttatgccttaattgagggaacattttcaagggcaggaacctgatcttctgtttttgtgttctcagcggcatctaacaagtgatcctgactgggtgctcatcagcatcacttagtgatctttagaagcaaaacacagtgaccacagaatctgagagggcagggcccgggaactaatacattgtggaagctgcattggtaatactaatgcacaggggaactgagagccgctaggtgagcaatgaaccactttgaccacgcactgttcagtgaacccagcctgtccctactgtcctggagcttgggcttctgggtgcagtgagacagagcatccataaataaaatcaggtaatgatgatatctggtactgtggaggaagacaaggcagggttagtgggcagagagaaaagcagtacttccatataggctagcttcaaaaatattctccatctgtcttacatcagcaaatgctccaacacctggccttccctgattgaagtccgggagccccagctggtgggccagacagtctggaagaagggattcttgctctctgctgccgcttgttgatgagtagacgaccaagcagtgtcccatggggagccagaaagaccccagagagtgggaggttggagggaaggagatgagggatcctgtctgagtgaggaatagccagggtgctgtgggcacacgcaaaaagcaagaggaaaactggagtgtgcctggcctgtgaccagggacctggcttgagccccggagcctgcacccactaggcgtccccatctaggtgaagggagaagccttagcccacttcagacttaactcttacttaatattcggaataatatgtcagctttcagtaaacgagtttacatttcgcttgtccctttcttaggataaggattatcatccttctaatcactttaaaaagatgatgtagcgaaaactttctctttaaaagtgtttctctatgacagtgaaaagtattctttgtaacagggaagtgaaggtttacttgcgtaagatgtcagtttttttttttttttgagacgagtctccttgtcgcccaggctggagtgcagtggcgcgatctcagctcactgcaggctccgccccccggggttcacgccattctcctgcctcagcctcccgcgtagctgggcctacaggcgccctccaccttgcccggctaattttttgtatttttagtagagatggggtttcaccgtgttagccgggatggtctcgatctcctgacctcgtgatccgcccgcttcggcctcccaaagtgctgggattacaggcttgagccaccatgcccggccaagatgtcagttttttaatggtgtgcaacgtccgtttctttgatagttggaaagcgtggcaggtattagagggcgaatgtatatttaagaaaaacaagataagtcttcatctgtagagtattaatttttctgtgatcctttatctcagacgcctctcctctgaaggtcactgctcaagctgggcagccccttctaagaagggatgctgccttggagttggagatgaggttaagatctacgtgcgggtaccagtttcagtaataactggatccttctctaggtctaggctggaacgtctcaagtgaaggttattggggggcaggggtttgggtccacccaaaaaggcttgacccataggactgaaatcaaatcttgagctaggctggcttgccacgtaaccacagaaacagtaatttaagcaataaaatgaaagctcgagcgctggtccagagctggggttgggacagctactgcactcaggtctccaggtgcatgtagggagaagagcagcggatcccttgcagacaatggtgggagcgagctcttcaccctggggtctccgaagcccatttttagcgtccagaggtgtgctttcgccatctccttctgcggtggctgcttgcagggcgcattcccattgctgctgtctctgttcctaaggaagatcaaaggatcccagaaaacccagttccagagctcagttcccgggactagagggtacgctcggccagatggctgggggtgccgctggccttggcgcccccgccgtccccgcgcggtcgcccaccccggcccgacaagcagcttgggcgtccagcccggcccggtccctgcagggagggagcgcaggagctgggggcggctctcccggggcggggctcgctccacaagcgccaggggccgcgcggggcgtgggcgtgggcggggccgggggcggggccggccttggctgccgcggcacaggcggcggcgtctccagggggagccaaggtacgtaggcggcgtccgcctcacccgagcatccttccccgccggtggccgcccgcccgcggcccgcgctcgcagcctcccgcctggcggttgacttctttgtgtcgtattctctgcctgcgccctgtctctgcaggacctgttcgttcttctttgggctataagaaggcagaggatgagatgtcccgggccacgtctgttggagaccagctggaggcacccgcccgcaccatttacctcaaccaaccgcatctcaacaaattccgcgacaaccagatcaggtaggagaaggcggccggctcgcgcggaaggcggtggagtcacagctgggaaggggctcgtcctcctgcgcggggcttggccgcgcacctggccggcccccgtccatctcccccagagccttcccctgccccctccccaccccactagcccgcggtgcagccccgcgcttccagtagggtcatgcgaatgcagccctcaccgttctctcctgcgcatccgttctgcgcccagcctgcctctgagccctgagaagttttcactctaatgtcaccgacaaaaacgaggtctctgctcttttcatccctgggcttccttctcggaaccccttctagccttgttttaagccagttgatagccttctttagcaatttttagaccatactatgggggacgtgcttcataagggaatcccacaagtcacaaggaatcacattcagttctcagtggtccacgacaattgttaagaggtcttcatttgctgcgaaactttgcccagagttagcagaaagatggacagaagctagcgtttaaatgtctacttttgctggccgctatgtcacacaccctggctatagcagcttagtgaatcttcataacctattgaagcaggccaggagactggaatataaagatgctaaataatgtacctatagtcatacagctcctaaatggcagggctggaaattgaacccagcccatctgactactaaggataaaattttttctgctgtgcaaagctagttctttatcacgggtgttcgtacattttcaaatttcattaaactttcaggcttaaacaactttgtatctgggagagacttcagaggatgtagttctgtgagctgctcagaacaccatgcttgggtgtagagaagttcagtgatttatcaggttacac

SEQ ID NO: 6328 - DNA, 6000 bp, Homo sapiens
gattcacctgaagaactttaaaaaaaaaatgaaatgaccaaggcctatctcaaatctactgaattcctttcctctggggatgggcacttggcacattatttttttaagccttatgggagatgccgatgtgcatttcttggctaataaccactgctttaggctatcatccaccaatagctaaactgtcaaccagagtcactaataataaacttggcttatttcacaactttgtctagggactgcttgtcaatgcttcctagtttctgactaccgcctatgtatgtcctcatttctttcctggtctgcctcatcgcctcaccttccactatgtctggacttctgaactggacatgtaatctctgatctcagaagtcatcatcataagcataggttctgattatggctggctcactggacttggttttccttacctttgcatctaaccctatctctactacatactttcacttatgaccctagtatgacaacctgctaacaccatcgagtcagggaagagcgagccatgatggtgatgatggcagcagcccgtctgaagtggctgctgccctgacgctggctataatcggggaggcacggctacagccgcggcggtgctctatggagccagcaagagctgggaacaggcagaagccctgcccgcttccaagttggaagagtgggagtcctgccctcctgagtgcagctgcagccacccagtcatggttgtggacccattcatctccggacaagtggagggtaagcaaggcaaagaggtgctttgctgagcgacagaacagctcagaggagacctgagggcaatgggtagcttctttctgcaggcaagtcatcccaataagtgtccagctcttagcagagaggagacccacagtgggtagttcctctcagcaggcaagtcatcccgtcatcttctcagctctccacagagagaagacccactctcaggggaccaggaagctccctgctcccgcaggcttggaagtgcctgctcccactgcctggcctctccccgctcccagcacccgctctgatttcagagcaaagttgtgactaagcctgggtgctgtcacgacccgaccaggtgtgcacgtgcttggggcagcattgacacgcaagccccatgctgcctcagtcccctctggactttgggtgctgatgagcacaggagggaggcaggccgaggcgggaataaggacatctcagtgaaggcctgtaggtaccacttagcatgaacaacctgggcgccatgggcactgtggatggcaggttaatggcagcaggatccacacaggctcctgggcggaaaggggtgggtccccggtaacgccaggggtcaggctgccagttccatgcaacggagtgagaacttatggtgctttctccaggcctgcccatggctgcgccatggaccaatcagcacacacttcttcctctcagaagcccataaaaaccctggagtgaaccagacttgggcagacaatgagatgacctgcttgcagacaggagctacccactgtgggtctatggacactgtgggtctcctctgtggagagctgagcagatgacaggaccacctgcctgctgagaggaactacccattgtgggtctcctctctgctgagagctggacacttattgggatgacctgcctgcagaaagaagctactcattgccctcaggtctcctctgagctgttctgtcactcaacaaagcacctctttgccttgctcaccctccacttgtccacatacctcattcttcctggatgtgggacaataactcgggacctgccaaatggcatggctgaaagagctgtaacacaaacgggctgaaatatgccccttgcttgccatgttgtgggcaacacaacaagagaagagagaagaagagaagaagaaaggaaagagaagggggaagagaggagagaagagctgtggccctttaggaagcctagacctaggagctccctgtgacaacctctttggggctctgcagctcctggcatctccaagcttccaggtgccactgcattccctggtgccagctgtggaagctgcttgcagtacacctggaccagccacagccttgcaaggggccagcccctagagctgcccgccctcctgcagctggcatgccgggctgtatacagtggccggaccccatgcttgctcgctcacacacccctcgctgctccgcacctggcttgcacttggcaggtgtgggatccaggccgtagtatgagcagagtgcagcctgctgggactggtgggcagaatgagcccgaccaaaattcgggcagaggtgccatttttccagctggaaaagtgacactccaaggatcctgtgacaatggctccactgaaaaatgatttcgaataactgtaataataggtaaggtcattgtgaacgcatgttaatcttcagtagtctagtttgatttctttcaaacattgcttctacttagcaacgcaattgaaaaataaatctccaatttataggggaaaaaaaacctccatagattggaataaaggccctctactgtctagatctcacctgtgtttctagatcttgtactattctacatgcacctgttgctccaacctagctgaacttcactgttcctcaggaagccctcagcaatgctgtcttaacttcctttcttcacattttcaatgtcgggaagatcttttcactagcagcttccccttcctttacccatatccaaatcctaccagtcctttaagacagtgtttcttaaaactgaataatgaacagactcctaaaataaattcttatgatcctagagaatgttttcagtaggctggggtccacagaccagtttgaaaagcacaaatataaagaactaaagagcaattgtataaaattatgcaaatgatcaagttgaaagacaaatttcatctttataactggtaaaataactcgtattttgccatagaactctgattcttatcttcagatctatgatccgtttaagaaacactaaggcaaagctgaaaccttggaaaatgttcctgcatcaccccaaggtaatacatttttattttttctgatttggtgtctaacaactttctgccttggagtagctagtaatatgtagcattttcctagaaaacataagctctttgaagacagggaccacattttatttattttttatatgcaccacacctaatacacagtacatcctcagcaagtactggctgtaaagcctatattccatgctcttattttgtagtccaaatcactttaaaaatcacacttcttctattgttcatactcatagaagagcatattactcaaatagctctgctataaattaacagtaagtttcagaagttataccaagtcacgagactcagatttttaaaaagtgccacaaagtgtctcttctgtgtcaatgttaatagaaccctttctttaaatgatcagtaggcaaattaagaatttccggataaagaacaaactctggaaaaacaaagctagtgggagaggccctgtaaatacctacctagtcttacaagggctgtctctaactcagcttgtattttaggcagcgtcttcagtttttcaactaatgtgtttgagaaaactgttttcctcggacatgcaggcgtggactccttacttcaggtaaggtgacagcagcttgacagagagtgccttccctcccacggcatttgggacgaggctgaaggaaagacacaggcggggttacgggaaacccattctctgcgccatctgggcaagctgaagtcagtttttccgctttctcacgaggtaatggattatcatgggctcaggtccccttcagctctgaaacaggtattctatggctctaagtaaacacggcaagagacaggttatttctttggtaagatcagttgtatttcccagagaataaaacgggcaacaaaccatttatcgatatgtgagtcttccccctaggccctagctatttggggttggataaagaaaaagagggtttgcttcctttttggcgggtcctccaatgacagggctcctggcccgctgcgggtccaactcccacctctcgtggctcccccgaggccgagcgaggctccgtgcgaggacagcccctcaaccgcactccccagagggagcgctgggactcgcggaggagattagtccccggtcataaacaacctctcacttcccctcccccgcccgcgcccgctcgcgccggggcggcgcgccggggcggccctccgaggcccaggaacctcctccggcgcccgcgaggccccgagtcctcctccggagggcggctgcgggcctgccctcttctcctaaccaggtgtttgtccactttactcaacccttcttactcgtccacgctacggccacctcacaggggcggctgacgccagcccctttttccctcccctcgacccctatcacctccaacagccaaggagaggccggcggccctgacgcgcaggctcaccgccgcggccgccccgcgcgcgcggacgcggcccccgcccccacctcgcggtccttccgcagtccggccccgccccttcccgaagcccgcctccgggtcggcccgcccgcccgctcgcgcgcacccgacgccccgcctctgcgcgtgctcaataactgtccccggagccggcctacaagcttcccccgcccctgagctgtttaaatatgctaatgaaaggatagggcctgaccagtagaacggcgaggcggtgtatcacgtggctcggggacgtgtcaggggcggagcctccgcagcccctgcccgagttaaaaccggagtgtgagagagaaaagcgcttcagtagcgagaggggctgagaaagtggtgacaccgccggggtgcggagggagtccctgaaacttctcccaacagccccagggccaatcttccctcagcccactcccctcttcgccagctcccaggtccccactcctgtaccgggggtggggtggggagccaggcccgtctcccgctgggacacacacaggggccgggagcggggacgggacccccgaggcgggggggacgaaccgacagacagacggctgggcgcccgccccagcgggcaggcaggcaggaggaggcggaggcgggggtacgacggggagcactgggtctggggagtttcctctcaactatcgggggagaaactccccgcagccggaggaaagacccagacagtgttttcctcccgggggccgtgctcccccgccccgcgtagcggcggtcgccgccaccggcgcctccacctctaccatctcctctttctccaccacctcgggccccggtgtccccggccagcactatgcccatcttactgttcctgatagacacgtctgcctctatgaaccagcgcagccatctgggcaccacctacctggacacggccaaaggcgcggtagagaccttcatgaaggtaccgactgaccgagcccgggcggcgaccccggcccggcggcccgcgggcggcagggtgggggagggcggccggggcgggggtgtcggggacctgactgcgggagctgccgggctcggggaccccctcccccaccgcgcgggcgggcgggcgctgcgagccgggttcggccggggcccgggctccggccccgggcggtgtgtggggagcgatctgtgtgtgggggacggcgtggaggggtggccgctgcgtgtgcggtactgtgggggcggcggggccgctgggcgccccttctccgcctcgtaacctcgcctctgtgcttccctgtcgcccgccctgttcctcctcccgtcccgcagctccgtgcccgggaccctgccagcagaggagacaggtatatgctggtcactttcgaagagccgccctatgctatcaaggtaacagccctcgccctccccctttcctcccttcccttccctgttccttcctcgctcgccctccccgcccccccattcacccttcattatgctcccctcccc

SEQ ID NO: 6329 - DNA, 6000 bp, Homo sapiens
tcttatccttctcacgaaaccataagattgtaagaggtggaatcagtgtcatgcttacctttaccttctccacagagcctgcccctgtgcttggcacatagtgttatatcattttggtcatggctggctttgcaatttacagaacaaaagaacattggataaagtcaggagactctgattctaactccagtattgccaataacatgtaacgcgactttaagagttgtgcttctctgggagataccttgttaaatgcctgctgtgtggtaggcacagtagctgcaggggtgcaggagttaactacacagacatgggtcttgccttcatggcacttacagtctagtgagatagttggagatagactttacacaaatggccacactgtcagttaattacagttttaataaaagctatgagagtatatacagatggacctacatgtgtttggggagataattcagggaagggttttcagaggagatgacacttgagtagtgacctgaagaattaattagggcagcaaaaggttgctccccaacctttttggcaccagggaccagtttcgtggaagacaatttttccatggatggagttggggcaatggtttcgggatgaaacttccacctcagatcatcaggcattagttagattctttctcataaggagcttgcaacctagatccctcgcatgcacagttcacagtagggttcccactgctacgaaaatctaatgccgttgctgatctgacaggaggtggagctcagatggtactgctcgcttggcaggctcacttcctgctgtgctgcccgggttcctaacaagccatagacaggtacccatccgcggccctggagagttggagacctctaaattggaggtagccaggtgtgatggaggaggataggagggagcgctgcaggtgcacctgcacagcccaggatgcaaatgagctcagaacacaccagaggatgcaagaaggccaacatggctggggcctagggaatgcaggagagagaggcatgagatgactcaggagcagcaggcaagcagcctgatcatgctgtggcattgcagatcatgaaagattgaggccttcaatctaagagtactgggaagcaggagcccaccaagaggggccgtgtgggggcaagccaccctgaaggcaggaaataaggtgtgcattgtctatagagagttgacaataataaaactgactaggccaggcgtggtggctcgcacctgtaatcccaccattttacgacgtcgaggcgggtggatcacctgaggtcaggagttcgagaccagcctggccaacctggtgaaaccccgtctctactaaaaatacaaaaattagctgggcatggtggtgggtgcctgtaatcccagctactcgggaggctgaggcaggagaatcacttgaacctgggaggtggaggttgcagtgagctgagattgcaccattgcactccagcctgggcaacacagcaagtctccatctctttgataaacctgacaaaaacaagcaatgtggaaaggattccctatttaataaatggtgctgggaaaactggctagccatatgtagaaagctgaaactggatcccttccttacaccttatacaaaaagtaactcaagatggattaaagacttaaatgttagacctaaaaccataaaaaccctggaagaaaacctaggcaataccattcaggacataggcatgggcaaggacttcatgtctaaaacaccaaaagcaatggcaacaaaagccaaaattgacaaatgggatctaattaaactaaagagtttctgcacagcaaaagaacctatcatcagagtgaacaggcaacctacagaatgggagaaaatgtttgcaatctacccatctggcaaagggctaatatccagaatcttcgaagaacttaatttacaagaaaaaaacaaccccatccaaaagtgggcaaaggatatgaacagacacttctcaaaagaagacatttatgcagccaacagacacatgaaaaaatgctcatcatcactggccatcagagaaatgcaaatcaaaaccacaataagataccatctcatgccagttagaatggctatcattaaaaattaaggaaacaacagatgctggagaggatgtggagaaacaggaacgcttttatactgttggtgggagtgtaaactagttcaaccattgtggaagacagtgtggctattccttaagcatccagaactagaaataccatttgacccagcgatcccattactgggtatatacccaaaggattataactcacactactataaaggcacatgcacacgtatgtttattgcagcactatttaaaatagcaaagacttggaaccaacccaaatgtccatcagcgatagactggattaataaactgtggcacatatacatcatggaatactatgcagccataaaaaaggatgagttcatgtcctttgcagggacatggatgaagctgcaaaccatcattctgagcaaagcatcacaaggacagaaaaccaaacaccacatgttctcactcataggtgggacttgaacaatgagaacacatggacacagggtggggaacctcacgcacccacaccggggcctgtcagggggtggggtgctgggggagggatagcattaggagaaatacctaatgtaaatgacaacttgatgggtgcagcaaaccaacatggcacatacatacctatgtaacaaacctgcacgttctgcacatgtaccctagaacttaaaagtataaaaaaaaaaactgactaaaatctcatctgctttttatttccacctatatatacaaccatatgtgtgttataaatgtttctgatataaaggatgtgtaataaacaatacacaagtaaaaggcagacactctttattgtcagttctatctacttgactgattctcacagaaagctttgcttcttttttgccaaaggcttgtatctgaatccatccaatgcttgtaactcaaccatgatgtgactagtgaaattacataccgatccactttttgccaacaaatttattgtccttaaatctgatatgtgatctgttaaactacttcttacccttgtataaactcattaaactgcaatcttgtttcagcactaaacacatttttaagtttaatctacattattaacatcttccccatcactttctgaagtctagagacaatcagcaaaacaaatcgatccctgattcatgattcataatgttggctaatttccatggtgtaaatacttcgaccatggcccattacagtctaccaacgagacatcactgagtgtgggccgggaaaacgcacgtgcagtaagcacattatgatacgtaatactggaaatggtaggaagtggacagacttcagagttatttaggaagtagaatcttggcgatttgttagatgccgaggtgaaggcagagtttgggaaacactggatagtggtgtcttcactatcacagggagacagggagttgaaagcaagcagggaaaggacgcattcagttttggatgggttccatttgaggtgcttgttaccaggagtagctgaataggaagctagataaacggatttggagctcagaggagcaaagattagagttgcaaatttgggatatattgatttaaatgttgacagcaggttaaatcattcagggaaaaattgtggagtaagaggaaaggtctgagaccttgaaaactctgttatttggtggtcacccagagtagacaagcacgccaagactggggacagacaggaaagtggagcacccccgccacaggaagacgtgttttaaggagaaagaaggaattttgctcagatcagttaacacgagaaaggagagtgtcctttgactttagtgatgtggatgctacttgcgacaattaaaaaggcaatttcaccgagtgtgaaaacgaacacgtggagttgagagaccacaaaactgggggcaggcgcctctttcaccaacttcagcgatggaaagtagaagagggtggcagcaagggtacgtggagtagagaatcttggaatgatgaaatgccgaggatacggattccagtccagagggagcaacggatcggattctgcgatactggaaaaacagaaggtgggggggggggctcggtgatggagggagcaggtgtgcagttttgccggtggaaagtggaagtttctcttttctcctgaagcaggcggcaaagacctctgagagtgggagtgtggtgggtgtgccgggcccctggatgggagtggaggtttggaaccaagtggcccgagcctgcggtgagtgggcccgccctgggtggctctggccgcagcagggtcgatggggcggcatggtctcggcgggaagaacacggcttcagtcagttctgttctaagaagcagaaggtggagatacgcatgttttaaacaactcctcccggacaggaagaagtggagttctggctgttctgcgaggacgccgcagtcccagcgtggagaccaccgcgcaggcgaagcgcgagacaggccagaaatagggtcccgcgcgcggaccccggaggaaaagcgagggctcactcggtttcccgcagccagcctcgcccgacccagctggggccgccccttcccgccccggccccgcctccgcctcagctccgcgcccacaacccggcttcctcctctcccgccgggtccgtctgtccctgcgcctccttcgccgccgactagcgccccctggcctgacgtcaccggcgcgtccgccaatgagctgaggagggacttggctgtggcctgaaagtgacgggagcagcagccaatggtcgggcggagggggcgggccgagactggtgctggggggcgcccgcgcgcgtggggagctgcgggaggcgcggcgcggggggggtcgggtgcgcggcgggcggcccctccccctgccaggtccgggcgggtgcctggagccgccagagtttccgcacccgggagggagatgcggccggggctcaggctccttgcaggtaacgcgcggggcggcccctgcagggccgagcgcgccgcggggcgagcggagttggacgcggagcgggcgcgggttccccgctgccgccgtgtcccgagccccgcacggcggcccgggccagagcggcgctgctggaggagttggttccgggacctgagctgcggcccgggccggggtcacgggggacgcgggcccctgtgtgagccgcacatgggacaaagggcgcggcgtggaggctgcgcgccccgcccgccgcgctcgggcccctgagcttctccgcccgggcagaggtcgccgcccccagcccctgcctgcacagccgcgccggcgctccctcggcccgggcgcacccggcgcctgcggcgcgtccccggagcggccatctggccgcggggccccgcgcctggccgccagctggccgcggcgcaggcgatggctggacacagccgggccgcttggccgcctgccctgggttccgcggcggctcccccgccgcgccgcgagcgcctgctactccacgctcggctgcggagcggagcggcgcgagcgcggggccaccggcccgggcgcccggggccaccgagccgccgcttcccggcgtgggctcggagtttggggaagccgagcaggtggcgcagccactgcccacctcctgcgaactctgcggggcttctggtcttgttgatgttgtggctatgggctgcgtgtgtgtttttcttttttttaaaccacacacaaaagaagggaggagttagaggaacgatctagccactatgagtcatcccacacttcgctctttccccgggagagcaaataaatgcatggggagaatgtcttgagaaacagttatagtagggactgactaggtcccctccctgtcccttttctctgcagtcctgtctgcgccgggcgcgccccagatggagtggggtaaaatcacggccagtgcacctagatagggg

SEQ ID NO: 6330 - DNA, 6000 bp, Homo sapiens
atggcatggctgaaagagctgtaacacaaacgggctgaaatatgccccttgcttgccatgttgtgggcaacacaacaagagaagagagaagaagagaagaagaaaggaaagagaagggggaagagaggagagaagagctgtggccctttaggaagcctagacctaggagctccctgtgacaacctctttggggctctgcagctcctggcatctccaagcttccaggtgccactgcattccctggtgccagctgtggaagctgcttgcagtacacctggaccagccacagccttgcaaggggccagcccctagagctgcccgccctcctgcagctggcatgccgggctgtatacagtggccggaccccatgcttgctcgctcacacacccctcgctgctccgcacctggcttgcacttggcaggtgtgggatccaggccgtagtatgagcagagtgcagcctgctgggactggtgggcagaatgagcccgaccaaaattcgggcagaggtgccatttttccagctggaaaagtgacactccaaggatcctgtgacaatggctccactgaaaaatgatttcgaataactgtaataataggtaaggtcattgtgaacgcatgttaatcttcagtagtctagtttgatttctttcaaacattgcttctacttagcaacgcaattgaaaaataaatctccaatttataggggaaaaaaaacctccatagattggaataaaggccctctactgtctagatctcacctgtgtttctagatcttgtactattctacatgcacctgttgctccaacctagctgaacttcactgttcctcaggaagccctcagcaatgctgtcttaacttcctttcttcacattttcaatgtcgggaagatcttttcactagcagcttccccttcctttacccatatccaaatcctaccagtcctttaagacagtgtttcttaaaactgaataatgaacagactcctaaaataaattcttatgatcctagagaatgttttcagtaggctggggtccacagaccagtttgaaaagcacaaatataaagaactaaagagcaattgtataaaattatgcaaatgatcaagttgaaagacaaatttcatctttataactggtaaaataactcgtattttgccatagaactctgattcttatcttcagatctatgatccgtttaagaaacactaaggcaaagctgaaaccttggaaaatgttcctgcatcaccccaaggtaatacatttttattttttctgatttggtgtctaacaactttctgccttggagtagctagtaatatgtagcattttcctagaaaacataagctctttgaagacagggaccacattttatttattttttatatgcaccacacctaatacacagtacatcctcagcaagtactggctgtaaagcctatattccatgctcttattttgtagtccaaatcactttaaaaatcacacttcttctattgttcatactcatagaagagcatattactcaaatagctctgctataaattaacagtaagtttcagaagttataccaagtcacgagactcagatttttaaaaagtgccacaaagtgtctcttctgtgtcaatgttaatagaaccctttctttaaatgatcagtaggcaaattaagaatttccggataaagaacaaactctggaaaaacaaagctagtgggagaggccctgtaaatacctacctagtcttacaagggctgtctctaactcagcttgtattttaggcagcgtcttcagtttttcaactaatgtgtttgagaaaactgttttcctcggacatgcaggcgtggactccttacttcaggtaaggtgacagcagcttgacagagagtgccttccctcccacggcatttgggacgaggctgaaggaaagacacaggcggggttacgggaaacccattctctgcgccatctgggcaagctgaagtcagtttttccgctttctcacgaggtaatggattatcatgggctcaggtccccttcagctctgaaacaggtattctatggctctaagtaaacacggcaagagacaggttatttctttggtaagatcagttgtatttcccagagaataaaacgggcaacaaaccatttatcgatatgtgagtcttccccctaggccctagctatttggggttggataaagaaaaagagggtttgcttcctttttggcgggtcctccaatgacagggctcctggcccgctgcgggtccaactcccacctctcgtggctcccccgaggccgagcgaggctccgtgcgaggacagcccctcaaccgcactccccagagggagcgctgggactcgcggaggagattagtccccggtcataaacaacctctcacttcccctcccccgcccgcgcccgctcgcgccggggcggcgcgccggggcggccctccgaggcccaggaacctcctccggcgcccgcgaggccccgagtcctcctccggagggcggctgcgggcctgccctcttctcctaaccaggtgtttgtccactttactcaacccttcttactcgtccacgctacggccacctcacaggggcggctgacgccagcccctttttccctcccctcgacccctatcacctccaacagccaaggagaggccggcggccctgacgcgcaggctcaccgccgcggccgccccgcgcgcgcggacgcggcccccgcccccacctcgcggtccttccgcagtccggccccgccccttcccgaagcccgcctccgggtcggcccgcccgcccgctcgcgcgcacccgacgccccgcctctgcgcgtgctcaataactgtccccggagccggcctacaagcttcccccgcccctgagctgtttaaatatgctaatgaaaggatagggcctgaccagtagaacggcgaggcggtgtatcacgtggctcggggacgtgtcaggggcggagcctccgcagcccctgcccgagttaaaaccggagtgtgagagagaaaagcgcttcagtagcgagaggggctgagaaagtggtgacaccgccggggtgcggagggagtccctgaaacttctcccaacagccccagggccaatcttccctcagcccactcccctcttcgccagctcccaggtccccactcctgtaccgggggtggggtggggagccaggcccgtctcccgctgggacacacacaggggccgggagcggggacgggacccccgaggcgggggggacgaaccgacagacagacggctgggcgcccgccccagcgggcaggcaggcaggaggaggcggaggcgggggtacgacggggagcactgggtctggggagtttcctctcaactatcgggggagaaactccccgcagccggaggaaagacccagacagtgttttcctcccgggggccgtgctcccccgccccgcgtagcggcggtcgccgccaccggcgcctccacctctaccatctcctctttctccaccacctcgggccccggtgtccccggccagcactatgcccatcttactgttcctgatagacacgtctgcctctatgaaccagcgcagccatctgggcaccacctacctggacacggccaaaggcgcggtagagaccttcatgaaggtaccgactgaccgagcccgggcggcgaccccggcccggcggcccgcgggcggcagggtgggggagggcggccggggcgggggtgtcggggacctgactgcgggagctgccgggctcggggaccccctcccccaccgcgcgggcgggcgggcgctgcgagccgggttcggccggggcccgggctccggccccgggcggtgtgtggggagcgatctgtgtgtgggggacggcgtggaggggtggccgctgcgtgtgcggtactgtgggggcggcggggccgctgggcgccccttctccgcctcgtaacctcgcctctgtgcttccctgtcgcccgccctgttcctcctcccgtcccgcagctccgtgcccgggaccctgccagcagaggagacaggtatatgctggtcactttcgaagagccgccctatgctatcaaggtaacagccctcgccctccccctttcctcccttcccttccctgttccttcctcgctcgccctccccgcccccccattcacccttcattatgctcccctcccccacccgctgcgctcccagccgctgaggtctcttccctgcgggctcccaccccctcccccgctcggcagcgtcctagcgcggcgcggagtcgcggggccaccgccgtcccctcccggcccggcccggcagcggcggcggcggcggcggcggcggcgctgctatcaacatggccgacatttcccctccgcggcgtgagcggcagcaatgaactgtgggggatatttattcaagttagccggagtgacagccgggcccggccgcgcacagccccggtttgcattaaaggggaatcggcccggccggcccggaagccagatgcggggctgccaggattggtcttgtcagattcgtcctaagagggccggtgggacagctgcaggttaacttcctaagtccggctcccatctgcttccactagtaccttcacatacccaaattttgggtattagattaggtagtaaatttgtcagtgaagttataaagtattaaggcagttaactaccaaaacctagagaggaagctgggttattcctgggccacctttggaagagagtttcctcagcagcggtacagtattaacacgttaaccaagccaaaccaaccaaaagtgaagctgctacttggtgaacgtcagattataacggctctgtgtacatggctttaaaaaatgaaaaaaaaaaatcttacatttttcttttcaggctggatggaaagaaaaccatgcaacgtttatgaatgaattgaaaaaccttcaggctgaaggacttacgactcttggccaatccctaaggacagcttttgatttattaaatttaaatagattagtaactggcatagacaactatgggcaggtaggttgaataataaggtggcaaaatagttgatttttcattttgtggaaaaacacagtccagtccaaaaactacataacatgaaatgcaagtataaaacattccaaattaaaatagaatatgcacattgttcaaaggcaaaactcttaccctactatatatattttacatccctcattttttccccctctaaaatgcattggtattcaggattagaatctgaaacttttgctataaagttgacatacattggttttaatcccttgaaagttcagtaaagacctaaaaggaaaagcatcctaccacaccacactcatgttgtatgtgcaactattatagtggcttagagacactagttcgtgttcttcgtttctatattagtaaagatgttagaggaaattaatctgtttgttgcatcagggtttaatgtgaccatgttgtataactattctgaaaggtaagaagtttttcactggagtacagtcactggctgagaacatttaagttttcttttgaagcatacacagttaacaactattgcaggaagaactctgaattaaatttcaggcccagagttttgatttaaactccaaacccttggaaaaaaagactgctggaaaatatgaaagaacccttcgtttcttaacccccacaagtccttttattgcacttactttcatgtatttgaggatgagaggagctttaaatcaacaataattcactaaggaataatgcaaggtggtctattgtaacattttatgatattattgccctggaaataaaagatactgaacaatgtataatgttacatgtaacaaaggaatattatttccaaggagctcagttcttatgttgtagtgaaaagcactattcctaattatatattgggtatatgttgtattttcccaagtcccacagtccctagttttgtgagtttcgtacatttcagggaaattcttt

SEQ ID NO: 6331 - DNA, 6000 bp, Homo sapiens
attgcaccattgcactctagcctagacaacaacagcaaaactacatctcaaaaaaagaaaaaaaaaaagaaagaaggaaaagatgaaggaacaggagttctgcagccactcaaagcctcacgtgcacacacattctgtctctcttctcgtcattcctccacccccagcggttacctatggttatagttaatcaccacccaagtgcaacttcaagcaacgctggaaccaaagtgttccatggtcacaaatgtttgacctgaaattacaagattaataactagtctagtatttaaaggagaatctgtaatggtgctaatgtttctagtgggactttgttctcagagaactctttttatgccagatgtgccaggtaatcacgtgttttaacttcgagccttgaagtctctctgtgtgtaatatgtgtatacactgtattctcttggggtacattgttttcctggaaaaaaactgtacctcggcttccaccggcagtgtcaggggggtgggggagggctctctgaagcggaaagacatctaccttttcagtctgatctgagtagatgctaggattaaagacccaggaaaggagaggtgttgaaatccatttttctttttctccattctaaccagtttcctgctttccattgctttccattattagaagaaaatatagaaattaaggttgtgaacagaggtagagaaatggaaagatatggaattttttttcccttttttttttttttgagacagagcctcactctgtcaccctggctggagggagggcagtggcgtgattacagctccctgcagcctcaacgatcctcccacctcagcctcccaagtagctggtatagtgtaggtgtgtgccaccaccccagctaattttctaaaattttttgtggagatggggtctccctgtgttggccaggctggtctcaaactcctagccttggggttacaggcatgagccgtcacgcctggccaagttgtgggattagaatgatcatatagaaatagcttggaaaggaaagaacaattaaagctgtctggggcttgatacaagtcaaggcaaaaattagtgttttattaggttgtatctattaagattaagctagcaaagagatggtatagggagaattaccatagaaagatacttgaatttcatgagttaatttttttttaatttgctctaaaacagtgtttttcaaccttggcactattaatgttttacagcagacagttctttcttgtgggggctgttctgggtttgtgggatgtttagtggcgtccctggtctccacctactagatgccagtgggacctctcaattgtgacaacctaaaatgtctccagacagtgccaaacacccccctggagggcaaaatcgtccctgagaactgctggttttagaacctttccctaatacgaagtgtggtttgaggaccaggagcatcagcaatatctgggagagggttaggaattcaggatcccaggccccaccccctccccaggcctgctgagtcggaatttccatctacaaggtcctcgggaggctcctctgtgcagtactttattttttattttattttattttattttatttttatttttattcgagacggtttctctcttgtcgctctggctggagtgcagtggtgcaatctcagcttactacgacctccacctcccaggttcaagcaattctcctgcctcagcctcccgagtagctgggattacaggcacatgccaccacgtccagctaatttttgtatttttagtagagacagggttttaccatgttggccaggctggtctcgaactcctgacctcaggtgatccacccacctcagcctcccaaagtgctgggattacaggcgtgagccaccacgccaggcctcctctgtgccgtttttcaggagcaggagagagttcggttgaatttacatgaataaagatacagtgaaaggtagctattctcaaaaattggattaaaatggggccattttgatgatgcatttaagaaggaagggggcagtcttgtgtttggctcaggcctcttcaccacatgaacctgccaccccttggtaactgtcctgcagctcacaggaaaactgtgagaagacaatggctgctacgcagggagcatctgccttctagaaagtggttttcaaccaggcagaaacggtcttctgtgacccactaagatcatgtctcacatgggtgaataaaatcagaattctttgaactgattaacccagcactggcccatgtattagataattagtggctcccagcatttctgggagagggttaagtagggatgtcatccttgctctgaaaaccacaaattaccactgacttctgatgatgtgtgatctcctttgccgcaaagaagatcatattaaagagacccaagtcatttaggggcagctttaacaatatccactgagtatgtgcagactgctttatccagattgggcagggagttctgtcgatgacactgcctgcagcagtgacatttatagaaagtccatggcaggagagagaatagaatccagggcccatctctcctttcgcctgtaactacaggtttaattttaccggctagaaagtaactatcgtggtgctattggaaactgttaacataggtggactgctaattgaagttatttgttgttcccctcatgggtcatggacagagctgtaaattgatagaggtggccgtcctccacaccacggccctgcctggcaaaggcctgctctcatcaatgtgtggtttccaaagtcaccctgtccatctccattccagccagctggaaggggaaaccaagtgggaatgtgtgcccaagttttacaaccaaacatccaaaatggtacgtgtcgcttctcccacattccataaggctagaactcagccccgcaacctagtttaactgcaggggaggctgggagatgtcatctagttgtaacccagcgagaaaactactggacaactagatttctgcacaagagatctccagagctccattagagattatcatgtgtgttcatcccatttctaaagatgccaaagtgcactggcacttaaggttcacttacatggctgggtttttgaggttgatggctgcctttatcttccagtatgattactgcccaggaaaacactctgttgcatgaactaaaggactgttttatagtgaccaaaaaaagtggggagggggtatctctcgagggcttttcctaggaatcccaaatttctagctatcctgaatcttgtagaactcctacacgcagactgtgaaatcattactatcaggggcttactaaataataaatatgatctattaccttgagctaatttcatagaaacgtacggctgttatgtgtttttttaaagagctgcagaggtcttccgtgattctctagtctatgtgttccttgtctagattgagtaatgaaattgtgaagtgtaattgctgcctaacacagccaagctctcccgtggctgattgtcttgctttgctttcttagggtttaaatgcggtatttgacatcttggtgataggcaaattcaatgttctggaaattgtccagaaggtactacataaggacaagtcattagaggtgagtctgtacttttatctccagcccagacatggaaaatgtcaagtaccagctgatttaaaatgccattctcaaatattccttgtgattttgaattctacaataaccagccttttaaagcacagtgttgaagcagttcaggcagaattgctgcacatctgtacctggctcagccacacttttatgtgaaaatcagccacctctggggctttgcgatgtccttgcagaatctcggcatgctcaggaacgggggcctcctcttcagaatgaccctgctcacctctggaggggctgggatgctctacgtgcgctggaggatcatgggcacgggcccgccggccttcaccgaggtggacaacccggcctcctttgctgacagcatgctggtgagggtgagttctgagcctgccgccccctggactcttttcttcccccaccagattcccagatccctcacccctcctcctcgtctcactcctctgcacgccaacaaaatccccaatacacgcgccacctccatgtttgcttgcgatcactaaagatgttctgggatgaaagcaggtcttcctgagggggttgaaagggcatgcagaagctccttgcatttccgttctaacaaggagtaaagagggtggttccttctcacatcagggtccttgccagtcccgtgaaagggctccctaaccctgtggctgggttaaggctaaatataaccttcttggtggtatctttagaagactagtggtgtcaagactattcttttagatttgccttttttctaaaggcaagggtatcaagccacagattcttagctgtgcatttcatagagaccaaaatcaagagaacagccatcgaagcctgttatgttattgggtgtataggtgaccctgggtcctcagatttagaggtcacaggcttcaggcagcaaatagatcatagctttgccagaaatataacgaatgtattgcatagtctgatggctttgccatatttttatataccaaaatctgaatacatttaatacatttttacagactatagtcacatacccaatacacgttggcaacattttatttgatacaactgctttcattgagcagaagcatatgagtgcctccaaagtgaagttagtgcgtatatatgtgttttttaagttcagtatcaaatagatgtttgttctccttttgactggcaggccgtaaactacaattactactattcattgaatgcctggctgctgctgtgtccctggtggctgtgttttgattggtcaatgggctgcatccccctcattaagtccatcagcgactggagggtaattgcacttgcagcactctggttctgcctaattggcctgatatgccaagccctgtgctctgaagacggccacaagagaaggtaagaggcagcactgaatcttaagttccacgctggttgagtcagaagcgttttgtgaaatcctgcgctgatcatttttatgattttgtggaagtcacgtctaaggacatttgtttcaaatgcatatttatggctaggatgagttccatccatttggaatccatggctggcttccgcgggtggggagcgaggctggaagaggagctacggatgactgcttcatccctcccttcccctttccctaggaagtagcattttgcgatccttttcaccataggtggtaaagagtaatttacggtcagaacagagagtgtaattgatgtgtgttgtgcccattattgcacaattcttcctcaaaacaccctggtgaacgctgccatgattccctctgttgtagctgggtacaaaataagccattgccccaaagagactgttctttcttgatggaaaaaaaagttattgagaaaataattggggaaaacaaatgtgtttcatgaaaaagaaaactgtttaaggtgatttcctttaagcctaagtgtttatggaattagattagtaatgtctcaaaataaattaagttttaagtttacctgtgtgttgaattggttagtaattctaaggagccacaaactttagtcccagttcccttatccacagaaaatgggatttttatagaaatactgtagccacagggcccaagaaggagccaccaaaattgacctagagtcttaattcatcctcttgcatcataggggacattgggaatgatcaggtggttccagaagtgtttcaatgctcagcttcgtatctccctgactgaaatttatggtggtgatgtagcaaccaaaaaatggtatttgtttatttcaaatttcataaactttaaacttacttaagtgttattattctcattacattttggaggaatttttttttccccgtgaaaactgattgggacagtttttgaattaattgaga

SEQ ID NO: 6332 - DNA, 6000 bp, Homo sapiens
tcgtttataattaaaggttttgtttacaaataaactgctaataggagaaaatcctaaaggtagtttgacccagactcaggaacatgtgtcacgggaagagaggctgtaccgagactgagtggacaaagccacccatctctcatgacgtggcggaaggcccggacttctccgaggctctggcatggacttgtaagctggacgctgtgctctctcgctaaagcttgtgtccctttccccaaaccatagcctaaaagaattcatcaatctgttagtttagggttatttcggccataattttttttagagctttagtgcctgccaatacttatctgctgatgagtgctagcaaatgcccacatgaaacaataaatacgttaagtgctcaaattggaattatgtgtaatttaacagggttttgttgttgttgtggctccttattgtgatcttttgacattagatacatagaaagtaattaatttctgcaagtaaaatgatccttagtttgcttgatggatctaagcatactgttgtgtaatggtattcagtagaggaagcctgacttccgggctccatgcctcctgaacaacttggaggatcgctgcccaagggcacagctaagacctgaagtttagggagacaggcttgggctcagcatttagaataatctaacaacccagagtttaatgaaacgggctgtggtttgaaaattaatccccaccagtgaagttactcaagtcgaggccaggtggccccctgctggaagcatcttggaagggattccagcatttccatccttgcaggagagatgatgcacagcctctaagaagcagtgttgacacctgcggttccatgatttgtcgggagcacaaagcttattgcaccccttttgatagagagtagatagtcacttcactcactgaacatatactgcccttccagcgtcagtcgggcctgctgatttagtcagaacaatttttagttgctcctatgagccaggcatggtgccagccgtccagccgtgaacaggcttactctcaagagggtgcaccctgcctttagggagcatcagagccacctggaaagcttgttaaaggccgattactggttcccatcctcaatttctgattcatcagatctcagtggggcctgagtctaataagatccaggtgcaggttcatggaccacacacccgtgagtggcactggtttagggcaatggttctcaagtgggagtgatttcctaccctccccacgcccctactgacatccggcaatatctgtgacatttttgattgtcaccactgaggggagcggtagggggtggtgctactggcctctgatgagtagaagctgagggtactgctaaacattctgtgattcacagggcaacccccctccaaaaaaagtaagtagcccacatgtgatgagtgccgaggtggacagaccctcgactcgggaatgacagaaaatcaagtgcttgtgataaactctgtgaggaatattgtgatagactgtgatcagggcagtttagagcactacagctgggcctaacctaatctacgggggcagtcagtgaacaaggctcacctcacagcggcagtcagggacttggagcggtgcacggggctcacctgctcacaggggcagtcagggacatggagaggtgcacggggctcacctgctcacaggggcagtcagggacatggagaggtgaaccgggcttacctgctcacagagggctcacctgctcacaggggcagtcaggtgtgcatacagcaggggtgtttgctctcttaactgtggaaggaaacaagtgaattgcagagagacctgcctgagagggtggggtttggcttttcacagcataagtgacatttaacagctttattgattgggtaggattctgccaggactgttctgccccaagggaactcagtaagcacacccaggtgagaacctgcaagtgggcagtggtggtgggcctggagtgagtgtatgctgggaggggctggagagggttcgcggtggccacttcagcaaggcctttaaagccacggtcagaagaggaaccattatcctgaaggcaaaagagataattagaaggcataaaacaagaatgttcaggccgggtgcagtggctcacgcctgtaatcccagcactttgggaggccgaggcgggtggatcacaaggtcaggagttcaggaccagactggccaacatggtgaaccccgtctctactaaaaatacaaaaattagctgggcgtggtagcgtgcatctgtagtcccagctactcaggaggctgaggcaggagagtttcttgaacccgggaggcggaggttgcagtgagccgagatcgcaccattgcactctagcctgggtgacagagcgatactccatctcaaaaaaaaaaagtatgttcgttgtgttttatgagacaatgggatctcagttaatgaggctttcctgtcgatcagctggccttgtgaaaagctttaaagtgcctcagctataatagccaagtcaagtcaactttttgtataatagctattccatttgtttgtattttaaatctagaaatttgatacgcagagattctccccccaaaaagctgaaagggccagactttctgctgctgctggagactgtgtgggagtgaggaggctgtcctagcagcccagctgtatagctgcaagctgctagtgttgggcacatcaggagttagtcctgctcatggttcattgagagccaggggcccagctggggacaggccttctcatcttgacagggtctcaaccccattgtagagcatttgaggtgaagagcgcctcccggccgggcgcaataactcacgcctgtaatcccagcactttgggaggccaaggtaggcggatcatgaggtcaggagatggagaccatcctggctaacacggtgaaaccccgtctctactaaaaatacaaaaaattagctgggcatggtggcgggcgcctgtagtcccagctactcgggagcctgaggcaggagaatggtgaacccaggaggcggaacttgcagtgacccgagatcgtgccactgcactccagcctgggcgacagagtgagactctgtctcaaaaagaaaaaaaaaaaaaaaaaaagagcgcctcccacccccaggccagaacgcactggctgttttcaggacaggaaggccttccatcctggggtgttgctgattctatctcaagtattcacaagtatttttctatccctccttgcagggtctgcaggacacacacaaacacttgttaatttccccagcaggcagtttaatgagagtcacggtgtatttgttacactatccagttgtctggcacattttgtggcacagtggctgatcagccacccacttgactactgcatcaaagccccattggaaattccatccccctctaagctgaccaggtttggctgacccaagtaccacaaacattaattaaatgatttctgtagtcccagcattataccaagtgatttttaacatgcttagtttttaacatagtcttttaatatacacacatggttaaaataatgtaaagagtactgaaggttatgtaatgaaaagtaagattaaaagtaagactttctccctcctctaccccaattcttcattttagaacttctcagaaactagtcaatttcttatgtgttgtcatagagatatattttgcatttgcaagcattctttatgagtttttctcacaaatggccaggtgttcctatgtaattttttcctttcgaatatatcctgaggtcggtaacgttgcccccacgttataggtgagttccttgagaccgtgaaagtcacttgctcagtgtcacgcagtgagtggcagagctggcattcagatgcttacatagagccataggcattcagaccgggagttccaggtgtaagtggaattgaaccgagtaatgccaggcgagctaacaattggattctccaagaaggttcgcttttgtcccacttgataccgatctcttttttatatgttggcttattcatttagatgaagagtggggacttcacaacggagaggagtatccatgcagcttccctctcctccctagtagtttagttctggcccccaaattgcacgcaccaccgacgagatagtgtacagccagaccctgctcgcagaaggccacttagggaccagtggtggttactggagctgccacccacctgagcttcttacagtgttcacacgtctggggatgttttggcttcttgttggtgctcgagcccccatgcagattggcagcccagcctggtccatgtctttacctgccccaggtgctaggtaggtgccagctctgtcagtagctgtgtatcctttggtaggggttggagctgttccacacagggagcagagcagacccatcctaagccacctggtgtccacagggcccaaactcctattccaggagtagtggagattctcagaggcattcccagcagctccatcatggcagcagcagtgaccattggggtcatcttgaaaccagatggactgtttgcagtctcagtgagagttctcaaaaagactcgtcagaatggtctagcaggtgactggtaggttgggaagaaggtacctgctgcgtggggactctggcatgagacgtctttgtggccagggcttcatgacagtgcctcccaaaggccctgggcacgttctcaggagagccttgagtggggacataggtaccatttagaaggtgttgtctaatgcactcttgcccacagagaagtgctgtctgaagcccaaaccctgtttttaagttatggttgtttaaggtatttgcttagaattttagttcctgatgctaaaaaactgagctgcattccatgacttttgcactgatcatttctcttaattggcaggtaacaaggagggagcgcattcttccaccttctgggtgctgctgagtatctttctgggagcagtggccatgctgtgcaaagagcaagggatcactgtgctggtgagagccgcaacatggctggggcctgctttttctgtgtgtccttttccctcctataaagacatctggggctggccctgcctctgtggcgttctccacgcctacatcccattgctggcctgaggtgatagacctttctggacaaatggctttcgctgtcacaattctggcattgcagatggagaattgactgactttcttgacagtcatgtgcaactggggagaaatggtgaatgaggagttcttagggagccatgatgagtgctcttgagaggccctgtagaaaaagataaaagaatggtttgagttttctgggatgcttgtacatatttcagcagtcctagatcacctaggactgacctcatcaatggttttgatcctggatctagaaaggctggtggatagtttagaaatgaaggaacagggccgggcgccatggctcacgcctgtaatcccagcactttgggaggccaaggcgggcagatcacctgaggtcgggagttcgaaaccagcctgaccaacatggagaaaccccttctctactaaaaatacaaaattagccaggcgcgatggtgcatgcctataatcccagctactcaggaggttgaggcaggtgaatcgcttgaacccaggaggcggaggtggcggtaagccgagattgcaccattgcactctagcctagacaacaacagcaaaactacatctcaaaaaaagaaaaaaaaaaagaaagaaggaaaagatgaaggaacaggagttctgcagccactcaaagcctcacgtgcacacacattctgtctctcttctcgtcattcctccacccccagcggttacctatggttatagttaatcaccacccaagtgcaacttcaagcaacgctggaaccaaagtgttccatggtcacaaatgtttgacctgaaattacaagattaataactagtctagtatttaaaggagaatctgtaatggtgctaatgtt

SEQ ID NO: 6333 - DNA, 6000 bp, Homo sapiens
ggttctgaagatccttccacagtaccacgctgggaaagcttcatagagaaggtgaccatgtgggatgagtattcaaagaggaagcgatgttgacaggcagagacagaggcagggccatctgagcaagtcaaatggcaaagatgtaaaaactggaaaggttaagatatacttggaaaaaggtgagcagaacatgttagctgaagcatgagcaatgtgcaggggaaccaaaaataagaaaaaagtatcttgcactgtggctgcatcacatatgatcttaaccactagacaagtttatttattttaatatgtatattttttgaggtggagttttgctcttgttgcccaggctggagtgcagtggtgcgatctcggctcactgtaacctcccttttccaggttcaagcgattctcctgcctcagcgttccaagtagctgggattacaggcgttggcaccgtgcctggctaactttttgtattttttttagtagagacggggtttcaccatgttggtcaggctggtcttgaactccttttttttttttttttttttgatggagtcttgctcagttgcccaggctggagtgcagtggcctgatctcggctcactgcaagctccgcctcctgggttcaggccattctcctgcctcagcctcccgagtagctgggactacaggtacccgccaccacgcctggctaatttttttgtatttttagtagagacggggtttcaccatgttggccaggatggtctcgatctcctgacctcgtgatccacctgcctcggcctcccaaagcgctgggattacaggcatgagccactgcgcctggcctggtcttgaactcttgacctcaggtgatccacccgcctcggcctcctaaagtgctgagattacaggcgtgagccacggagcctggccctagactgagtttataaatgatttgacagacaatggcagaggagaagggtatgctgattgggagcagagatgaagtcaggaagatctggagaagtgagtcagattgctgtggagggattggggaggcaggtggactgcttaggaggtgttaaggtagtctcgtgggtggcatgggaagaagagagagatgccagaaacactgagtggtgaattaacatggtgactaggtgagggagttgagggagagagacaagaagtaaagacggctcttagcttggagaggtgtccctggaagaatggttatgccagtaatagaggggtgagtttgcagaaagaagctgacttaggaggcaaatcatgaagtccttttcccatctgttatgcttgtgttgcctacggcatactgctacctgactgactgctggcatgactccccatgccttgggaaggtggagagtgagtcagaggatttgattgacccctgggctgagggcccttccttcctgtctcccccgagaccccctagtccttcatacatgtgcccgatgaatacaatgcttggtatacagtagacactcacaatatgtgtggaaaataaatccatttaaaagaagagctgtccagagaagtttcaggccaaggatgatgattagagtgaggcaaaagagaaggagatagtttctaacaatgagaagcaccaaatttgagtccctggaggtggtcatttcccagagattaaggtctccaaggtctggtgcaggcttgcactttttaccacttgagtggtaaaaaacttggtgaagttaaggatgtagaaagactgtggtgtcagggtgccacatttgtgaatgctgaagttaccaggggtactggcaaagaataaaaatgagtaaactagatccaggcaaaagggcagccctgctttggactgggtgtgaagaaaggtggcataaagtaacctgaaaagggaatacctactaaattataatagagactgagcaacagtctgaaaatttctcttccatttagccaaggagaatggcaaacacacaagttctgtttccttaaaacccagagttgagctaatgtattctttcttttttcttttttttgagacagagtctcattctgttacccaggctggagtgcagtggcgcaatctcaactcactgcaacctccgcctcccaggttcaagcgattctcctgcctcagcttcctgagcacctgtgactacaggcatgcaccaccatgcctgcctaatttttgtatttttgtagagaaagggtttcactatgtgggccatggttggccagactggtctcaaactcctgacctcaggtgatcctcccacctcagcctcccaaagtgctgggattacaggcatgagccactgtgccctgcctaatgtattccttctaaattcatagctggtgtgtgtgtgtgtgtttcccttcaaatgagtggttagactaagatcaggtgttgcaaactgaggacctgatattctgaagtgactgaaatgcttaagtccattaacaaaatgtgaattaacatttaaaaataaagagaaaaagaatctacctttttggttttccttgaaaagtggaatcttctggcaacactgggccacagtccagtatgaccagaggatctgaagcctgtgtttatcaataggccacaccccaccactcacaagacgaatgcccctggacatagcttggccaccaaaggcttctgaattcctgacttctgggcctcaggttctttaaggccctttcgcttttttttttttttttttttctgtatctcctcatatatttattctttttctgtgatcagtgtcctttgcatgtttttgttgggttgtttgaattttttatttttattttttggggatggagtctcactctgtcgcctaggctggagtgcagtgacacgatctcagctcactgcaacctccgcctcccaggttcaagcaattctcctgcctcaggctcccaagtagctgagattacaggtatgcgccatatgcccgtctaatttttgtattttttttagtagaggtggggtttcaccatgttggccaggctggtctcgacctcctgaccttgtgatccacccacctcgacctcccaaagtgctgggattacaggcatgagccaccgcgcccagccaaggccctttcgctttaaagattgtcctttttgatctcttcatggtatagtcctaccaacttttgacctcagttcaattataagtactacaacattacatacctgctcatgtctaccatagattctgaaaattaacatacaagcaaatgaagcccacctgctccagaaagtagctttttgtttttgttgttgttgtttttgttgttttgtttgagacagagtctccctctgtcgccaggctggagtgcagtggcgccatctcggctcgctgcaacctccgcctaccgggttcaagcgattctcctgcctcagcctccaggcatgcgccaccacgcccagctaatttttgtatatttagtaaagaaggggtttcaccatgcgggccatggttggccagactggtctcggtctcttgaccttgtgatctgccctcctcggcctcccaaagtgctgggattacaggcgtgagccaccacacccggccgaaagcagctctttatcagtgtaatccatccaaatttccctctttcattctttcgatgcccccagagggagtgggagtgctacacaggagagtctgcggaccagggctgggctgctgcctgaaggctaagattctgtgtggtggtagaacaagaagtgttggggggcatgtaaatacagggactgccagagtgaaggttgcagaaccgggcttggaaggatgatgaagaaactgggcgacactaaagcgccagttcaacaagtattgcgtatctacgacgtggtaggcattgttttgacactagagattcagcagtaattcaaccaaagtacctgctctcattgagctgaatttccgcgcgggcacctaggtaacgcatataaacactcgtatcacatacatacacatgtacatgtcaggtagaaatgctatttataaaactgaagcagagcatgggaagagcgaatgaaggtggctatttgagaagacccccaaaaaagcgagactgcaaagcactcgcggttgttccttttctgatcttctagctacaggcagcgaggtgcgctcccaggaaggcccgccctcttcctcctgatagggcgcaaggtgccagggacgctcccccgctcttccccgcccagaggcggccttgtgggggcggagctttgtgcccagcaacatgagcgcggcgcgcaaagagccgcgcgcggaagggtcccggcattctcctcgttctcactaggcgtggagaattactccaggcggatcgtggcatgatgggaactgtagttgacgaccgccgccccgcgcctgaggggcagtaaaagtcgccaggtccggctccatttctggcacaaaacttgcagcaccgaggggttgtggagagcccttgcaggggaagagggcagggtcatcccgagaaccaacgggcacgtatagcccggcgaacgcccaagccggtcaccgcccccggtcacgtgtcgccagcctccgcggccgcgcgccgctctcagcaccgttcccgccccacccggcccggcagtcggcccgcgcctcccccggcgctactgccacctcgcgctcggaggcgtcacagaacgtgctcttctctcccctcccccctcccgctctccccctcctccccctcccgctccaagattcgccgccgccgccgccgcagccgcaggagtagccgccgccggagccgcgcgcagccatggccgagaaccccagcttggagaaccaccgcatcaagagcttcaagaacaagggccgcgatgtggaagtgagtgtgcttccgcggtctgggcccgcctggccgcgccggcccggcgacgcggggaggggcggggggccggcgccgggctggttctcgtcggcttgtggtcggccggagttggccgccgcctcccgtcaccgcggccccgggctgggcggagcgggcggcgagacgccggccgggctgcagtcaccccccggagctgccggcgcggcgaccgggaaatgccggcgttttcggccccgtcacgcgggcgcggcctggtgtcggcgaggaggggatgtggagctgaggcggggtccgcgggccagggccgcccggatgaacggggatgctgccgcccgggccctccgaccgcacagccgagggggcggccgctgcttgcgcccgccaccggtgcaaccttccgtccggtgcagccccctctgcgcctcccgcgcggctcacatggagcctcggctctgccggtccgggctcctaccttctgcgagccgggcccaggcgggcggtggcggcccgcagaggggggtggggaccagccgggtaactgacttgtttgagggtgatcgatgggggagggtaggatgcgccaggaccattttcttatattccagtgctcgtctttggactagtcgtgccgagctgttgcagctcatactcctgcaactgctggcatttggagcgagctgaaggtggacaatagtttgccatctattgtgttcaggcttcggaaaagaggttgctccgacctccgctcataggacttgttttcttagcctttcttggagtggggtgtgcatagggtgataatttctttgacacgttttactaaaataaattggatacacaggttcataattctcttacatacctcttgctccaagctagtagaatttccaagtggttgcaaaactaaacattcatcgcggtcactcagttagttgctactcagcatgttgccattgtctcattaaggtgacattagcaggtactatttgcaaactcggcttattgaggcagcgctagaggtctctctgcagctactgaaaacagtaagtataatgcacaaacttcactgggaccgtgacctttggatttgttagggggaaaatggttttaaggccgcagccttctttgctaatac

SEQ ID NO: 6334 - DNA, 6000 bp, Homo sapiens
atgctaggaagtggggctcaggaggtggtaatttagaacttttttattttcattagaagcttctgagtaccatttgactttagactatgtatatatgttgtttgatgaaaataaaaaataggccgggtgaagtggctcacatagcaaggctctgccttaaaaaaataaaataggccaagcatagtggctcctgcctataatcccagcattttgagaggccaaggcgggcagatcacctgaggtcaggagttcgagaccagcctggccaacatggcgaaaccccatctctactaaaaatacaaaaattagccaggcatggtggcacatgcctgtaatcccagctacttgggaggctgaggcaggagaattgcttgaacctgggaggtggaggttgtagtgagctgagatcgtgccactgcactccagcctaggtgacagagcaagactctgtctcaaaaatataataataaaattaaaaaaatttttttaaagatacatagtgtattcagctatctattccgcctacccttagggacagccttggttgagtttctcgctgcacctccaaacctccacaccaactgcttgcagctgctttttgctcagaatttcaagctgtgcatttatttgatagtgtttgtatgaggggttcttcaaaaagttcatgaaaagtgtgtattatagaaaaactatagatgcatttcaaaatatttttccaccaaaataaagtcatactaacttgttataacatgtatgaacaggatctagtttgaggcacaagaaggataagacatcagtttgacaagagcccctatcagaacaatatgaattctactaaaattgaagcaagaatatcaaattgatggtgaagcttgtgtggaagaatggtgaaatcttgatgctttatgaaaagtttatgaggacaatgccctaaagaaatcagcagttttacaaatagaaaactcatttgaagaagggatgagatgatgttgaagataaagcctgcagcagcagaccatccacatcaatttgcaaggaaaatatttatcttgtttgtgccctaattgcagaggacaagcaattaatagacaacactatagacatctcaatttgttcagcctatacaattctgactcaaaaactaaagttgagcaaactttccaatcaatggatgccaaaactgttatgcccaaatcacctgcagacaagagcagggcattcaatggaaattttaaacaagtgagatcaagatcctgaggcacttctttgaagagctgtaacaggagatgaaaaatggctttaccagcacaatcctgatgataaagcaaaatcgaagcaatggctatcaagaggtggaagtggtccagtcaaagcaaaagcagaccagtcaagatcaaacagcatggcaacagtttttgggatgctcaaggcattttgtctggtgactttctggaaagccaaagaatgataacaatggcttattatgagagtgttttgagaaagttagcaaaagctttagcagaaaaacacccgagaaagcttcaccggagagtccttctccaccacaacaatactcctgctcattcctctcatcaaacaaggacaattttggaaatgtttcaatgggaaatcattgaacatccaccttacagtcctgatctgacttctttttgtttcctaatcttaaaaaaatctgggccaggctcagtgtctcatgcctgtagtcccagcactttgggaggccgaggggggtggatcacttgaggtcaggagtttgagaccagcctggccatcatggcaaaaccccatctctactaaaaatacaaaaattagctaggcatggtggcacatgcctgtaatcccagctactcgggaggctgagacaggagaatcacttgaacccgggaggtggaggttgcagtgagccaagattgtgccactgcactccagcttgagcaagacaacagagcaagactctgtctcaaaactaaataaataaataaaatctgtaaagggcactcatttttcttcagttaataatgtattgggaggattgcttgagcctgggaggtcaaggttgcagtgagctgtggttgcaccactgccctccagcctgagtgacagagagtgagaccctgtggcaaaaaaaaaaagaaaagaaaaaagtaaaaaagacagcattgacacggttaaattccaagggccctcatttatttagggatgaactaaatggctggtatcgtcatttacaaaagtgtcttgaactagatggagcttatgttgagaaataaagtttatattttaaattattatcttttaattccatttttccatgaactttttgaagtcctctcatattttaggtcagaggttcccagtccttttagtacctgaatatccttctttctttacagagagctgggataaccagtggtaaagagcacagaccctggagccagactctgggttcagattccagctttgccatttactatatgaccccggcatgtgtcttaacatttctgcccctcagtttcattatctgtaacatagggatagtaacagtacttacctcataggagtgttaggaaaattaaacaagttaatatttttgaagtgcttagaacactgcccaccatgtcaataaaatttcatgagaaagtagtgtcctttttgaatctacagattgagaaaatatgtacctaactccaaattaccatgaattcagtaatactatataaaataattcatatttgtttatcacgcctggatttgtacaatttgcaagacagtatatctgtgaaagatgctattacttatcagtctatagaaactgtttaatatgcatatgaatttgcaataaatctgaggaggtcaggagttcacaatacacatacatgctccacacactgatcctcagtgtctgcaaagtaggactataattggtcatttttaactaattagaatccttctagaatttttatgtttacactaatataatgttctctctcctcctaccagagtcatggctcaatatgacccgtgagagttgagtaaacaaaaccaacacataccgcagaagtttggcaccctggaaacttaacataagaaatgattgactagagtactgagaggcatgtttagaatgcaagtgtaatgaacaaagcttcaatctactttagcccattgcctgagaattgactgcattaacaaaaaagggttagccaacagcagatgcagggaacggtcagaaaacaaaaggtgacaaggatctcttgcactgtctagaggaaaaggtaccctgacctatgaacacaaataatccaatctcttgaacacaaatatccctacactgtggagacacaaagcctcatgattgtgtcattaatttttaatctatccttgtttgttctgatccaagtttaacaagcaacatcctgtgataatatggcttctcatatagttttgtctatgggaaaaagatatgtttggcactattacttttcatcgtaagtgagtaaatcagcattctagattacgcagcagttgctatgagtgaatttatttaacatgaatttctaaaagacttgtcaactctgggtgcccaggagtcaggtttagcacctccaaaaagacagagtagaggatgagaccctgaaatgaaaggactacaggtactactacctcatgggagtgaggcagtcccagaccatcttttataatagcaatatggaatcctcattcccaataggcttgtaactttgcttttttctggtagagagtgatccctactacattgttatccctaggaaaagtaggctaagacgtatttttgcctttgacaaccagttctggtttggaatgtgtggtacatcaatgacttaaactatgttaattaactactacttatgtactgtattggttccttcagttcaataattaacctgagtaatgagcaaaacattttgttggaagatgtatggctataaagatggattatagcaatgtggaagtaacctaactgtccatcgtcagatgaatggatgaacaaaaggtgccatatgcatacaatggaatattagtcttaaaaaggaaagatattccagcacatgctacatcatggatgaacctggaggacataatgctgagtgacataagccagacacaaaaagacaaatactgtatgattctgcttatatgaggtacctagagtagccaaacttacagcaatggaaagtagaatggtggttgccagggcctggagaagggagggataaggagttagcatttagtgagtacagagtttgttttacaagataaaaggttttggagatggatagttgctcaacagtatgaatgtatttaatgccactgaactatccacttaaaaatggttaaggtgggccgggtgcggtggctcacgcctgtaattccaccactttgggaggctgaggcaggcggatcacgaggtcaggagattgagaccatcctggctaacaaggtgaaaccccgtctctactaaaaatacaaaaaattagccgggcgtggtggcggtcgcctgtagtcccagctactcgggaggctgaggcaggaaaaatggcgtgaacccaggaggcggaacttgcagtgagccaagacatccgcggcgatgcactccagtctgggcaacagagcgagactcgtctcaaaaaaaaaaaaagaaagaaagaaagaaaaaaaaccattaggcccaggagaatcagactgcgttgcccccactgttctcagttcagctgtcgctcccagggtttggaccagaaagccctcgccggcccaacagatggcgccggtgtccgcagtgcgcctccaggcccaaagggggcgctctcgccaggcctctttttcctctcctgggtgactcttccgccttccgagcccgccttctcgccacgcacctgcgtcagctcgctctgcgcgtgcgccggtggcgggactctggggaaaatggctgcgtcttcgagtggtgagaaggagaaggagcggctgggaggcggtttgggagtggcgggtggtaacagcacacgagagcggctgctgtctgcgcttgaggacttggaggtcctgtctaggtaatgcggcgagcctgagagccgggctggagctgggccgggggactgaccccggagccggccggccctgcgtttgtgctcgttctcggggttcggcggggagggccagctcgggagtttcgggtgcatgagggtcatggacgtggggtccgcagccctctggcactctgggcggcggtttttcccgttagagggaattttagtaatgataagaactcgcgcggtctgagcctcttcgtccgcggccagccacttaacatttatggaacgctccttgggggctcagcattggggagacggtagtgaagggtagactggatgccagctgtcgagagagagacagatgtgtaaactggcttggggcctgtttttattagagggctgcgctgcggggtactggagcacagggactaggcaccttttttggttgtagtcagggcaggccctctgaagaaagtgctgcttgggaagcatgagctcgccaaactcactaggcagcacagatagatggaacagcaagtgcaaaaagcctggcttggtggagttgcaagttgtttaggatggttgtgtgtcagagataggagatgaaattagatgtcgttcttcatattctgtcacctttcatgataagtctttcaagttgaagccttccttgactccctcccattgacttggatggtaaattatcttggttctacctcctaaagtgtcgctccaatttgccctctcgttccaaccccgctgttcataactccttcttaaatgtagcctcccaaacagttttaattgcctcatgcttctgcactttatccttttatattggccgataccagttttaaaaggcatcttatatcacttttctgcagaaaaattatataaaagctacctcatt

SEQ ID NO: 6335 - DNA, 6000 bp, Homo sapiens
ataccatagactcccactgctcctactaacttacattcagcatttttttgtgaataattgcttctcaatttgttgtatgcctttggtgaatttcaagagccctgaaatggttgtttttcacaatattgtccagttttgttattgtataatattttattagaaaaaaattaaaacatgcaatgttttaccacaaaggtaaatagtaagacatgttctaaattgtctaactggtagccattattattagtattttgttttatagacaacaattatatgcaaaataaaatgttcatccaatctcaatgcaatattggcccttgtctagacactgtttttatgaggagttacattatctaatatttaaattattcaagttccttaaaatgtaaggattccaaaagctggtactaaacaataattcattatttagaaactcctttatctcaaaaatatgtcttttctgacagatcattaggactactgtttttaaaaaaacaggatgctagacatgtactgttagagtgtatgatgattggataaaattaaatatctctgtgaacataattataaggaaccaggttgagacttgaaaaataaatatatttgactgcagaacccagagttataaaaaatatttgtactctgctggagatgctctctcttagacaaaattgtcaaaaaggaacttcactgggattaagtgcaagcctgtgtatgcacattcaggatgcactaaactgtagttcagccaatccttttattttccaatccattgttcaccctaatcacagtcaaactaatcacaagatgaatccataaaataattaaaacaacctaaattaatgaatcatttatacttagtctcattcattttgaacatctgacataattacaacttacagctttttctttgtattagagtagatagctgttagaacttaagcaaaattcactgaaaggaactggaagatgcaataagtgtgatgtcatgaactgttttcatgtaatttttctgatctttgaataaagtaacataattaatgaatgtgttcacataatgatctgccaacaatttgaatggtcttaataaggtgacaacctgcaagaaaaagtaaaagaggttacacaactcctcactgctctggaaggaagtccagaaaggtgccagaattgcaataacttcatgggaaccaaacaaaataagtaatgatttttaaggctgaaattgaaccctacattctcaatatagtaaaattggtatttaagtgttttctttttttcagataaacatattgcaagtttcaaaatgagtgaacagaaagatgcagagccatggagaaaatattctttcatgaagaaagaaaaatccagcacattacaatgacgccctctgctgtgatttttgatactacaccaaataacctcatttccaatagtgtctcactgtctttgcagtgccaatacttccaaaaagctttgaggaaaaaatgacttaaatccttctataaagttagtcatctccaggatcttttaaaattgaagtgattgattctgggtaatgttattctgaacatagtgtttgagccacataaatgtcagtaaatcccttagtgacagcattatttatttaagaacatattttgatttattttgtattctatttaaatagttccaaaaggagattatattcatgccaaatggtttctgtaatgacaactgccgacccaatttgatagccaaaaatttttttttttaactaagaaatttttgtgtctcaaatgaccattctactaaagtgtctccatttcctgggaaaagataccaagaagcccagaaaattaaccccaaaattcatatgagactaaaaccaatgccatttgagtatcatttcttaattgccaaaagcagacacggacttacagggaagtgaataaagcctcctttgcaaggtcccttctaagtgttaggagtggacaggagttgtgaagtatttcaggtggggaggagaagtcagattgcaatgtggaagcatttctatgtaagaatttctggtcaattgcatcaagatagcttaggggataaaaaaaaagacttgaccctctaacactcaggtaaattgcaatgatttcttttcctaagttaaatatttcatgcctgtttgttgttgttcttgttgttgttgttgttgttgttttcttaaagagggccacaaaaaaaattgtataaagttcaggactgacaaaacccgaattggctgttaaacagtacaatactacccagtacaatcctgcccagaatacgttattttacttttactggggtcatcttatattaatagaaattattttagaggcaattttgaaatcaaggctaaatcatagctttaaaatgcattggtaaaatactttatacaattaaagaaaagaaacagaactaatatattcccaacagtgaagccacccagcgttcaggagcctctggctgttgatgtctatgtaggggttaaaagtactggctttggaggcaggctatcctggatttccattctgaatccatcattacctacctatgccacctttggtgagtcactcatgcctgcaaataggaggcattcaataactatttgttgaatgaatgaataaataaagaatgcatcaaccccacacactgtccacaaaactttatgaaatacagtagttcaatttacttccattttaaaaactatttgttgcacatcttttatggaaaaattttggacaaaagggtaggaggggatgcaagagtttaagcaaagtgttgtttgggtttaaaaagagtatttatatttggttgaggagattggaaaaggtttcatggagcaaacagcatttaaggaagagccctgagattattaggattagacctgggcgatgggaaagataaagcaggctggaagcatttcaggctgaggaaacaacaccataagccaagacccaaagatgaaaaaatgcagggagtatgtgttcggggaaaaatccgcagtcccaccggcttgtggtaagagaattcatgggagactggattggaagctattcagggtcatatcatcacttcagttactgatcctccccattctggagatgctcacaacttccctgtaagtgaaggttcacccaaccaccattataagttacacttgaccttctttatagacagtgcctttatttaactggtacaaaaaagtatgggacttagtaaacaataaataaactataattaaactattctagttccagaattgaaaggggattttttgattcaagcttttgtccatgtatgggttatctgtaacttttttgaatagtgacttctctcacatagagattatttgaatttcaaggttcgtgttgaagccattgactggaagactgaacgggaaggaagcataatgggcagtgggttaacaacataaattttattcttggttattagaaaggaaattgttctccaggcaaatttcaacaaagttggatgagtaaatgaaagaaatgccattctagttggtacggtataaaaagtaactaccttgggtcagaattcagtttcaaattggcctctgacacttgtctgtagtgtggtcttgggcaattcatctaacctctctatgccttgatttccacttgtataaaatgagaagtacaatcataataataaaatatgccagcagtatactgtattactatccacctgaggtaggagtatgtattttcaccccactgtctttggacctggccatgtgatgtgttttgcccagtggaatgtaacatttgccactccttttattatgagaacagcatgctcctaaggaggctgctctttcagcctgcattctagaacaaagaggacacaggaagcagagatgcagctgatctacagcttacataaaacctgaatgataaataaactttgtcattgtaagccactgagatttgcgagttgttcctgctgcaaagccaagtaatatactgcgctacccacctcacatatttgtctgaagtggactttaaaaatgttttaaagcactttataatgttctatgcccgtctatgtctcaaaccagctccttctctcgccatagattgatgcaggtcagaaaagttaacagcactaacttatgtgagacagtaaagtgagaatacctgctttcaaagctgcacctctctctcctgcctttctgccattggcccccaaattcgttgctactgccccgttaggattatactcagttcctatcccatctcctcataaaacaaaataatcgcacgggttttgttatttgtgatgtgaactttcataaaaatattgaaatggtaccgctttttctgctagtgctggccccagttcttctgagaaaatgctcagaactgccggcttctgtttcttctccatattttggttaaattttacttgaatccttcatttagtcagttttgccagaacgtctctgtggaatcctatttaaattcaaagcactctatgaaaaaatttcaaaaggatcgctttaaaaaaaaaaaaaaagacatttcaatttaactagcagtaagtaactcttgttgactaaactcattaaagaagcaaccactgagatcacacagaaaaacctcaagaggtggcaccccgactcgcattaacccagggagacatgatggctaaggaagtagatgggacaatgactgggcccgaaaacaagaaaatctttgttataaaagcctcccatttctgcacgattaagttgaaagaaggtgagcttcgagttaagcctaggcagttttgaattccagctcgcccacaatctcttgcaaccttaggccgcttacctgagactcagcctttcttacccaacaaatcagggaaaataatagctaccttacaagactagcaagtttgtcttaaatggagtgagatgagtggaacacctaacagaggtctcagacaataacagcttctccaaaaattctcgatttgtggttggctgaggtggaggaacaaaatggcggcgccggcggcgtgaccgggccctctggcccacagccgttggtagcggtggcagcagtactgctgccccaactcgctgtgccccctttctcagcccacgacatcgccacgacagcgaggcagcgaccgccaccgagaaagaggtggtggcccagcctggaaccttgagaaaccctcgcaaactgtggcctggcggaaatcctggtgtgctgcagggatcaggctgactccacgccctgtaacaccgggaaacgcctcggtggccatttccagcagccctcatcctcagccttgcgggccggtgggccccggaggcctccatcctcccctagaggggtcagggctgagcccagcctccatctttgcctctcaggatgacaaacaacagcggctccaaagccgaactcgttgtgggagggaaatacaaactggtgcggaagatcgggtctggctcctttggagacgtttatctgggcatcaccaccaccaacggcgaggacgtagcagtgaagctggaatctcagaaggtcaagcacccccagttgctgtatgagagcaaactctacacgattcttcaaggtggggttggcatcccccacatgcactggtatggtcaggaaaaagacaacaatgtgctagtcatggaccttctgggacccagcctcgaagacctctttaatttctgttcaagaaggttcaccatgaaaactgtacttatgttagccgaccagatgatcagcagaattgaatacgtgcatacaaagaattttctacaccgagacattaaaccagataacttcctgatgggtactgggcgtcactgtaataagttgttccttattgattttggtttggccaaaaagtacagagacaacaggaccaggcaacacataccgtacagagaagataaacacctcattggcactgtccgatatgccagcatcaatgcacatcttggtattgagc

SEQ ID NO: 6336 - DNA, 6000 bp, Homo sapiens
ctcatgccagaaccctgaatctgccttgggaagaaacattgccagttggtggcagcattcacaagagagggtcacatttcctctgttatctttaggttgaatttcaaaacaactctagaaaacagactcagagggctagccttggaaacagcatgcaaacaactgcagaaaagcggaaggtttctgactataatacagttctaccaaacagcagagcatgtggcaaaaaagccaggctggctcccttcctcctgtttacctcctgagcagtgtatgaaacagggtgagcttgctcctggaatcaataggtgaatcaatgaacacaggctggtcttccccacttcataacatctgtactctgtacaaggacactccgggccaccctcgctgagcatcctcccgccctctcccagaaaatatagctgtgtcatcttacagacatttttaatgtcatctgcttatgatgtgcagattgagaagcagacaattttgttctgctctggcatgaaaaaaaaaaaacgttttaatcggcagctaggatagcaacatgaagcaacacacaggacatcaatttcatcatgcaaaataccggtgtattatattacaggggccaagcattccaaggaaaagtaatgatctaagaagatgctcttgcattttaaaaatatctactagtgttatacagtcattaatgtataatttccatttcaataataggaagccttctgggaaaaaaagcttgtgttgcttcttaaatctagaaacacattctcaaaattcaaacagaacaaaatccagaggcatattaataaatattttcaactcctaaccgcagtcactttttaattgggcatttatgtatttcttcaacataattatatttataatgaaaaaatgttgagaatactggattagctgcatttgtaactacaacatatttttctaaacagtattaattcaattgataagactttaaaaaagttatagtagtttgttctatcatatatgcacattaaataatcatttattttagaaaatcctccctcataaaatgaacatttaggaaagagactgatccatatttttaacaagaataataaacacacaagtagaaagcctttataatttccaaggggctgatcaattccattaacaaatcctgatactttaaatgtttgcaatgccatacatagcaaatgatccaaacagcagttatattctctcatgtaagtcattctgttgcccatacacagagttagcatgttacaaaactcttgtgaaatttcagttgaaacattagcaaataaatttgctggtaaagtgcaagaagtttccttataaaccctagatgaggaaaagtctgtccacagttcgttcatcagaggaatggaatttctcaaatgagctactgaacaacattatctaataaaatgaaatataatgaaatggtgccactcattttaaagattaaatatatcctttgacagaaacctgtgaagttaaaaatctttccctcttaaaataccttttaaattaaagctattctaactagttatatagcattccacttaatctgcttagtttttagattgagctcacctaaatacaaaatactgtcaaacacctacagggcaaagaactaaaaaaagaaagaaaatttcacaagcaataaaatgctattcacctttctcctcccatacttgcctttcctatatgaaacaaagaaaataattagtgatgttcattattggtagtgctactagtatttgtattgtgaacctgtaacatatttttaaatctctacacttttatataattgattctttcttgaaaagtaattatttcagaagacttctaataaaataatcattattgtatatgattctgttaaaaatagaaaaaacaaacaaacagaaaaaactccctgctgaaagatatggccattttattagctgtgaaaggaaagaaagcttccaaggaaagatcttggaccatgagaaaaaatttcaaccaggctgtttgctggcaagaggccatgccagccccagccagtcctgcgtgcagagcatgttggcagatgttattagctgacttttgttgaaaaagtatggaagaacagttggaaaatcacaaggtgtagaacaagctttaaataaataaatagcttatctggcaatagaaagggggaaagaaaacaagttcctcggttgaggaagaggactgggatacttctaattacagagtttcttactgttggtttgtttcatgggctgactctcaatgagaattgaaattgtatcatccacatttgtatttggaggttctaactgcagaattgcaattaatttccagtttgctgtaggaaatttatactctctatgacagaataccacggacataggtgataattctttaaccttctctcttttgtccccagtctggtaactgaggcagtacatggggaaagtgctaactgccaatccagagctgctgacaccttaaaaacactggcctttaacactaggatggccccaagaaacaagcaaacaggaaaagatgacacctgctagcgtgtgacaggcacagcaagtaaatgttcaatacggatatgaaaatgcaactgcataataaaagtcaacatgaaaaagaaaaagattgcaaaatatactttctcagaagaaaccatcacatgatgtttaaaagtggtggttcctttagcattgtctactgatggctggcaacatacaggaacatagaggtggcccatttacatcctcataaaagtgggatgtaagtgatcacaaagccaataaaactacaccacattttcttcaagcaccaagataagaatcccttcatctttcctgactagacatattgctaggcaacatttgtgaacgtaagaaaaggtaacaagatctaaaaagaacgccgaagcataatgttcataaaggtggcgcccccaacacacacaatcatacacacatacctatacacacacaatcacacaatctattatataaacaaacacgcacacatgcacacataggtgcacagacttaaaatggcatttcttgaggtatttttttttaaggtatgatttaaaaatggaagatcaactttaaacacacctttttgaggcacactgggtgatatttgccacaatgattattcttcccaaattcaggctactgatcaataatcctaactgtatacatgctaaaaataaaaacgctataatctttgtactagtcagggctctcttggcacataaaattagccaacacaatcttcaagtcacatgttacaaaaacatattaaaatatatatcactctttcaaaaattacacttattttctcttagattaagattttattacttttaagatacttctatgaattatagaggacatccaaaagtaaacatccgggacttaaaaacaataaccaatattataagataaattattgctgtaaattatttcatgaaggcacaattaaaaaaaaaataaaataaacagccaaagcctgttttgttgagttttcttcgttgcgcaggatcgggagcttgctgggatctgaactcaggaagccctcacctcaccctgacttggtcattgaggagacgtaattgcaggggtgcttatttgctataggctttgaaagtcacaaaagcccagtagatacatgaattcgaagcagttctccaagggcatctccaacttggcagtcaccgcccgcaccgcgcacacaggtagtggacgcccgcccacctgcccgtctgctgggcgcagggcgctcctggggtggggagggcgctcctgtggggggaaaaggggcgctcctgcctcggagggggaaaggacgcccctgtggaaggaagggggggctcttgaagcggtgtggtgagaggacgcttccgaggaaggaagggggtgctcctgcagcggtggggggagaggacgcccctgcggaaggaaggcggcgctcctgcgggggctggagagacgcccgcgcggtctcccggctcagggaccgctggctcgcgggtccgccctctccccggcgctatggaaaccgcactttctccgcctgccgtccccgatctctttctcctattacctcccaaacgcgatttcaacttcccgacaagctgacaagtgaatggcgcagaggacgccccgtaaagcgcccgcgagcgggtgggacacaggcgccccctccgcgcccctctgtcctccacggaagggcgcgcgccgctctcgatctggagcgcggtgctcgcgaacccgcggccgcgggccctggaacctccccgcgtttcgcggctgcggggggacggagatgcggccgggagacggggacgggaaacgggggacggggatggggcgcgcccaccccgagcgcgggagcggccgccctcgcccaaaatggggaccccgcgccccgagagcacggcccggctcgccgcccatgcttccactgcaaggccgcagcccccgccgccgatcccgatcccccgccccgcccagccgcggccccgcccggcgccccctccccggcggaagctcaagcccaattaattgagtccgaggcgggagggaagggccctgcgcgccgtggcccgccccgcccctcttccgcgccccttttcccgccctgggtggcatctcctccgccggcatccacaacaagccgctgattaatgaggccggggccgccccaccccgcccggccgggccggggccttcgcgggagggggaggggacggcgggaaacgcggcccggggagaaaggggggcggggcgggggcgcgcggcccgcccccgcgagcgccgcgccgattggccgagcgcgccgtccgtcggggggcgcggcgccaatgcgaggcagcggggcggggcggccgcgctgtgtgtgcctgcgtaacgccgagtcacatgttgttttgctcttcttagttcagtcactcggtgcgcgatgtgttactcactgtgcggcggggaccgcgacgagcccgggtcgccgttggcagcagcagcagcaacaccagcagcagcagcagccccggcggcggcgcggaccccgagcgcccgggcgcaccccggcttcccggagcgcgacgcggcggcagcagccccggtgcggccgcgcgcgccttaggctcggccccgcggctcggggaccccgactcccggcccagcgagcgcgtcccccggcgccgcccgagagcccgaggaggcagcggccgcaggcagccggggaggggggcggccaccgcccgcgccgggcatcctcaggagccccagagcgcggagggcgcggcgccgccgagcggtgctggcccccgcgggcctccccggaccttccccaccgcctgggcccgagggacgcgtgatcgggcgggcggccgggcgcaagggtgggagggagccgcccccgcccgcgccccctccgcccctcgccccaacccctgggcgccgggcccgggccgcgcggcctgaagcgcccgcgatggcgagcccgccgcggcacgggccgcccgggccggcgagcggagacggccccaacctcaacaacaacaacaacaacaacaaccacagcgtgcgcaagtgcggctacctgcgcaagcagaagcatggccacaagcgcttcttcgtgctgcgcggacccggcgcgggcggcgacgaggcgacggcgggcggggggtcggcgccgcaaccgccgcggctcgagtactacgagagcgagaaaaagtggcggagcaaggcaggcgcgccgaaacgggtgatcgctctcgactgctgcctgaacatcaacaagcgcgccgacgccaagcacaagtacctgatcgccctctacaccaaggacgagtacttcgccgtggccgccgagaacgagcaggagcaggagggctggtaccgcgcgctcaccgacctggtcagcgagggccgcgcggccgccggagacgcgccccccgccgccgcgcccgccgcgtcc

SEQ ID NO: 6337 - DNA, 6000 bp, Homo sapiens; identical to SEQ ID NO: 1777

SEQ ID NO: 6338 - DNA, 6000 bp, Homo sapiens
gttctgtcattgtgttcatgagcaacacgtgagtcttattgttttctttttggttttgccattacagctgatgaattcagaaaatctcttccttcttagtgaatattcagggtagaacagccataaaattaataattctttgcttctactaaaatgaacacagataatacaacaaataaatttttgctggaatctcatcttcaggaagcctgaagtttgatcatatttaaaggttgaggatgtcagatgattagtgttagaaaattgttggtgtgtttttttcccctggtcaggatgaaccaggctgattttcagggtgagggataacttcagttactttgaaagtaaatgaatataaaggcaaaagtttactctcattcctaggtttgaatctctggagtgttttccagctttcttcttcctggggtaggggagtgtcactgatgagtgggtggctgtcaggtgggtggtaggtatcgtgttgccgtggtggtttcaaccaggggcaccagctcttggtgtttggtgtctgaaagctgtgtgtgaactacagagagccctcctgagcccttgcacgtgttaatcatttagccctatgcctggggcctttaatagtatgtgtggcaaagattctaccaccagctcaattggaaaaaggtatttgagacatcagttcaggcagatggcttctgtcttagaccttctttctctaacaaatgaataaaaatgatacttagggtttcaaaacagatcccttttttccaccataaattcttagtactgatgcttcttaggtctctgttgtatcccaatccctctgctgcggctggcaggtcctagtcatctgggtccaatctgaggtgtgctccagccttttcctcgctgcccttttgcacctccgcaaaggattgtttctgctggttaattctgtttaaatcaccgcgagcgcttccaagcatcccaaagggtcacctggaatcagcctcagcctcctggggtggggggatgtctaagcaagcaggtctgtgagaggcagggcactggggagcaaaaccacaggcctgtgcccgctgagcacacccagaccacagttctcgctttaccgtgaaaggaggcggccgttgaaagcggttgtattaacctaacaggagacaggctaggtgagacacatgcacgttgtgcttgctctggtgcacgtgtgtgcatgtagatgtgtgtgaaacgctgcacagctgacacccccatgcctggctctgagcgggtggtcatcctgtttctggtctccctcacctcagctctcttgtgtcctttgagtgtgccattaacaggttcatcttcctgtaataacccttccttcctcccttctccttccctttccccttcctccctccttctttttttttctttccttccccttcctcttccccttcctcttcctcttccgcttgcccttccttttcccctttccttctttttttttttttttttgtcagccatcttcccccaagttatcagtgaggccttgcaccagagtagaattaaaaaaagaaaattgttgaaaggtcattgcatgaataaatgcatggatgaattacttccttgccatttatcagctcttttcttgcataatgctaatgcttagaaattaacgttttgataactgtattctacttccaaaaaataaaattacatgttcaacttaattggagctcgcaaagatgtaatgataagagttgaatattacagcgatacagcatcctaaaaaaaacaatgaaaatgtcagtggcctcatgaaatcacaaatgaaaatggaaagtaatttttttcagcaataatttacccgccatttatatgacaaagtgcttaagtttgagaaactgaagaacttactagtttagctgttttcaaaataacagacttagagttaacatgagataattcagccacatttagctaattgttagtgtcaaaataaaataagcaattgattagaaattcttctgtcaatggatttgcagagtctcagttacctgcttgtggtggccatgggattcttcccaaatcagggtctcagggacaaaatgcaagctcattttagggtgaattacaagtctcaaggtgtgttttagcaaatgcctgtttttttttaggggatacaaacaattagattctcactgaagtctcctgggattgaaaatcacaacaataatgaatcagataactcaaagacagatctttccttaggaagaaattaattctgttaaggttcattggcagaacattgtttacttattaaatttataatggacataaagctttttaaaaataacaagataggccggccgcagtggcccacgcctgtaatcccagcactttgggaggcctaagtgggtggatcacctgaggtcaggagttcaagactagcctggccagcatggtgaaaccccgtctctactaaaaatacaaaaattagccaggcatggtggcacgtacctgtaatcccagctacttgggaggctgagacacgagaattgctcaaacctgggaggtgaaggttgcagtgaaccaagatcatgccactgcactccagcctgggtgacagaataagactccatcttaaaaaagactaataataataataaataaaatagataaaacagcctcagaatgtcgcgttgtagggaattttaaaatgtccactttgtatattgacaagtattttttctgtaaagcttttggggtttttggggggctatagcatgtagtgcctcgagttcataaggagatgtggttttgagggactcactctcagcttcagggcacactggaagtttctgtcttgttgagttcagtcctctaaacttaagatggagagaaaagaatttggttcacaaaaaagtaagtcagggagtatgataagaggctaggatcagaattctaaaggattttagaagagtgtccagaaatgcagttggtataaatgcatctgcaaaggaaggaaatgtacctgtttgagagcaaagcggtgctcaccctcatgttgctgagtgatgaaaatgaacagtatgtcattttggttaaaaagccaagaagcttagaaagaagaaaacagcacgctgtgaaaggtcaaaatcttccaatttgttctgtcccttgaagaaggaatatatcaagtaaaaataggcctaaaacactggaaattgagaaaggttaaagaattttgatccttcatcctggaagggaggaagcaattagatctggccacgtgtcctcagtccctgtcccctctgagcacagcgaaagggtaaattacttaaactggaacatatgaaagtttgagtggataaaaataaccctttcctaatgttgagggttatgcaacaacacatgaggccgtgcaggaaccttccattgctgggcacgttcaaaaagaggtagatgatccggttggaagttttctgagggcagaagtgtggagttattagttactccactttcataacataatgcacatttgtagaataaacatagtttacagagcattgtaatgtgtgtcatagtttttcatctctgcagccctgggaggaaggcaagtggattctgtgtatcccacacaacacaggaagcatcaaggcctaaggagttacaggggtcattccatcacacagacacgcagtgcaacctaggaactggcccttctttttctatcttgttcgacagaatgattcacaaaaacacatgcgaatatttttcttaaattgaaaatacgaacctaactgtctagacaactcaccatgaacctaacagctctgcttccaggaaaactcagagttttcccactgaactcacctctggaaaacagaatgaatacatgtttctttctcaaaggtcatcagtttatgaaaatgacccaggtcctagctgtgggttagaggggccctttctggaactccagagattgctctgttctcctgagggtctctgctaacttccctcctttctttttcagagtgaagatctgtctggctttatcaccaggatgtcacatgtcagagagtatcattaaaagaagacgctcagcactgtttcagcccgaagctgcttgcagttttcttttggatctgagcaatgactgtgtttggaaacatctgtggactctgttagatgaggcaccaacaaggcaaggtcacctgcctctttcccttgttcccggatggggcattcatcattgtgctgtttgcgttttgttttgttttgttttaacaaaattagctgaagaagttattctcaagaaaattggatgttttcattggccttcttaaattgtggccagtgtcttttaatttcttcttcttttccttttggcaaagcagatataaccctcagcatgctaggagagtgcacccgtacctatggaagtggtaaaatctggtatttactggcttacactcaaaacgaccacagtcctacctcagttcaaggtaaagccggatttccgtggcgggggtcccacaggacctcctgtagtagcccctgcgctgtgtgtctggagcgcggtcctcggccttattgaaatggtccaagtagacagctgcttgttggattccagtgcaggtacctgcgatgtttacgtccacaccgagcccagtgtgggactgacatttctcaatggaagtgaaatttgggattggactttgaagacggattactaaataataattattatatgtaactgaagcaacctacttttgaaaatcaactgtattgggtagtgggaggtgggagggaagggctttgggaaggggatgaatatctctttttacctttaacagacttgtttaatcttctcgatgtagatgtttatgtaggtacttcacattgcaaacgccttttattctatttacaagctcagatgtctctgctctcctgaatcttgggcatgcctttctgtaaccaaaaatccctgtaggcgtgctagcaattccagggtggtccgggtttggcagatttgatttttaaaaaacgtattatctttaataaaatgttattatgtcaaccagtgaggctgccctgaacaaaaaaaacaaaaagaaaaaaaaaaaaggaaagaaagaaactgataaaaagaggcattccagcccctatgttattgatggaaaaagaaaaagaagaaaagcaatctcgcagtacatgttacttgtcgaaaaaattccggacaagactacccttgttttatgttttcagtattctgaaaataccagtgtgtggcagttctcgcagatgttacctaaaactgctgaacttgaccggcagaatgttctgccgttttctgctccctcgacacttgattggagggctgtcgacctctcctcccgtgggggcttccccagtgcctatcttctctgatagtcatggagaggttacactaattcattggagatgtaagttgttggttttgttttgttttgtttttagaaaaatatatataaatatataatagatatctatcgctatagaataatgcattaataaaatgaggcttttttagaggaagaccaaaaaattcaatgtcttaaaaatatatttaatggcaatgcaaaagtcttcctgcttccgtgctgaactttagaacagaggattgtattgcaagacaaagttgaatgtaaagtgatctccctgaacatttttaaggttttacttttctgaaattatacatcacagcagtgcataggccatataatgttagctggaaggtcaatttcagtgtatgatatactttattaagatgtataaaaatcctgaagtttttatttagttttgggaataggcatcaatgggtggtatttgctttgtaactccccccaggtacgatagggactgaatatggaccctgctgaaagcagtgtattgacgcatatttaactcgccctctatccgtagagtagtcatgacactatacagatggttcgtgttcatactgcagcttaaaacaagcaaaat

SEQ ID NO: 6339 - DNA, 6000 bp, Homo sapiens
agaaactatattacaaaaaaactttaataagaaaatgctcatatgagaaaaaaacaggaaaatacaaaactatgtgtaactacaggtaactatacataactacatgtataatctcaaatttatatttgagatcttatttcctagggaccttggtcaagttactcaacctcactctactcagtgtcttcatctgttaaatgaacatttcacattttacacataaaaaaagattttatatttcatatctcaatgatttttaaatgagttattcgtagatttgtaaagttctggggttttttttgttttttttttgagatggagtcttctctgttgcctagtctggagtgcagtggcatgatcacggctcactgcaaactctgcctcccaggttcaagcaattctcctgcctcaccctcccaagtagctgagattacaggcatctgctaccatgcctggctaatttttgtatttttagtagagatggggtttcaccatgttggccaggctggtctagaactcctgacctcaagtgatcacctgcctgggcctcccaaagtgctgggattacaggtttgagccaccacgcccagccttatttttatttatttttttttgcaacagggtcttcctgtgttgcccaggctggagtgcagtggtgcgatcttggcttactgtaacctccacctcccaggttcaagtgatcgtcccacctcagcctcccaagtagctgggactataggcacacaccaccatgcccggctatgtaaaattcttatactattgccccagtacatataaaactctagtaattatttgctccttttattaaacatatacatctatacttacgcaaagaaaaaatgaaaggaatatatcaatatattttcaagatcctgaattctaacaaaactaattctgagtcagtcaggaaatctgaacactgattgcatattagaaggtataaaaattattttataaggtatggcggtgtttttttaaaagtccttgtatcatagtgaataaaatataactaagacctgctttaaaatagtttggtgggaggcatttatggaggaatttttttcaaactttttttttttttgagacagactctcgctctgttgccaggctggagtgcagtggcacgatctcggctcactgtaacctccacctcctgggttcaagcaattctcctgcctcagcttcccaaatagctgggactacaggcgcacgccacaccctgctaatttttttttttttttttgtattttagtagagacagggtttcaccatgttgcccaggctggtctcgaactcctgagctcaggcaatccacctgcctcagcctcccaaagtggtaggattacaggcatgaaccaccgtgcccggcctcaaacatttttaatgttagcagaggtaaatttcctctgggtaatggaattattattagcttttattgtctttatatttttctatctttcaatttttgtatagtgatttgaagttgtttttaaaatgagaaaaaaaaatttcaaaacgttttaagaaaatccttaccaatactccatccacagatgaaactttctcccaagttaaccaagctctctctctgacatgatctggtatctttaatttctgacataatgcagtaaaatcaggttcttctgtttcttcaaactcaagcctaccaaatgaaaataatcatataattggcatatacttataaatcaaattgattcagtacatacttgtttcaatagtttgcacataacactactgtgaaaaagaacattattaaatactttaagatcttattttatcttagaaaaacattacacttcaaatttaaacatatgattatctttttcatggtcattccaaaataaggataccacacagtgaaaaatatttgcttgcatggtaagtcaaatatacttcaaagcagcaaaacacttctgtgaaggaaagtaaatgtaatagctaaagctgtttgggaaaataggataaagataacaacaaaaagataaaaacccatagataatattatacaattcaacgccagtgactttgttaaactgtagtcttctcttatcaatgtttcatatatctctctacctactagcacatcttacatgatgcgactgcttatttttgtcctttccccttaacaaagacaagcatttaataaattcttgttggctaattcattttcattcatctaatttctatgtgttatctactaataagaatagtatgaagaataattaataatttttgagtatttactatgatcctgtagaaagtaccttaaacatatggtttcactgaatcccgacatcagcccttttagataagtattctcatctgtaaaagtagacatttacagatgtctgtcaaattggagaagttaaagaacttacctgaggtctcagccggtaagaggtaaaccactatgtgagcccaacagtctaactctataatccatgcccttgaccactattctagactgccaattcctccttcaaaacataattagtttttgtttttttttcttgttttgaaatagggtttcactctgtcatccaggctggggtgcagtggtgaaatcatggctcactgcagtctcaaactcctgggctcaagggatcctcccacctcagcctcctgagtagatgagcctacaggtgtgccacagccactggctaattttttaaaatttgttttagagacagggtcttgttttgttgcccaggctcctctcaaactcctggcctcaagcaatcttcccatcttggcctcccaaagtgctggcattacaggcgtgagccaacatgcctggtcagcttttttgtttttttaaagactggggtcttgctttgttgcccaggctggcctccaactcccaagctcatgtgatcctcctgcctcagcctcctgagtagcatggactacaggtacgcgccatcacacccagctcgaaacatgattaacctttgattatttcaacaatgaatgtggtatgctgttcctagtgacagtttcccttccagctacattacttaggccagagataaggcaacagaaataagatctaaactctcaaatcaggaatggaatctgtcactggaggtgcagttggactgagccttgattccatctccaggcaagatgctcagtatcagactgcacggcagcggttctacccttgctggttaatttatagagttcaactgtctatgttaatgaaaccctttgtgggtatggataatcaagaacagactgtatcttgtatggttttgacttataagagaattttttatagttccattacttaaaatatataaaatgagttaaaaaatgaaagaaacagtcctcttttttccaagcagtggccacaacgtcaatattcctggttaccctacattagagtatgcttccaaagctgtgtgcataacatggaattctttagagtagccattactgcattttcccaagggaaatttgcaagaattggatacatcagaatttaatcagaaactaaagccatgtcttttcccagaacatgccccagacgtggtttttaattttttgttgttgttattttggttttttaacgaatatggtttttaactgacctataagacagtccatttaaatatataaatttttaatagccttccaggggccatttcctaaatcccacttcaatcttttctgccgtgaattgttagtgtataccgagtggaaagaaatgggtgagggtgaaaggatttggtgatagacaagaatgggagagaaaatagtgaaaaacagaaacaagtcccattccctctgcaatgaacttgtctcaaagtagaaccagtgctgacaataatgacaattacactctttcaatcatagctatttaaccataaagtagaaaaatcaagaaaagtaagatgttgtaatacaataaatacttcccttcaagatctagtgcattcgtatggacttgcttaaatttagattccacttaataagggaaaacgaaaatttccatttgcgcacagaaccactaattttgtgccaaaaacaaaggcaaaaagaggggacaccaagatccttgctggttcaaagtcaaaaggcaaaatggaagaaataatgagacaagccgaagccgactaacacgcaagaagagttcatcaaacaggaaaaaaaaaagtttagaaactttcaagcacttctggtaaatgtctcatgaaagttttgcccatgtttcagttcctctaaagagttacgctccatcaatcactacagatggctttgagtccccaaggcctcgatgcattattgttctaaggaaacgccgcaaagctcctgagccgagtatcctgtgggcaatggacactcaggaccctgcgcttcttgtccaaggctttctggtcggcctctcccacaaatggacttcagatgcagtgcacgcccggaagaaaatacttcccaactgttgcatcgcgtgaaccaaaacagaaagtcagacgaccaccggagtactccaattctccggtgaaaaactctcccacagacaccatttttgtatttttatttttcattttttgcgtctgatggacgctcgcaacgaccctctgcctccgagcctcacaagagggaactgcacctgtcacttcgctcaggaccctagccccacccgcccgacacctgtcaagttgaagccgagacccctcgcccaagaacccagaatcctgtcaccattctgcagacgctccgccgtggcggggggcagggagggcgcctcctcccgccgggacccggcccctggcgaggacggatccccgccgagccgccttggcgcccgccctacgcacacccggggcgcccttcccgcgtgaggcgacggcggctctgctcgctcacctgacgagaggcaggtcctccgggccgctgtcctgctctgggtcctcctcaggagggggcggcggcggcggtgccgggggttccgcggcggcagcggcggcggtggcggccgtttttcggggggttttgggcggcatgacgcctttccgcggcgggagccagcgagctgtggaggagcgccggggaggacgacgcgcgcgcacgtcggggcacgccccgtcctctcccgactcccgttacaaaaataatttcaacgtcccctgagaaaaaccggacgcgccctcccccgcccggcaactgagcgccgcgtccaaccgcgggaaaacgtcacttccgcccgcggcgtcacgtccgcgaggctcccgggcccgccggcgtctgtggggaactggggcgctggtcggtgcgcgggctgggacgctaagtcatgaggaattaaactgggaaacctggcgtgggtccaggcgccttccaggaggcatccggcgcggcccggacgtgcttctacccagaaccaccccctccaggccggggtgcacttaacggggctatacaaagagtctggtgggtgactgtgggcctcatccctatcccggggtctgatagggaagactctcgggccccgcagggaatatctggctagtgcaccctcggcgggagcgccactctccctccttgggcggcgccccccacctctcatcccgcccaatccgttttgcaaagtcggccaaaacaaaaacaaacttggagcgctgataggtgcggaactttaccagtcacttagaagatagaaaatgttagacacttgctggccttttgggatcactggttagggaaaggaagggagggagctgtggggaatgaacggatagtagtgtaataaaggattgtagtggtgtaagaacgggaagcaccgtggaaacgtctgaggaagattttcaggggagcagtagctgctgaatagaagtctgtcaggcaggcctgacatttactatgtaccaggaactgtgctggccaccttacataattgtcttatttaatccccagaaacagccttttttttctttttctttctttcttttcttt

SEQ ID NO: 6340 - DNA, 6000 bp, Homo sapiens
ttataaaatgaggttgtattgtagatctccttaaagctattaaaaatatgtgttgtaagtactaattaaaagggataatcacaattaagtggaaatttttcaaaaatgatgtccttagtgttataatttccaattttcaactttcagctgtctactttggaaaagactttcattgtgaagcacagctccagtgttaatattttgtatatcatttaggcaaaaatcacctcattcagaaattcagaattgtcaaatcctttaacaggtttcagtaacggtctaaagtccttaatttcttttcctttagtctttaagctctaataaaatgccacgtttgccaaaaaatttaagaggatgattttactggtaacccaaaaagatttttttttctgagtcttcctttactgacactgacatacaaagcagtacaagaagctttagttaaatctaggaattcaggaagtagtatttccttttggaaaaagaatgtgggttttgaatagacacgccagacatttaagttatggtatgataaaactaagagaaataaaatctcccccaatgactacttagtacatgtttctatgtacatttacccacaagtcaagatttggaaatgcataataaacaccttgtaagtcaaattctaaattaatttaaataggcctgtaacataaacgtatttgagatatttctgcttaaaaaatacttccagtcacataaaccttttatatgtcagagttgaattccatgaggtcactcaggcttattatgccaagtatattatactcatttctgtctagttgggaagactacaatcctgtgcaatatgcaaccttgcacacccaatatgctacagcagtgtcctgtcagggatgtgtacacaggaggtcctgccaaggcatttgggatgcacagacgcaattcatttatttcccagcactaaaccctcaattcagatattaatatcctcatggagaaccaaaatgtaatgtaaaagtttcactggccaatatctgcaaacacggaattacataactaggtaataagatgcactttggttaaagagaaccaagctctcaatcccttgagagcattatatcaacattatagtaaatggccagccatgcattttatgtcccttctcctcactccccaaaaaacacacaaacaaaaccaccaccacaaacgaaaagcttaattatcaaaaccttcagtcttgattgtgtgaatagggaaaaccagaaagggtaaagaaccagggtctaaacagccatttgtcatgggtaactcaaaacttttactgggtgagtcggccttcactttctctcttgcactcaccctgccactattttctctcctatatcagcactttacttttctctctccttttaaagaatatctacaaagtggggtagagagaaagcaacactatttgtcagcaaaacaacttgcagggatacatatgaagcaagcttaagctattctgtggcctgatactggaaaaggggtttcataagcaggcattgcaacaaagaggtgctgacaacttcactgttcactgtgaggtaaacagaagtgacaatgtgctttattacataatacctctacccatctcctttctctttgacccactgctacttgatatgagggaagaatgtaacatgttaaacaccaaaaggaagaaagggaatagtctggttagagtgaggaggtagttgctatttttcacaattaaaacaatttaatgtctgccaaatataattatgtaatcctagcatcttcatagatttttgaaactggaagaatccttacaggccatctggtcctaccctctcatcttacagacagaaaacctaaaaatttaagcccaagatcaagtagttatgtaatgacaaaactgggacttctgatacagtacatcaagtattttgttatctgcaaatataaaacaatttcccaaggttcaaagtattgccacaaaaatatatgaattgttgcctatagcataaaacatgtatataatttcaaattcacttctgctacccaaaatacatcccatctttgctgtctctatagctctaagagctttatgcctactaggagaggaggaaggtgaaaacaattaaggggaaaatgcaggaaaagaataaacagcaagctagttgagataaaactatcaatagaaatggctgttaggattaatagctgctgaaaagataagactgaaaaatggggtaatagaactgtttctggagagttctcaccctgcagaagaaaaaaatagaaagacaggagcaatgtaaaagtactggaatgcatgttatataagccagctgattagagtgatcagaattcttgtggcataaggtaacagaatctgcattttaaaaccagagcaggtggtccctaagagcacattttggaaaacaatggtctgcgggatattgtgatctgggagggttaaagataagaaaaattcttgttcaggagttctaggccattaactagcttggtttgattctttcaaccaaccaggcaaaggaaatgccctcggcaaaacacattaaggctgattctgttcccagtccaggcagtcagacaaggtggctgccacagagccacccgcaaggagccagagaacattatgtaatcactgcccaagctctgaaatgaagagatcagaacttctttcacaaaagtctgtcattaaggttttccttttcccgttaagcgactgactgattataaggattctacttttaatgtagagaaatattttgtcatcccctaaagaagtctttcagcttatagctggaaaaagaattagtcattttttatctaccaactcatccgtgactgctgggtggtttacaaagacgactctggccctcactctttagtcccagtagtatttttctttggatatggaggatctgagaaaataaaaaatggaaaacaaagcacggagctaccaatgattacttatagctgcaatgaccacaaaatttaaatatggtgaactcgtgagcaattttgagaatctggcagagtcactatttcagaaatgacaaaaattgtcagaagtcagatttaatggtgctcagcaaatgtaattctgatgtttgtccagagtttcaaatctccactacagcggaacagagaaaagctgtctgaagtgacatcatccaatgctcgctcactctctcctttctaaatgggagcagttatatttgttaataggatttttaaatgtatgtgtgtatatatatatatgtgatagcattaagactacatatatttgagactgttgtgactggatacttgactctcaatctattttaggtacaacgaatgttagataaacaaagagctaacataataatttgctactgcaattttcatctgtgcattccaaacattttctttaaagaccaagattgtttgcaatggcttcaggaaaacaataccaatacgaaaaccaaaacctttaatccttttagggaatcagttcactgttcctatttcaaggcaaggcaagtcatttagaaatcaacctctgacgtgtctgtttttatcagaacatttccagaaagtaagattaccattatattctgaagatagattatattcagaatataataaattataatatgatgtctagattaccattatattgtgaattttttacagtatattagtggcctgtttttcagcaataattttcattcgtccatataaaaactcccattattcatacgtggcacaccaatttttttaagttaaaactaaatttaccctactgataataggtcttgaaaaatgctaacaacaacaaaaaataagataagcaacataactttacagttaatttctaatttttgcagcctaaaaagggtctgggtaagaggctgtgggcttttttaacttatgagacaattacactcatatttaagtaaatatgatcgtaacctactaaaagtcaacacagtaacagccccacttcatgaattttcctaggattaaagggagattttgtaaaataaaggagaattttattagggacccgggggcaaatttctcatgtttagtttcacgcagcaggagtcctcacaaagacgctgatacaatttaaatgccaacaattggtttttcactaacatccacatagtcattactggcctttactagtaatggtaagagacagcccaaacctacttcgggcggactgtcccttcgtcccctctccaggtgaagttcacctgccactaccgaagggccgtggaaaaaggaggtaaagaaacgcttttaaaattaagacgcttacagttgctggacttagtccaagtgctgttcaagcctagaaacgaaagtgggaaacaacagaggtttaggcttgtaatgatgtcagccattttaggtacattatttatactgggaaggaagtgccaaactcggttgttgttgttgtgcctgtcgctgccggtccccagatcgaacaagccaagtcctggctgcacgcacgctccccggactgcacaaacgaccgggaattcggcacaattagccaatcgttccctctccaggcctcccaagcccccgaccccgcgtcaggcaccgcttccagcacacgcacttccttacaaaggagctgcggacccacaggaaacgggagcgccgggctctctcggggacttgtccccgcggcgcgagccccgcgcccgccacctcggggcgcactgccgctgcagtccgcgcagccctccccggccgggcccagcacccgcttcctcgacctccccgggctcggaccttgcagtccaccgcgacggcgtcgggggggatgatgagcgcctcctcgccgctcttgggctcgtccttcttggcctccttctgggccagagcggagttgaacgtcaccttcaccatggcgcggcctggggcgccctcgaagggcggcggcgggctcggggcgcgggctgcgggctcccggctgcgattgcagcctctacggccgggctccgggagcggctccgggcggctgaagaggttcgggaagctccgcggcggcagaggcggctactgcggtagggatctcgcagcctcccagctcccgcgcgagggcggagactgctcgcacatcccctgggaggcggggcgggggcgggggcggggccagcggccgggggtggggtgctgcgcgggaccctgccctcgccccgcagctgggcgccggatcccggcgcgcctcggagagggatgggtgtccctctgggccgcctggaatttccagttctgaattcgctcccaaccaggttacctccaggccgagtgctgcaggtttgtagcgaaatcgagtgaactttcctgagttcgccgggtacaagggactaacctttggcagcaccagaccgccgcttccctgtaccctgtccccaccgcgagcctaaaggccatggaatttttgtgcatccacatcttcattttctcacttattaggtaaccgactcagtggagcacaaacatgtttaaagctctctgtccttgagatctgactttatctttcacggacctcacccaagggcgtttacctggctcagacctgcctggtcttccttccctctctcaggaggtcagggcctgttctgcctagtcccagaccaatgtggaggaagctcttggcagatttgtatttcaaacatctcacactcgtaaaacgaaatgttccactcttgtgcgtacttggaaaaaaaccacatgcacacttggctgatttgtgactcaaagtactcgatgacgagtccctttatttttctgcaaaatgaaaaaataattaaggataacgcaaaattctcatgttttgaagacgtttcatttacaactaatgcgaggtagaatactggctcccgtcgttactgcgttcattactgtgtcaacagacggcccccttggacaaatgtgttatcttgtatccttccaccccattctgtcctggttcat

SEQ ID NO: 6341 - DNA, 6000 bp, Homo sapiens
aattccccccttaaaaagaaggggggagctgttccctgaaagagctaattcctgactagaagcttatagttctatgggttctgcatattttaatcaaaatattttaaacagttgagcactcctctttaaggctctactccgctacacaaagggtgagctcataagcaaatctatgtagatgtatattaagtgacctgaaaaacaggttctttatgtcagcagcaaaggcaggcagagattaggctgataggaggaccagtttaatcaccttccttagaagagcacttctatttgtctaatttgcaattaagtattttaagaatgaagttctcataaaacgttaaagaaatatctttcctaaaaatttttttattagggtctacaatctgtatttccttttcccctgccactcccattcctatgacgcattactgcagtcacgctgggatctcgaatagtttcccattaggtgaacgcactctaaaacgtcgcccgaagtttggtgtcatactgaagctctcgggagctacctggaagatttcagaggaaggaaagacagcaaggatttagttgctccagttgcaatgtccatctgaaggcaattatctcactgatccaccaaccgaaggatgcacctcagtaagtttacagacaagaggttttaatataaatccaccaattgttcttcagctgactctgtctggaggaaccattcaaacacatagtttttagcaagctggtctccaggcccatggcgaattcacctgtccacacactttagcttaagtcagaagcctctggaaatgttggagtcatctgcatgtctttgcgtcggcagaaccagcgtcaacagcttatgctttgtaaaagatttagaaccaggtgcttagcaaatcatcttaacctccagctcctgtttctggggcttgaagctgtaactgttgaggttaagatgtgcagtccctagacacatgattctcaaataaattctcatctgaaaagaaggctaccaagcatgttgtgaggtatcgctttagcttagtctttgtgctctgcctggctcagttgtcctgcagaacaacgacagtccattacctacagtttatcatcctgacaaaatgtgaggaatgtggatgtgaaagcactaacaattccacccctggtgctttgagcttttttctctctatattaaaaccgacaagattaacccaaacgcaaactgtggagcatagttcaaggggctattcaatcagtgctgaatgtgcatttgtttacctacaaaaataagaatttcagacacaatggaaggcaggctggcttatatatgttattgaatggactgtttaaacagcactatccattgtagtttattttatcaatctctgacaggtctgtatttattcagagcctgattgtggtgaagcccatgtattatacgttatctggatatcatccagccattcttttgtatcaagtcaattagtatcaggaatccagtattatatagggaaaaaattacatgggaaaagcaaaatgctatgttaactaactagtatgtgatgcacagggaatggtaaccccagacataaggcattagtactcgaaattttcaaagtcagtgtaatgcattgcagaacaccataccaatacagatttgctcacattaaagtaaaattaatttttttttaaaaaagagcccactactttacttaggccaaaatctccctcttggaagaaaatgttctactgaagtgttaagttaaaaacggaagctaggcattactgttctctgctgaattaaaaaaaaaacaaaaaaaaaaccaaaactttaaacaaccaaaatggctacaacggacccaactctaccagaacgtatcaaagcaatgtgaataacctaacagggcagctactgtttcagcacgcaggacatctttccattattacatacagtcagggacgggagagccgacaatgtgattaaagtagttacggagacgctgaatttacaaagggttttctggaccctgtatccaaacagctgctgcatgctccctgtgtcgaccacctgctaaaaaagctgacctctgaatgaaacaaatctaattactgatggcggcttcattacaaatgaattgttccacagttcataggaactgatgtgaaacttcaatgcatttgattaccttcctgccacatcatatttaccgattcaaactttcctctggaaataaatataaaacttccccaaggaaagcgaccccctgtcatcagggggttgtatgcattctcaaaaacttagagaggactctttcctatggctcctacaggaagaaatctttctgatctctggagctagcattcagctgcaagggagaccttttccaggcacacattatccagtcatccaggcaggccgttatcaggagaattttaaaagaaatgctgctgtggaggacaagacagcagcagcaacctcaaccgcgcaaacggcaggcttccagaaacgcagggccctcgcaggtctggacatagctggaaagacagactcatcttcatcatcagaatggggggggggagtggtgagtacctgtcacctccccccaggaccccccatctcgacacattacaaaaagaagttattaacgtctaaaccttaggttgaaataactattgttctacttttctttttctcccaactaggtatttctaattctcctaccggatacacacaaactaatagttaatatagcgcaaagataaagatacacacaccgaactaaacgctgaagaggctaacggaattgctttcaactagatttaaacagaaatattaaatcctcataagaaaaaaaaaaacagcctcaaagagaaccggtcagtgaaagtgcagagtggctggagcaggcggcctgggggaggggcgaggcctggcgctgcgcgattccgcatggaagagtgacctctggaggcaccgggcgggcagcggcgccgcgggctccccgcgaccgcctcgcccgcccgcccgcctctcccggactccgggacccgctgctgcgcgaggtcctagcccggctccttccggcaccacctggcgcctcccgagccggcatcgatgcaaagatgccgccgccagtacttcatcagcaaatacaacaatttacattaaaaatataatccatgcaagagcagactacatggaaggaggcagagctaagtaacttctccgtatgagcggtgttgaaagtgccttctagcatcatacaaacatttgtttaaaccgatttgtaaccgacgttttcgcccttttcatgaagggattcttggttaacatgttagtgaatttgaaatttgacacttttaagagaatggacacactcctttaagacgtgatttctaaatcaatcccccatttcttttctcctaaaaccaggcccaacttgctcaacttcaattaggccattgattttgcttctgatctcaaacgttttctccagaaaccagctaatgtctgcatacttcttctccaagtttcccgagactacaattccaagattctgtaaaatatgttttggctgtgattcgaaataaggggatacacagtactgaatacccagatgactacgagttatgaccacacagatttagggatggatgggattttctaaattctgaatgcactctggtggcccaaactgaaagttactctccacaaggcctggctcgctcccggctgtagagtccggtaagagcaaatctgatcctaaggatcccattcctaccagggtcccgagggagaaggcttcaggagcagtgtcgactgggcagggccctaagcttttataggaagtgcattacaatcaggtcggccatcgagaccgcatactccggggctaccggcttatgaacgaagcgggaggccgaggtgcggcgggccctcagggagaagcctaaggcccgtctccccggcgcggaggaaagggctcgacgcccgagttctcctgcgaagcaggcgagctccccgcgcaccctcgggctggcggcgcggtgccaaggcgccccggctccagggctctgcgggcagcgtagcgactccaggctcccctctccagaacgcgcttcgctgccagcgtcctgccaccccggtcgcccgcccgcgggccccggaccacgccgcccgcgctccccgcgaatgcagcatctccgcctctctccagagcccaccagtccccgcgtgccggccagcctagattgtggccatgtccttcgtcctcgaaaacaggagagggtcaggtatcgccatcggacaccttcccggacttgacacccgagccgatagtagcttttagcgcctgggagcgttcgggggaggaaaggcggagagaccgtccgttccagcggggctcgggttggaaagccgagcgaggagtctccacctagtgaaatggggcgggggttgggggtgggggacggggaaccgaggttccagaaacaggctccgaggccccgcggactgacccctcctcccgcccggacggcgcggcggaccccggggcggggacatagggggatcgcggacgccacttacttggagttcgaggaattccaatagataggctctaaaactatcgatttggaaatcgcagttctgcataaaaccatcaaaacaccccagcagtacttccacacggagtcccttctcacagccatggcgaagccactcccagctccgcgcactccgggccaagaagggactgacgggacgcaggctgggacccccaatcctccggggcagactggcggggaagacggcgtgcgcccgcaggcagctccgaggcgcgctgcgcagctccagcggtcgccgggccaggtgcgctcgctctccggggccctcagggcgcggggcgggagcgcacgcgcggggcgcggcggcgcggcggactcggggttccggggcgccgcgccggacgcagctcggacggccgactcccgtgcggctccagggtgccgggccggccgcggctggcgggtgggcgcggggcgggtgcgggctgggacacaaagacccggagcggagacgaccggcgcgggcggcgggcgctgcgccccgagcggggccgcctgtgactatagatccagtgcagcgggcagcggcccgagcgcgcgggcgccgcgtcggcgcggttccatgtcccggagcacggagcggagtagggcgcctccgggcgcgcaggagccttctcagtccgcgcggctcccggcccccagggcaggaaagagggagctcggtccccgccgcgggctccggacgcgcgcgggcctttgtgtgcggggagggcgccgggacccgctgcgtgcgcagctcctcgctccggccggcgccgcggtccccgccgaggagagtcagcgcggccgccgcgctgtcagagcgctataaacgcggggccccgccccgccgcgcgaagcccattggcccgcggctccgcggccgcgcgctggttggacggccggtccgtccgtccgccatcccctcccgacattgggtgccgcgaggcggggctcgggctgacaggtgagccccgcccctggctcccgcgggcggcgggagcggagcagaagccgggcaggagaagcgctcagcgcgtgcacagggcgcccccggggcggcgagaggccttctgggcgcggtgcagacgtggaaacagcgacggccgagtagcgggccacctgtctccgcgcccgggggcgccttccccctcggcggaatcagagggcgcggctttccctcgagcagtgcggaaggcagcaggctccgctcggcgtcccttctccgcagatgcggcgctgccccgcgtgcaagacttgcactccgcgcgcacccttagagctcccggcttctgcgcgcttctcccgacgcctctcggcgagggcttctcacttgattttggtaccaatcgcctacggctcagtttcagtcagtggggccgggaattgcaagacgat

SEQ ID NO: 6342 - DNA, 6000 bp, Homo sapiens
gccatttacttctgtagcagacaatttgatgtctgctacaaaatgttttacttataaaataactcttccataggtagatgggaaaataaatccataaattaagactctaagaactttagaaagaaatgagaacttccactaccatcctcatccccaaagtatcacatgtcttcaatgcacaagttgccattcttcaggggattaattacaggacacttctgaagtgagaactatttttgccaaagttcactaacaagtcacaaatgttttattcttcctataccagtgaagaatatagcaaaaactaatggaaaaaacctgactgcatatagttttaaattataccttagagaaagcatgggaatatccctgagcccatctcagcaataaagatagactaacttccctgtggtagttatattcataattgcctaaacttggaagcagcaaagatgtcccttagtgggtaaatgggtcaataaactgtggttcatctagacaattgactattattcagcacttaaaataaataagtgatcaagccatgaaaaaacatgcaggcacctaaatgcatattactgagtgaaagacgccaatctgaaaagactacatactgtatgattctacaacattctggaaaaggcataaccacagagacagtaaaaagatcagtggttgtcaggggctaagcaggagggagggtgaataggtggagcacagaactttcagggcagtggactattctgtatgatactataatggtagatacatgtcaatgtatatttgtctaaacccataaaatgtacaacaccaagagttaaccctaatgtgaactatgggctctgggtgataatgatgtgtcaatgtgggctcatcatccgtaataaacgtaccactctgctgaaggatgttgaaaatgtgagaggctatgaatatatagggataggaagtatctttatctgctcaattttgctgtgaacctaaaactgctctaaaaaataaagtctataaaaaaatactctgggctggagaaaggaggagaagaaaatgataaacattgtaaggtctccccgaaatatggccctattccttcatccctagggaaacaatctctagggaatttcagaatcagagaaaagatgcccagttcctgctcccattgaagcccaggaagacaacaaagttcccttcattctagggagaaaacatgttatctttagtcaaagatgtctgagctcttctgggttccctatagccacagggtggtacaagagggcacttttcttacatcccttagagacaacaaacagtcctaaagtcgtcttgccagcacacaaaaaggagtgatatcaccagacaaaaatgagatgtcatgtgtctcagatgtttggagtggacacaaatatcactgagaatatggagagatgatgacaaaggaccagacgtcacagtcctctgaagcctgtattctacataaaactgcaagaagagtcatgtggggagaaactacaaatggatctaaaaatctcaacttgaatcagaaaaccttaagttaatagagaaaagtaaaaatagaacattaatatttacctcatttagctggtggaaggataaaaatatgtaaatgtggaaaaaaaaaactcatggttgaaatggatttgtcagaggctacttcagtttttctaaaagtaatgtttccattaaatgaagaattcgcacaatatttagagagaaaatttaattataccagactgttaaattcctgtttttcacagttcaaaatgccattttgtaataaagatattttacaaattctgtggttaaaatattccacgttttgtgattaagcctcaaatttagaaacattgtagtcaatgagcttcgtagaaaagtcatttctttttctcactgaattttagaaaatatttgggaaaaatatgtaactgtaacaatcaaatgtagcacatttagagctatagtcttctgtaagggcttgcctggacttgctaggctccgatctcacctgggtttcattgttctttttgactcaaaggaatgtaaatattctctaaccttctagtccttaccttgaaaaataacacagcatttacatattcccaagtacttctgtaaccaaatccactctctcctctttgtataaggcttcttgtcactaaattatgacttatagccaaggcatcaaagtttaaagtctatattttgtcattgatttgtacaaagtggttaataccagccaaaaataaatcttaatgaattttgagtcattattatcattgcttcaattatatcaatgccttttagtggattttgaggggagaaaaggcaatagaaaaaaatgaacaaattaaagtactattaaaataccagtcaattattaattgatcagtctataatttgttccctgtaatataaagtatttggaatagaacaccttaagatttattcaggtgcagatgtttcaagattacataatttgactatcagatggttctagtcataatcgtaaatacaatcaaattatggtgaaaatgaaagaattttttttggcatccagaggaatataaaaaataaagttggctataaaaataactagtcagaagaatttctatgactatggaagcaaatctttttagtccttatgtaaatttaatttccttctggctttcttctaataatgggaaatttatatgcatttgcaaatagaatattggtatgcttcattgacatttaatgaggtctaacatggtcacactgtgcacttctacagtcatttctgcctctacatgatactaattggatcttttccaaaacacattaggccatttatgctatttgttgtcttaaaatgttccattgccaattatctccaaaaatttgctccagagtttgcttctgattacagccattaaacgtacttcaacattttaacttttcagtaaaagagaaggtccttgttttgctataaaattttccaattgcaaatcccttcacaaagttaaaaaaattgattataaataaatccatttataatttctttcttgtcctaagcaaaataaaactcaggaggctgcagaaatcatgctgtgactctgaggagacaaacatgagaagcagagttggggactgaggtgaaaaagaattctaaatatttagaaacagctgctttttaatatctcaagagatgttattttgatatattatacaaatgtattttctgaagcagcagaatctgagtactaaagtcacactgtgggactgaattctgttttcaccactttttatacatacaataaaagctctctgattaatatccatttttctctttaggattttgccacgttttgattcatgagcagaaaccaaactataaatagcaggatgcaaattttgtttcaaaatatattatatgtagtcttatagactgtaaatatgtacactcatctctttcattattatttggctagctgacaataggtagacacaatcacagttttatccttattactattctcacaagttttagtcacacccactaattgaatagtttcagctattaaggctgtaactgttgatccctgtatctgtcaatcaatatttggcttcatctacatatatggtaagaccattattttaaaaagtgaggatggctgtcatgagaatgttggagtcttacttgcctactcagaaccagaactctctccactgggaaatgtcaccatagaagatcagttggctgcaaaattattgtaaagatgaatttgatctccattatccctactacagttccttcctggttcctctcttaagtatctctccttaagaatctgatgcatattctaaagatcaactagattgccccattattttaatgcctacctgcttcctcctttgtctattcatgctaatgttttaaaagggcatttcagtcattgtgagacagacgcatattttccaaacacagaggtttagatctgtaataaagtttagaggacaattttcttccgtcatcactacacaggatgttagatcctagagagttgacgcctacctgccttactcatcttggattccccagagtttagcttagcgccgggcaaatagaaagggttcaaagttggttgttaaattgaataaatgtggtcagtgattagcaactcagcgcactggtttaattagaccatataacaaattactgaaatctcctgttcatagatgtgtcttcccaactagacgccacgttccccaaacgtagaaacctcattttttctcacccaccccagcgggagtcttggcatagataattcgtacttgatagctctcttacttaaccgaaattcaatagttataaatcagtatcggaaagtaaagcgtgaaggagaaactatgagaaatgtaaaggatataacaggattggtttgctggaaagacggaagaaaactaatgataaagcagtgttacaattcctgcttctggagcaccaattaagcttttccgcgctcaggttgccttagaaactttagagcgcgtccgccccagccccgcccccggcctcgccccgagcttcgccccaagtccatctcgctcttcatccgactaccccatacccttacttccgccccaacctgccaactggaacctagggtcctacgctctatgcccacgcttattctgcctgactaaaaatatggtagcaaattaccaaagttagaaagatatcttataaatataatccatacttttttcttagatatataaacgcaaaagcacaagatatttgtaatttaaaagcgccatctagcatgagctcttagggccaattttcaggcagtgcgttggatagcaacaacttcggaggtccccagattgcagagggagacgtggacgtgagtggagcggggcggtccccagcacactagaggaagtcgtgctacccccgcggagttgtcgtgtgttctggattcattccggcaccaccatgtaagtgtttgcttaccgactgccataattcctggtccagctgcccgaccctgactctctcccgctcttttcctcaggtcgaaggtttcctttaagatcacgctgacgtcggacccacggctgccgtacaaagtgtgagtagctcggccgagatgggccttttggggccggacaagacggggctgggttggggatgatccgagcttttccaacaactaccccacgcagtcttcatctcttcacttcatctactttcctggctcgcgcccttccaggagcctttcccaccggagcctgcgaggagaggtccgtacttgctcgctaagtgtcagcttggcagcttggccccgtcacgagggtgtgggtgtgtttctgattagtgacctcccctcggaattcatttggtgggcaggtggcgcgggaggacaggtggaccaggttctggtaatttgttgggattcttaaacagtccccatctgctggatattagaaaagcgtttcaccgctttggccagctggttgaggaagttaaggaagacattccatcttgatagtcaagactttgaaattacttgaacatttgttattccgcggcttctgagtttcgttgtgtatgagtaactcagcagtcgggcatcacaaagtaatgagactcagatcacacccttcctatgctgggatttaatagagtatttggtaggaatgggaaatgcagataggggatagtttatccatgtggggcctttacttatccttcgcagttgagtgatagattttaagtaaacactcttgaggttattgcagttggaagtagcatgaaatgtagcaaagaacaggattacaatagaattttttgcataattaattagtaccttggcctacctagctgactgataaatttcaatgatttaccaatccatgatccgtacaacctctcagccttttcctcccttgatcttttcatctccaaaatatccctgttacactttatctcaggtgttc

SEQ ID NO: 6343 - DNA, 6000 bp, Homo sapiens
ctggaactcattctccagccatctagtttcctcctcaggggcaggctatcaatgttactagtttcttaagtatcttttctaagatggtctatgcatatacaaaggaagtataccttaaacccaaataacagtatacacacctcccctttttcacttaatatgcaacattttaaaatgtctcttcaacagagtataaggaaaagacagaatttactcttacattgtcattgtcattaaactataaaggggtgcttattttaaaagtcccaagaatacagaatatttaagtgaaaagcaagtctcccttcttccctctcccctgctcgtccaattcttcttctttaagccaataccaatgtttataatttgagagtttttctaaagaatttgagggtaaaatgaagaactgtaaaagtagaaggaactaaagaaataattttgaatttttgatcaatcttttatgaaaattattcaaaatatatgaatataattgtttttaatccaaatcatcagaagagttaaaatgaaaagtaacattctcccccaccctcagttttcaccagtttaaccattttcagttttcttttatggtaactctacaactcttaaaaaaaaatatttactgctttgtgtttgaattcatcaattttaggtcctatatatacactcttacttacttcaccatgtaagataaagaaattagtaactctatatctgttccctgtttactgtcaaattctgtcacctgtactatctcttttttagattatcaaattttataatatttgcacctggttctgtgattaagtctttagaatgatttttaaaaggatactacatgcttcctgccttctataaatatgcccaactttcaggttcattgataccatctttggttttggtgtgccacacatttattactgtcatttcaaagggatccagggatgtcatacacgtgtgctcagtctgttatcttgaaccaaaaaaagtttatcttctaattaactttagaaaataaaataatttgaaaactctacttgagaaactactatagatattccagatatgttctgtaacctagatgtgagtaaatatattctaaatttataagagtattctatttgattacttcaagtacaaatactacttttcaatcataagaactttaaaaactagaggcaaaaggaggctccctgtttccttgttctaatacaaaaccatcttctctcaaaccaagcaagagagaagccataatgcaattacttcaaacaaatcattttttaaagtagcaaaacaagttgctttttaataacatacgagaaaatgcccccattaagtagactaggcagctgccttcctttctcaaaacacctggtatagaatgacaagtcaaaaaggggtgtggtggtatcacacactttcctgttctgacctctcattcacttctcaggaggaggtgactgaatgcctgctgcttaccagcactgtcctggcttccagatggagcagacagacaccactagagagagaacacagttctagattgctaatgggccagtgctgcagagctactgtatagtttatgcaaatggagacactaacattaaatagtaagtacaataaattctcaagctttgcctgaccagctgagcaggtccctgaaataacaagtaacatacctttctctcccaagctttacttcttgcagagttctgggttggagaaaaccacttttataatcaatctgatcaattaattccctaaatgaaacctgatgttttgttctctgcttggagcaaattactgaagaggtataggtggagtctcagaaccttcctcaaggcacttaacctctccttttcttacctttggtctgaatgacacctataccagctcagcatcacaggattctaatctattcttttaagatgttaataatttgaaagaaagcacaagaataatagcaagtaacttgccacgtgcaccttgcatacgtgatttcacataattctcacaattccctatgagataagtactcatcatgagttaagtccccattttataaagaagaaaattaaggcttagaaaagataaacatcacatctaaggtcacacagcctacaagaaaacaacagctgtaacagtaaattataggtaaatgtcggggtaaattattttagcactttatcaagaattactaaattcaacagaaagaaataggcccctcactactaagtttgccctggctacaaaagtctacctaatattctattgtaaattattttctctaatgccaaaaaaggcataattcctttttaagataagactagttctctttcataaaagagaaagctattttctaaagaagttaacatctttatgatatgtacttaagagttagttggcctcttgctattctactagcctgctcagttccagttgttcaggaagtaatttatctcgtgaaaattgtgaaacactacagaaaatccttgagttatactgattggacaaaatgaaaattgtggcactctcttttgctgccaatgttaaaagagtagtatagggctaaaaaaattaattccaaagtcttcccaacagacatataaacacttcagaaaaggaaaatgagggctgtaaagctgaagagcaatgagaactgccttctcaaagattccaggatgtgtgcataaccagctcggctactgcattctttttgagacagaatcttgcctgtcacccacccaggctggagcgcagtggtgcaatctcggctcagggcaatctctgccttctgggttcaagtgattctcatgcctcagcctcccaagtacctgggattacaggcatgcaccaccacacccagctaatttttatatttttagtagagatggtgtttcgccatgttggccaggctggtcttgaactcctgacctcaagtgattctcccgccttagcctcccaaagtgctgaaattacaggcgtgggccaccgcacctggcctcagctattgcattctcacaggaatccaataccaagctgcacgtaccagaagaccctcactgaattcttgaactcattaagctcatcctctacccatgaccttatgctgttctttcttccagctgcaatgttatttctttagtctttatgaggctagcttcaggtagtccatcatcagttctcacctcaggctgtcacttccttggaaaggtcttccctctttctctaaaagggcacacctcatccttttctgtcacaccatcctatctgattttccttatattatggaccaccatctgaacataccttctttgttctttttttccatgttcatgatccccacaattatgtcagctctatgaggctaaggatctcatctttcctatttatctttctatcttcaatacctaactcagagtagggacataacatatgttaaagactgcatgtggctaatgataaatatggaagaatggggtgaaaatgaaagattccatttagttcattccaaacgttctccttcatgctcaatgagaataagaaataatagtttatgacccatgacaatgaaaacaaatttttttgtagaatatgtatctcccccatcacaccctcagtgctattaagtccaagcatcctgctgcagtaggagccaaatcaattataaacagactggaaaatttatagagcaaacaacttttattatccagggtataaaagagtttgatagctgagccaaagaaatttccacctgcgccttcattgatttcagatccacttccggtaccatatcctagaggtggaaaaagaaacccaagaaagaacgcctatttgatggctgagcatacaacagtgaatgtgaagagaacgtttaaatcaaatctctaaagttggaggacagaaaaagttgaagactctaaactcaatctgcatttggacacaattccaaatcgtataaaaagaatgcttcaggccaggcacggtggctcacgactgtaatcccagcattttcggaggccgaggcgggcagatcacttgaggtcaggagttcgagaacagcctggacaacagggcgaaaccccatctctactaaaaatacaaaaaattagccgggtgtagtggcaggcacctgtgatcccagctactcgggaggctgagacaggagaatcgcttgaacccgggaggtggaggttgcagtgagccgaggtcacgccactgcactccagcctgggcgacagagcgagagaaaagaatgcttccaacatcaaaagtaaccatcaccactgcttatataaaataatcctcctaaacctggccctcaaaactggaaaacgtttgtcaaacatctgacaattcatgttacttcctgctattacaactaattgaattgaatcacacaagaagcagtagtgcataatatcctaatggtaagtggattaaacacattgactctaacaccgaaaaccagcactgcttaataatgtactgagccaactttcaaataaaattcatttttattgctttgcaataggtgaaataaatctgatctcccataacttgcacttgattgagagctcatagttcaatgtgcgataaatgaaactcactcaggaccaagttttggtctccccaagacccccatggacaaagcaacctaggtgaatcattaaggcggtaaacgagcacgcgctggagactgtcctgcagcacagcacctcgggttgactgcctctccttctgggagagagtgggcagcaggattacgcctcggctgacaggacgcctcgtctggggcaaaacgttcggtgcaaggctccgggccaaccgtcccatgctgctgggggaggactgggttccggcgagcaccagctgcaggacacccccacagccgtccccaggcagaattagagtcggggtcgcaggcagagcgaagcctgacagcctgggagatgaggcccctcccaccggatccgccaccatggccagggaggagtggagagatatcctgggcagaggctagtgaggccggggtcctgccggggcgcccgaggagaatcccagccccatcgccccggcccggttcctgcccatcacctcacctcagctggcaccggcaagttctctgccgccgccttcagctccaataccgagtccgtctgcctgtcggtcagcggcgccgtcgtgtccggtctccgatcccagagagccagcttttccctagcgtcccgctccgccgccgcctcaggcagcagcaacagcgccgcctccgccatcgccgccgccctcgcggccttcagcagcagcgagatggaggggaccccgacagagagacctgggccacttccgggagaaccggagcttccaacactgcaccggcggcggggcgggacggaatgccctgaccccggaaacggttccgcagtgtggggggcgggaccgaggccagtaccgacgtggctttaaatgggtacgactatttccggttgaaacgtagaaggtggagaagacaggacccaatggaaatagaaatgcccctaccggaagtcttttcctcaacatcaataactttattgttacgtgttgtacagattattgacaactgcgctaaatcaccctgccggcaggagacttggatctacacctctctgcttacagctgggtagtctgggtagaatgtgtggagtgtatgatttccatgttggcatgttgacaatttatgcctcttggatcaaaaccaaaagcataaacttttccaacatccagtaattcccctactagaaaactaatttacggaaacacataaaaaattcaaagatgtgtgtatctcagacatcattaatggtatcaaataactggagacaacctaaatgtccaacattgaagaactggatcaagaatttgtggcacagaccaggcgcgggggctcaggcctgtaatctcagcactttgggagaccgaggtgggcgtatcacctgaggtcaggagtttgagaccaga

SEQ ID NO: 6344 - DNA, 6000 bp, Homo sapiens
tggggaataaaaattcaatcagctaacaaagccccttccaatatatactcctaaagctggccaggagactttaccacctgcccttattctgaaaacttcttcataatgctgcatggtgactacagatagcttttaactggacattttcacaatggaatcatacatttgatgatgaaccttaaattttcactgcagatgtcagagtctgccacgttatgtttacctatttttccttatcagattaggatttggtagtctctgttccattggaaagtggctagaaagactgacaaggagagaaaattctagtagcatgagtttataaaggtgaaatcaggctattcggtaaaccagaagccaccttctgagcaccaagggagggcaagatgccattttcagagatacagatgaagggaacaggattaccccagatagcgaaggggtaaaatggagacaaatggttaaataaagggaagagcgcgggaggaggcatctgagcaaagcgaagtcctgtgcaggatgccatagaaggaagagatggcattcaggcatggggcccaagggagcgtgttagctggctccagaagaacaggtgggatttgaaaaagcaaggactctgtcttgtccacacataatgtcaccctgtagagcatccatcatggcacactgcagggggcaaggcagaaataagaaccccagcagtgaggctgttcccattacccaggcaaggttggatggtgtcttgcacctccatcgtagtcatagataaggggagaagtggtttgattctggacacatcctggaggtaggtagagctgcaggatttgttgatggattagaaacaagacatgaaaaaggggagtagttaagattcggggtccaacaactggaagagtaaaaagtcatcataatagagaaggggaagcaggggtttggtttgggatgtgttcgatgtgacatgcccattagacatccacgtggagaaggcggttgtctatgccagtctgatgctcggggaaacctgggtggagactcaaaatctccagtcatcgggatgcagcagtattcaaagcaatggcctggagtgaatctagacagagccctgagccctccactatttacaggcaaggtgaggaggaacaagcaaaggagactaagagggaatcgccagggagctgagaggagaagcaagggagagccagggcctgaaatccaagttgaggaaggattcaagggacaagaagtgatggcttcaacaaacattgcagacagatgggctgagacctgcacactgatgctaatgctcaacaatgcccagattaatatctcctagccctacttccttacgtgaaagaagtctttttcacaggttccttgcacaaatgtttgcaagaatctcaggcggtgaggggagttgaaggtgggaaatgggaacacgtgtatttccaacttgattctaatcctcttagaacccatatacagaacaaagactcagaggcactgctggggctgaactccccaactacagtccctagtgctgatttcaggggacattaagaactttgtttcaagagctgtgaaggctgagcagttggtcttcaagtccgagagaaaaggtgcatcctcctggattacactcaaatgagcaaagcagcctgagctccaagctctttgtaggagacctctctctctctgtccctcctcccctctcccctcttctccttctcttctgtctcctctctctctctctctctctctctcacacacacacacacacacacacaccatttttgccaaggctcactccagtatgaggaacccacaaagaacaccaagacctccattctgagcagggcctccattatttgtcctgctgtttgtttgttctgcctcctgtcctccaggccatcaatgattcttgactctctaggaggggtcaagcttcccatcatcccaggggatctccttagcccatttgtaagttagtggaaacacagagggagtgagggaagggtgctagccagtctttatccttcaccaacatcagatcccggaacacaactggcccctatatctgtacagcagcaatatctaagccccagctaaaatgcccttttatcaaaatctgcagaatgttttatctttttcaggtaagctcaaatttttctattctcgcttcccccaacccctatatacacaccgagaaaggtcattgaaaacagaatgaaagtatctcatacaacaaaattaattcaagatactttctttgacaatgggaactcgcttctaaataagatacaagaatgactaaacaccaaaccaaaagaaatgtgaaagcaaaattaatactttacaccaactaacagtttgtttgcaacatcagcaaatggagcattcacctgttactaatttccctaaatacaaagtccactgcatttctaggaaggatggttagtgtttggcaaattttttgtgtaagcattgaaaaatataactgagaagttaatcagagggccatgagtgggcaaaaagatctaaaacatgttgattatttaaaacaccagagcaccagagagcacgcaagtctttatcttataataaaatgatcctataagtcactataataacaattgactactttgtatatgcaagtttatcctagggactctaaaaatagaacttgtaggatttaaatctaaagtaaagattttatgggcatgatctattagatcctccagctgatccatttatttgcttccagtatgaactgataacttgcttatgttttcttcaaaaagtgagaccattcttcccatagtttttctatcaccagccatacactggtggtctttagagtttttcagatccataaaaggattgaaaaagtataagaatcaccgctctaaaacatccttatgaaaagacatacataagtatgaaatcacaaaaatcacaatgtgtttccaaacaaatccaacattcttttatggccagtagcagcaaacaggttttgtggaactgacataaaatctaatttagccattattacaacattaccagcagctcagagcactaagtcacctcaataacccagtactgctctgcccatattatctatggctttaattaaaagtgtttagaaatggttttagtactgactttgttcagaatatgtggctgaattctaaatttaaaaataagtcttccagtaggcccacaagtgatcagaattgggtaccaaaagttgtacatttaaacacttttattaaaatgtttatacatgtacataaaatattttattgtgatacaaaactctgtacaaagtgtactaacaactgacatgattataaatgaatccccaaaacaatggtgcctaaatttgaacactaaggagaaaaaaggaggaagaaatacttgagacaactttaccatggcatagcaatatttcctgctgtcaaaattaataaaatattttgcacaagggtgttacaattaattttatcaggctaacaatgtcataagtgaggaaccctttcaactgtagagagcactgtggaaatatagatgtggtagaacaatctatatcaccctgcagttgtttctgtgtttctatgactagctttgtttgagattgtataaagcggtcttcacaccccggtgaataagattggtggatgcagttccctgccctgccgcagaagggacctccaaacacagtttaaatctgactctccgggagttgtgttttgacactttcacaacagtgtgaacttgtgccacaagcaagacagatcttattggattaacactgaactcgtgacagctccagagagtaatgctatctgtgcggcttaagaacaaacgtgtttctttcatccaccctgctcattctcttcctgcagttactcctagcaaatcctccccgccctcacctctaggaattcctctacacccagagaaaggagtttctttcctcactgcggaaacctatcaccgcttcctttccacagatggactccaaggggcactcactcgtgtgcccactaagggatttctctcctaattccacgccttccaagggaagtcagaactgctcagtttcccccggtgaccacatacacgtgtccaagtgaagcctcgtctgggggagactcagttcccacacttccccctggcccctgtggaggccctctgtctcccctgcgtggccctccgcctggcccctcgcactcaccaggaggaggttgtgcgccaccaggtacccgagccgcgggctgccccggatgccgggggccaggcgcccggtggcgtagccgtgccaggccaccacgtaggggttgtcgatggtgatccagtacttgacctgaccgccgaagtggcggaagcagagctccgcgtaatccctgaagtggtcggccagggcgcggttggcccagccgccgtaggcgtcctgcaggcgctggggcaggtcccagtggtacagggtgaccacgggctgcacgcccagctcccgcagccgctccagcaggcgccggtagtagcgcagcccctcgcggttggggacgcccgcgctgccattggggagcactcgcgcccacgagatggagaagcggtagtgagtgaccccgagctcgcgcagcgcctccgtgtcgcggaagacgttgttgtagctgtcgctggctacgtccccggtggcgggctgcagcggcgacggggcgcccaacggcagactggcgttccgggagtctcccgggggtgccagggggtggtgggtgaacgtatcccagatggacgcacccttgccgtgctgctgccagccgccctcggtctggtaggcggcgctgcccacggcccagaggaagccgtcggggaaggtgccctggaagaggcccgcggcctcgggggcaggaggccgcgagaaacgggcccaggtctgcgcgccgtcgcccggctccgcacgcaggcggcggccgcccaggcccagcagcaccagcagcagcgacagcgacggcggcggcggccgcgggcggcgcggcggggcgctggcgggcatgctgcgcgggagccaggctccggggccccgcgccgcgcccctttatgcccgcgccccgccgcgcccgcccgcccaccgccggcgcgcccacccccgctccccggcgggctccgctggcaataattacctgcgagccgggactgcctccgccctggcactgggggcgggggcaggggcgccgagggcgaggggtgcccgggaggggcgcggcagcgggcaaggtgcggcaggcgtcgcccgcggacgtcggagaaaggcacctgtttctcccagctcccgggagccgtgcaggacgtttcgtggacgctcaggttcattctctttgcctgccgcgcgtcctctgagagcagccctggagcggcttcgtcggggagaaaaggcgccgaccaactttccccgacttgggggcgggatcctgccgggccctagcggagcgcgccgctggggaagcacctgctctcacttttctcccactcggaggcccaaagaagctccggctggacattgctggagccaattagggactggccgaaatcctagagggactgccaggtgggacagccgagggggaacttcgccgtgcgctgaaagggattcccccttaggtgagatgctcgcggggagacgcgcccacccgcgcccctctttcgaggaagacaaagtagatttatgggttgcgttgggactggggttttgctctcccttttactgttaccttttaataatttcaaaccagcactctatctttgattagatctctcagaataccctggtgaacttcaaatcacagtcgttgattgttctcctgaaaaaccaaacaccaagtttccaattttgagtaaatctcattcacctttattatcctttggcatctgtgttacctttcggctctgacttagcaggtaatctgtgcaaagttgtgcgcacaggtctgctggagcgggagg

SEQ ID NO: 6345 - DNA, 6000 bp, Homo sapiens
tccttggtagctagaaattttaattatgtggagtaaaagattatctgctacctcaggactgttggaaataagacagttttccatgaggtctttggtcctgttgcaaagttaatattattgggtatacgtatgcataaatacatacatacacatatgtacattgagatgtgtgcacatttaaaaataattagctccacaggaaaaaagaaaccttgtagaaaaccacataaatatccaacatttttcacaatttaaacggtaaaggcatgttgttagttgaactgaaaaatctcttagctgaaactatatgttttaaaaacatgggccaaaagcaaccacgtaactagtgtaactttaaacaggaaattttatgtccttttttttttgagatggagtcttgctctgtcacccaggctggagtgcagtggtgcgatctttgttcactgctacctctgcctcctgtcttcaagcagttctcctgcctcagcctcctgagtagctgggattacaggcacccgccaccacgcccggctaaattttatttttagtagagacagggttttgccatattggtcaggctggtttcgaactcctgacctcaggtgatccacctgccttggccccccaaagtgctgggattacaggcgtgagccactgcgccaggccaagttttatgtcttaaatgtagagccaaaactctgtgacaggaacgtgttacaaatcagtttcctcagccctggtatccactgagggatgaaagcttgcaaggtacagggaaggagcaagacttagactttggaaaagctggcttcaaattctgactctatccttgtgctttgtggcctcgggcacattttttatcctcgcctctcttagtcttagttttctcacctataaaagtagtagttttgtgattatagtaaaacacgcagcatggggcctggcacacatgtggtcacaacaagtacatattattctctttataattctgactattggagatatgcaaatggagccactatttttataaaatcatcatttattcctttaaaacctcattacggatatttcctagcccctctcaaaaccaacttacctttgtcaagtctcctatggtggtgctattcaattttaattaattaaaaacgaacagactcatcatgttcaacctactaactccatcaaatgttcaaaagaaatgttttaaaggcatcagttttattagattgatcatacagtggtatgtattgaaaattctttcccacttcttaagtatttcagtccctctcctgcttccataagtaacctcagggaggagacacagattcaagtagaggattttttcacacgtgtgctacattagaagatgctctggagagaaggcatcagcatgcaggctcccagaatggtcttgagagcaccctgggcatcacatctgggacaaaccgatgaggttaatttattacaaatgattccccaatgaccctgaaatactgcttttgctgccatctgaatgggctcaattaatgtgctgccaagaattttttccactgattatatagacataactataaatccattgcaaatggagggaaggtacctgcgtctacatttgtctgcatgaacagaaaagaaacctgagacacatcgattttacaatgtgtttaaagtgaattcttctttgcaatttcctgactacattcttgttctctgaaaacaggcaatgtgatttttattgtgtataaattggtttttggtgaaaaggagttaaaagatttcaaacttaacttttcatcaacagccaatggtcattctgtttatgaccttacaggatatagctggtatatgtcacagtcatagatggacgctgtgcactgacaaacaaacctaatcattaaaataggggactgcctgtttcaaatgcattatgcaccacagacagtatgaaccagaaaaacttggcctataatatttattctaattatctcaatcaagaataaccattagtatattctcagagagagaggaaaggtgatttttttcatttcatgataatgtcacattagtttttttcagaatatattaaaataaatttaatctactctcaattgctaatattttttccttttgttttctgaaaacaatcagacaatagcttaagaaactacaatggtggatctaatcaatcctacttcatatgaagatcaaaacctacttcaggattcattttagaaagtacatattggaaaactatattgaaaaatgacccgttggaatctagattgacatggcaacatttgaaacaagtggtctagctaacacagtcgaccatgcagaaggagttgcaacatttatagaaataccgaaggaattctcgtgaacagtaattgccgaaaggaaagaaagaatggataagaatgggttcacggtttcagtgtcggtgacattactgagttcatgttagcaaaatcaggtcccttccaaacacaattatgtaaactatttgtattggattgaaaggggtcatattctgttacatacatgcagcattaaaaaatctaccatcatgtaaaaaaaaaaaatagtctggaaaaagtaagtctttctcaattttcctcaatcactcaaatttattttaaagtccaggtaaaaactctgaaactcatttacttctaataacatcatgggcgtatcatatcccttcctttcctacccccagtcagccctccaaacaaagtataaaaggaaacccttgcccccaagcaaaacaaaataatgttgagtggagagctcaacaattttttttaatggtgaaaacactggtaacattattttcacttcaatcacttaactcatctgaacgatgtcattgtttcacgaatgctaagtgctcctgtggcttgagagggaatccaatgcaaggaattcaagggaagcatctcaaaccttggccaggcagtggaagtgcttggtaaatgcagagtcctcctgggtgcaagggtgctacacatcactgggcgagcgcgctctctgggcgagactggacgggatgcagccgcagcaaatgagacagagcgctttctggatctcttggtttctgaaagcatatatgacagggttgatgatggaattgtaggtggcgggcaggagggtggcgtaggtatagatggaggggtaggtgtaatccgctatcaaggaatagagggtgaaaggcatccagcaagcagcaaacgtccccaggatgatagccagggtggagacccctttccgggtggtcacatagtgcgacgtggccaggaagtggtgctgcagggctatctgatgggcgtgcctcatcacaatcttacagatctggatgtagagctgaagcatgagcgcaaacatgaagaggaaggacaccgagaggatggccgcgttgttcttggtgagcggtctgaccacgctgcaggtggactcgtctcggaggcagttccagcccatgacgggcagcagccccaggcagatggaggtcccccagagcatgacgagcatgacataggtaaacgtgaccgtcctctccgaatggtacgtcagagcgtagtacagtgagaggtagcggtcaacagtgatagccagcaagctgcagacagaggcagagaaagaggcgacaatgaggccgatcgtgaccagcttggtggcttctgactgaagcaggtaggcaaaaacaaaattggtgatgagtccaatgccggccagcaggtctgcaagagccaggctgcctattagcaggaacatgggtgctcgcaggctggggttgtggaagatgataaggaccacaatggcattttcacaggagatgagggttcccgaggtacacaagacaatgtcccaggggttgactacgagctcaggctctggctctacggcaggaacccgggaggagacagcagccgagatgttctccgcagcagcggcatctaaataatcccgaggcagcccgcttaaattgaccttcaggtcttcattcattttaacccctgtcctcttcaacgaaaagacaggctttttaatgtttaaatacagcagggtgacaatccaagatcatgcaaaaaacacacagacaaacagaaagccagcccctgctcagataccagtaccaaatgccacaagcttcgggaatgaggaactgttgggaaatgaaacaaaagccaaagtctctgtggtttaaaccccacaacaaaaatgccgtttggcattggggaaaacacagggtaggacttcaaaacaccagcgtgagcgaggcaggcacacacggactcgcggcggtctgtttgcaacagcgctgggaatgcacattggaaaatcacatcttgcatgctgaaaacgaacaactgtttgacatctgggctgctgccgagaaaaccacgcggcagcggcaggtctcgagccaggggccgccatcctcgatggaatatttaaatcgcctatttccatcgaactcccaccctccaaacgcatcccccgcgcgcgtgcacatcctcaaacgcacccccgaccggaacaaagaggggctccagactccccccgtgcgcacggggcagtcgggagggccacgagagggaggtgtgtgcaatggaagtaccgagacagacagacagacagatgcccatgcactgctgccgattccctggcggcggggacgggagtcggacgcgagggggacagacagggtgcggggacaggcggcccgcgggggcgggggggtcatcgagggggtcaccttggctcgcccaggccgagggggctcctccggtgcttccgaagcgcgtgggctactcgtgtcgcatgtcggcgcagttgcccgctgtggcaaggggggggcggccgggctccggagcgggccgggagggcgcggggcgcgcactccgcggcaggtgagcggcgcggctgcaggtgagcagcagcctcggctcgcgcgcccagctttccccgccgcgcccgcccggcccacacgctccccgcgcgcgcgccgcccccgccccgcgcgcgcccggccgcccgcccgcccgcgggatccccgcgaggccgcgcgcccccacgggtcagggctgctctagggtgcgggcaggcgagggcggcccaggggcgcggggcgaggggcgaaggagccaggaggctgagaactgcatggtagccctgcctgcctgccgcgctgcgcgccccaccccagccggcggccccgggcttgcaccgggcggggcaggggagcgctgcctggagccctgtgacctatttcgttcctgtggtttccctggggagctccaagtctctacagtcctggcttttccacgcctttacctaaaccactacattcagggccaaaagaattgcttaggatgatattcacgatcagcagcagggatgcggggtggacaggttagggaagcagatctttaaaacaacaaaatgccccgcacgctcttttagaattgcccatggtcctggacctggttcattatcactgttccccaggaacatttgcttgactggatagatgctgctgctctgtggatcatcattatcatcaccaaattgcacttattaagcgctctttgagctgtgttttcaaatggaaatcatttactgagttcttgtagaagcttcctgcagacattggccaaaccccaattcatttagatactgaagtggcactattaatttattttttcattttgccacatcaatggattctaagatgaagaacctgatagctgtctgcttttatgatcccatgcctcctctggatataaaaaccagagcacctcatagatcttaagttccaagatgatcctccagtttaaagatgggataaggaaaaagtgtgatagtcttgtcttgccctgtcagaggtgaaggttttcccactgcttttcttccacttgcccaggggctcttgtatgaatggagatggtctgcaggcaagggaccctacaggggcatcatcagctgaccagcctgcct

SEQ ID NO: 6346 - DNA, 6000 bp, Homo sapiens; identical to SEQ ID NO: 1776

SEQ ID NO: 6347 - DNA, 6000 bp, Homo sapiens
accgaggctcctgtctttactaagggacctggaccctgttcttttcctgctgagatgaaagagaattccagccccctgattgggaaggcagtttggatgtatttgtttctggatctctaagtggataccccagattatggaatcaataagaagccagccaaataggccacctgaagtcacaggcatctttctatagccttctgtctgagtgaagatggagacagatccaacaggcaacgggacacaccattccatggtgatgctgtccccttccaggggccagaaggaggctcagatttacaatccagagatgaaacaggccgcaactcttccactgcttgtctctcgagcctcacagcctggcatacggcatgctctcagcaagtgctgggggaatactgcagctacttttcttttccagtcaaaggataaaccacttctcgaatctaaattacaactgcaaacacaacacaggttagcacacagaccccaacctctatgcttacatttcagctaaagaaattactcctgctacttaaaaaacaacaaatcaaggctggttgcaatggctcacgcctgtaatcccagcactttgggaggccgaggccggtggatggcttgagcccagaggttcgagaccagcctgggcaacaaggtgaaaccccgtgtctacaaaaaaaaatacaaaaattagctgagtgtggaggcgtatgcctgcagtcccagctactcaggagactgagaggtgcgagtattgcttgagcccaggagttccaggctgcagtgagctgagatcacacctcggctctacagcatgggcaacagagtgagaccctgtctcaaacaacaacaaagcccaacaaagccaaatactgaatagttaggaagatactatgatttaacatggggagaaattttagaaaattaaatgtgaaggaaaacaaataatttatagcaattttaaatgcacaatagagtcatgagctgacaaaaggtcatgtaaccggttttgacgttatctgttttattgtttcaatagtgaatttattggctcatgcaatatatttttggagatggcgtcttgctatgttgcccagactagcttcaacttttgggcacaagtaaccctcctgcctcggtctcccaagtagctgggactataggagtgtgccactgagcctggatattatctgcttcaggctcaaatatttgaaaattatttcacaaacgtttgtcaaggttcaaatggccttctaagtagaatactaaatcaggaaatactttgtgctcctaaattagcgactgtacctcagattgcttagaacataaacgtgttctaagcaatatgttctaagcataatcatgttccaagccacagccccaggatatataaggcagactgtggaccacaccatcaacgagatgccctggtaggaggccaggtccagactcttgggaagtcaagtggatggctgactcagtggatctcagatgatctcctcctctgctcttgcagggacagcaggaaacctggcctacctccaacgcccctgcccctacatcatttcccagttctggctggctctcccctccttgctgtgactcccctgcttctctatctcagggggctccttctcctttctccaaggcctcccacttctttgctgccactgaaaatactcacaaatgctcttttctttgaagggatttactgttaacgtacatagtggaacagtttggaaaatgcctttcactagcaaacgcaaaaaaaaaaaaaaaaaagctacaatttgttagaaagccaggcaaagtgatcagtctagtccagtggttgagaccaaaggctctggtgacggacaaacctggacttgccggctgcacgaccttgaactgcttagtctttctaagaatcaatttcctcactggcacaacacagtaccaccaccactttcttcagaaggtggtggtaaggattaaaggagaaaatgtatgcaaacaactagttctcattattgttagattttggagaaattagccgctgcttcccagtccctgactgcctgtctcgggcgcacccatgttgccagtgtttattcctgcagatgggctgagcactagggccagcagtagcccatcgggtgacctggtgcgactgagaaaggcgggcccttcttttgggcagacccggggcacatggcttccttggtcaggtgtctggcacaaactgtacaaccatgcacagtgaccttgttcccaactctccttcctccaacactaaacgacttctgttcctcaatgacctgagccaggcctggcactcagttaaaagaagccctgtctgagcaaggtggcagagacgggggaccaccctctctacatcccttcccccctttttttgaacagggtttcactctgccacccaggctggagtatagtggtatgatcatagctcaccacagcttcaccttactgggctcaagggacccttccacctcagcctcccaagtagctgggactataggcatatgccaccatgcctggctattttaaatatttttttgtagagacagggtctcactatgttgcccaggctggaatcaaactcctggcttcaagcgatcctcctgcctcagccttccaaagcatggggattacaggtgtgaaccaccgtgcccggcctccaccattttttacagtcaggacatgaaataggaaaggatgctctgttttcttccagatgggccctaggttgaactttctggtccctcttctccacatgatgtcctgcctgggctccctggctcctctgccatagctggatcgttagttcaccttatgaagcaacaaaaagagagacccactgtggcctctgctacaggccaagcagagggcacaacccaggaggaatgaagtcagtgttctgctcgctacctgactcctgcgacagaatcaactggcccctcaacaggggctgaatctggaacaaagcagacgtccctttatcctacaatttctcaaacttctcatatcgagcctctgttttcaggaggttaaaacaaattaatcatcagtgagaaggccaaaaagaccccacacagggaccccagaaaaacaaatgtcatccagctgtgaaccatgagggcccaatgacagctgacacggcagcctggactgcggtaaacagaatggcgagaccaaacctaaatgtttccccttggaaaaattagcagcagccacctacagaagaatattcccctccatgcatccaggggcctgctgacctctgcccagcctttctacctcatctgtaacattcaatcacatagccagccatcctatgcacgctgagaggtgacagcgcctctgggaatcagattagagaacacaatcgtttgtgaccctgcatccctgggcctggcagtttcctgactgatcagaccctgggcccctcaaggcaggggcgcgagccaccaccaccgccctcctccgtgcagtgctgaatacatgctactgaaggctaaggtatcgtcctgctgtgacggccttcccattttataattcagtagcgcacgagggccatggctgcctatagcaagaatgtgtgtggtttgatattcacagttccactgtcccagaaagtttccagtttgctagcttgtagccatttcccctatctaggtgcactggccgtgattttaccccactccatctggggcgcgcccggcgcagacaggactgcagagaaaagggacagggaggggacctagtcagtccctactataactgtttctcaagacattctccccatgcatttatttgctctcccggggaaagagcgaagtgtgggatgactcatagtggctagatcgttcctctaactcctcccttcttttgtgtgtggtttaaaaaaaagaaaaacacacacgcagcccatagccacaacatcaacaagaccagaagccccgcagagttcgcaggaggtgggcagtggctgcgccacctgctcggcttccccaaactccgagcccacgccgggaagcggcggctcggtggccccgggcgcccgggccggtggccccgcgctcgcgccgctccgctccgcagccgagcgtggagtagcaggcgctcgcggcgcggcgggggagccgccgcggaacccagggcaggcggccaagcggcccggctgtgtccagccatcgcctgcgccgcggccagctggcggccaggcgcggggccccgcggccagatggccgctccggggacgcgccgcaggcgccgggtgcgcccgggccgagggagcgccggcgcggctgtgcaggcaggggctgggggcggcgacctctgcccgggcggagaagctcaggggcccgagcgcggcgggcggggcgcgcagcctccacgccgcgccctttgtcccatgtgcggctcacacaggggcccgcgtcccccgtgaccccggcccgggccgcagctcaggtcccggaaccaactcctccagcagcgccgctctggcccgggccgccgtgcggggctcgggacacggcggcagcggggaacccgcgcccgctccgcgtccaactccgctcgccccgcggcgcgctcggccctgcaggggccgccccgcgcgttacctgcaaggagcctgagccccggccgcatctccctcccgggtgcggaaactctggcggctccaggcacccgcccggacctggcagggggaggggccgcccgccgcgcacccgaccccccccgcgccgcgcctcccgcagctccccacgcgcgcgggcgccccccagcaccagtctcggcccgccccctccgcccgaccattggctgctgctcccgtcactttcaggccacagccaagtccctcctcagctcattggcggacgcgccggtgacgtcaggccagggggcgctagtcggcggcgaaggaggcgcagggacagacggacccggcgggagaggaggaagccgggttgtgggcgcggagctgaggcggaggcggggccggggcgggaaggggcggccccagctgggtcgggcgaggctggctgcgggaaaccgagtgagccctcgcttttcctccggggtccgcgcgcgggaccctatttctggcctgtctcgcgcttcgcctgcgcggtggtctccacgctgggactgcggcgtcctcgcagaacagccagaactccacttcttcctgtccgggaggagttgtttaaaacatgcgtatctccaccttctgcttcttagaacagaactgactgaagccgtgttcttcccgccgagaccatgccgccccatcgaccctgctgcggccagagccacccagggcgggcccactcaccgcaggctcgggccacttggttccaaacctccactcccatccaggggcccggcacacccaccacactcccactctcagaggtctttgccgcctgcttcaggagaaaagagaaacttccactttccaccggcaaaactgcacacctgctccctccatcaccgagcccccccccccaccttctgtttttccagtatcgcagaatccgatccgttgctccctctggactggaatccgtatcctcggcatttcatcattccaagattctctactccacgtacccttgctgccaccctcttctactttccatcgctgaagttggtgaaagaggcgcctgcccccagttttgtggtctctcaactccacgtgttcgttttcacactcggtgaaattgcctttttaattgtcgcaagtagcatccacatcactaaagtcaaaggacactctcctttctcgtgttaactgatctgagcaaaattccttctttctccttaaaacacgtcttcctgtggcgggggtgctccactttcctgtctgtccccagtcttggcgtgcttgtctactctgggtgaccaccaaataacagagttttcaaggtctcagacctttcctcttactccacaatttttccctgaatgatttaacctgctgtcaac

SEQ ID NO: 6348 - DNA, 6000 bp, Homo sapiens
tttttgagacagagtctcactctgttgcccaggctggagtgcagtggtgtgatctgggttcactgcaacctccacctcctgaactttcgatcctcctgcctcagcctctcgagtagctgggattacaggcacccaccaccacgcccggctaatttttgtgtttacagtagagaaggggtttcaccatgttggccaggctggcctcaaactcctgacctcaagtgatcctcccacctcggcttcccaaagtgctgggattacaggtgtgagccactgtaccctgcgtgctggagtatttttaaagccaactccagacttcatatcattttacccataagtactcttctcttttgtcaaataaaaaacaaatcagggccatgcacagtggttcatgccggtaaccccagtgcttcgggaggccggggcaggaggactgcttgagcccaggaatttgacaccacctaggcaacatagcaagacccccatctctacaaaaactaaaaaattagccaggtgtggtggcacatgcctgtggtcctagctactcaggaggctgaggtagaaggatcacttgagcccggaagttccaggctgcagtgagccaagttcacaccactgcactccagcctgggtgacagaaaaagaccctgtcacaaaccagaaaaaaaaaaaaaaaaaagcaaatctccaatgcgtagaagcagaaagtagaagagtggttgccaggagcaataaataaataaattgagagcgttttaaaaaatctagacttggtactgtttctgaaaggatgattgcaagtgtgtcagaccggtgaggtctcaagagttgggcaaaacgcggttttcttgtgtgcagtggagcagcaggtgtggggagggggggtggggggcctgttgaccaggcagcaatgcgagaaagctgcatctgaacccctgcccaggctgaggctgggcacgcagtcaaggccctggtagagacttaaccagaactggtcactgggcccatggtcagggccctggaggagacttaaccagaactggtcactgggcccacggtcagggccctggaggagacttaaccagaactggtcaccagtgtatttggttccaattagaacaacagttcagttacatatttatgaggcaaaagacaggactttggaggatgtgtccagccttgtcacaggtaaataagggacatcatgaatctcatctttgtcacctggggacagggttctgagctgtttccagaacataaagggggggacttcctaacctcccaggatcatagggctcaggtaaagcttatctgtcaattttccttaaaaataatcattactgttatatattattatgtatgtatatacacacacacctcagatgagggcttgactctccctgaaatattaacacaccctttccacctataacattgccccctcgccgccgatttctgtctccagccctctgctgaaaatcaggccacgggttccacagcctggctgcacaatgcggtccatgggccagagcagggcctcctgctagcaggttggaaatgcagcgtcccagtccccagccagctctgcagcaccaggacccacaggtctctggcaagacctgtcctcccctcagggctagagtcgcactgcactggaatttcctgcagtgagatttgggtgaccctccccactcccagttgcccgtctcctgtaaccaggcagcatgtggtcaattgactggcttcagcctccaggacagcctggagctccgtggggtttggcacatgctgtggctccacgaagatgcccacgtcatggttcatcactgctcggtgggttctgctgccgttatctttgtcctctgtactcacatcccattttctcaggtcctcccggccttggggatgctagacgttccttctatcttgatgggcaccccagaactgaagtactcctgaagcccttctaacttccaaagggcagcagcttctacaaaaaaagcaacaagggccaggcacagtggctcgcgcctgtaatcccagcactttgggaggccaaggtgggcggatcacctgaggtcgggagttcgaaaacagcctggccaacatggagaaacccccgtctctactaaaaatacaaaattagttgggcgtagtggcgcatgcctgtaatcccagctacttgggatgctgaggcaggagaatcgcttgaacccaggaggcggaggttgcagtgagccgagattgagctattgcactccagcctgggcaacaagagtgaaactccgactcaaaaaaaaaaaaaaaaaaaagcaacaagacggctgaattcctgaagggaggaggggcatcatgggtggtgaccccacagaggccccctggtgtggcccctgaggcccctcagactgaagagggcctcctgcaagggagctgggtcccccgggggagggtgaattctgagtccctgaactgcagggcaagctgacccagagctccagcactgcaaagcctcccccggaaagggctgtctggagcggctgtggccagcacagtcactcctggggtgggtgtgcacctggcttttgcatcatggctgactgtgctggtggcttcacagaaagggagtttgtgtgaggatgctcgggtgcctgctgggtgcttggcactggggtcgggggggcggtgaatggaggcacctgagggacacagtcccaggtgggagctgtcccaggtgggagctgttccagataggagctgctgtctcccagtcaggtcccaggttggggcttggccaggcctgggctggagcgggagacctttctagctgcctcggtctggctgcccaccctgcacagagcctggggctctggcctctctgtatctctcctctccactcttcctggagggcaccgctcttatctgacctgctcccccacagtctccctacatctggcccaaaaatacacttggtggcagtcccgccatcacactcaggctcgggagctggcggcccctggtccgtgctgcctgccacgctgctttccacggcagtggtgggaaagggaggttagaaccccatctccatggccagaaggcaggaattagggaaaaggggagccgtgaggcttccaggcctggggttggaacagaagctgcgcggtgtggggcgatttgggcgcaggaccccgggtgctgggaagtggggagcaggactgtgtctgttgctccagaaagcgcgagggatgcgatataggaaattcgggcgtcagttagagcccgagaggggttcagggagtcactgacttaggcagagaggagcccagacggggttcgaagaccctggggacggacgcccacctgtcagtcctggactgtggggcacccgtaggccgaggggcaggaggctatggccctgtctcctggcttgggtctaaacatcccaaggaggtcagaccgtagagtgggggctgtgtgatctttcaaatgagggacgccgcgtgttaccaaaggccagtgctgaggagctgggctgaaagcttggggagttcccagaaccagcagactaggaacgggaggaaccgtgtcgggggctctgctccgctgggcactgacccccaccccgccccccggtcttgcaagggctggagaagggtgaaaggcagaggcgggagtccgcacttagggaccggtccgttccacacgctgctgaccaggctcctgggtggcgctcgcatggaacattccggaaacacccatgggaaggtcccaagttggttccgaaaggccctgacggacgcgcaggggacgctgagcctgtgatcctcgcctcacccagacgaggccgggctgcttctcacaggaaagtgcgtctggagtccggggacggcctcctcctggggcctgtccaggtcgccctgggcctaaattacaggcggggagaggcctgtcggaggagcccccgctccagacccctgggggacccagggcgaggtcgccccagcgcctcacgtctgggggctcccctttgccacgtcgccagagcaaaattcaaaatctgcagttctggcaaatttccggggcctcccggacacgaaaagcagctgaaatctcaggacaatgtcattggatgcggaccgagaagaagccgttcggaaccagagctgccccggattctcccaggcctggctcgccggtggggggaccccggtccctggtttgggggggcaggaacgggcgggcgcccctgggggcttctcatttgtgtgttggtctcggccttgaaatgcagcggagaaaataaaaaataaaataaaaataggagtcaggtgtcagagtcgggtcggccaggcactgaggtttgaaggaatcgcagaagaagctcctctcacccgggtccaggccgcgggggttctgcgggaggcgcccccgattctgcccgcgggacgccgcggcctcggaagccccgggagcaggccccgccccgcccccaccctcctctctccccaagtcctcccgcccccccagccccgcccctcccccgccctgggtgctcccctgcccctcccccggccctcccccgcccctcacccgctcctgcccctcctctctccccaggtcctcccgcccccagccccgcccctcccccgccctgggtgctcccctgcccctcccccgctcctgcccctcctctctccccaagtcctccccgcccccagccgcccctccccccgccctgcccccccccgcccccgcctccagccccgcccctctccgctccccgccccgcccccacgcgcccgcggtcccgccggaaggacttaagcgccccggagccgggaggcgaacttgggacccgctggcctcgctcggtgcgcgcctccctccccgcatgcagcccgccgagcgctcgcgggtccccaggtgtgtggcgcggggtgcgggcgtccccggcggctgcggtccccgcgcgggcccgcgaccccccagaggaaacttcggggacgccggcctccttctctcggttttgcaggatcgacccgtacggattcgagcggcctgaggacttcgacgacgccgcctacgagaagtttttctccagctacctggtcacgctcacccgcagggcgatcaaatggtcccggctgctgcagggcgggggcgtccccaggagccggacaggtgggtcccgggggcgcaggtgggtcccgagggcgcaggtgggttgggctgggacgggccgggcaaagtccgggctcccggagcggagggagggggaggaacctttccgggcaggtcgggacgaagctgcgggctccgagctagggcagccgcagggaccggttttcccgctttgagatgggccggcgggtcggacgcgaaggagacccgtccctcccagcagggagccatatcgggatggatcaaaactcgatccatgccgggcgcggtggctcacgcctgtaatcccagcgctttgggaggccgaggcgggcggatcacgaggtcaggagtttgagaccagcctgaccaacatggtgaaaccccgtctctactaaaaatacaaaattagccgggcgtggtggctcctgcctgtagtcccagctactctggaggctgaggcaggagaatcgcttgaacccagtaggcggaggttgcagtgagccgagattgcgccattgcactccagcctgggcgacagagcgagactccgtccttgtgacgggacccacagggccctgctcgacctgccgctcctccgcgaccccaggcctcctactgctgcggtgagcaccggcctgaccgcccgcccgcctcggggttagctgcagggccccctcctccggggcgccccaggcttccctgtgcggagggcacctcctcatttctgcctttcccagcacagcccctgctggagtcaaaaacccttcctccctgcaacggatttttcattcactgctcagtcctcagaacctggggcagtgccaggcgacttccctgtgt

SEQ ID NO: 6349 - DNA, 6000 bp, Homo sapiens
aaaactataggctgggcgcagtggctcacgcctgtaatcctagcactatgggaggctgaggcgggcggatcacgaggtcaggagattgagaccctcctggctaacacggtgaaaccccgtctctactaaaaatacaaaaaattagccgggtgtagtggtgggtgcctgtagtcccagctactcaggaggctgagacaggagaatggtgtgaacctgggaggcggagcctgcagtgagctgagattgcgccactgcactccagcctgggtgacagagcgagactccatctcaaaaaaaaaaaaaaacaaaaaacacaactatagctaaataatagtcatataaaataaattgcagtacttatcaaatttcagtttaacttttgaaagtcatagtatttaaggtaacaaactcagctattaacacattttatgatgctttaaaaagctcaaagaattgaacagctattggtgctaagttataattgtgttctataaaataaatgtgattcactattctttgtaattgctacctcctggtatgtataagataaagaaattgaattttacctattttctcacatactaatttggtgacgtatccttttaactgttggcaaatgttataggctctcttggcctgttttttattccattattttaacatcttttgcagttttctcacataagattgaaaactgaatctatgtgaaataagcaggtgtctatcagtaatgatatttaaaatatgtcacagctggattccctgttttgtaggagcatctgaaatcagccatagcggaacagatggaaatgccccatttgttggggtcaagaaggaaaagttcttacatagttttacacatttggctggtgattgattttgtgaaaagatatgttaaaatttgtttgttttttgagacggaggctcactgtgttgccctggctggagtgcagtggcgtgatatcggctcactgcaacctctgcctctcggactcaagcaatcctcctgtctcagcctactgagtagctgggattacaggctcctgccaccacacccagctaatttttgtatttttagtagagacggggtttcaccatgttggccaggctgatctcaaactcctgacgtcaaatgatgcacctgcttcagcttctgaaagtgctgggattacaggcttgagccacagcgcccggtctgaaaagatacgtttaaaaattttattttaaaaaggtgctacaagacaattctactaaatctctaatctttaaacttttttttaacctcttcactgagattaggaaaagaatcttgatatgactcctaggtgataactgtataaacagacaacacccccactcttcatcattctaataaagagagaggattatatgcttcatttgtttaaagtcctttattcaaactctcctactactaacatcagaggacatgttactctactttttcataaaaacaaacttgtgtagttattagaaagcatctattcacggcatcattaacaaattaggcattatacagaagtgaattttccaggcaactgaggtgctgccttaaacacaaaactttttatcttaacctatctgaagtgtattccctgtatttctaccttctgaagcagaacaatgatagcattcatttcttgaggatccccaggtgttaactctagtaaatcttttaaggagggctttgttccccttcatactgatgagggtctagcactgttgtatggtgcattgaagactagcattcagaccccatcctgtctccattcatcatggtgaaagtcaggtatcgcgctggaagttaatgcagtaatacatttagagaccatgagttaccccacgctaaattagactcaaactaatgcgttttcatgttttcatttttaaatggcttttctgtctctctgtcaggcatcatgtatgcctcccctgtcttgagttggggctaaaaaatcaagtgactgaacttaaggtaattatttttaaaacaactaaaatgaaagtattatattaataaagtgctgagttttttacatttatttttcctgccagagcaaaaaaaaaaaaaaaaccatttagttttctcattgatcactgttagaatttttctggtttctgtaagtgaatgtcaaaaggttcagacacttgagtaagctgtaattcggatcagcagcagtgttaacaccagtgtttaggcctctgagagtaaaaacaatgtgtcgtactgccaagtattgttcctgttactacccaattcttcagtatctcaggacacagtttatcctaaaaaggtgtcctgtttgctaactacagtggctgtgttatcgttaaaggaaatactgggaagtgttacggtcaccagcttcaagtcactgtcatctaccaatgagataggggctaccaagtaaaatgtagcccagggccacattcacagatggaagtgttcagttaagcaaaagtaaagttacatactaaaagcccacatgaagaaggatttggagatatttcttcctgctttgctttggctgtaaagttctgtacatgtatcaaacagagcatttcaacaggctggctaatgtgtaggaagctagcttttctttgtgatataatttgtcatgtaaaatcataagctattttacaagtgtatttcattcactgtatcttaaaattcatatggttttatttaaagataatttcatcaaacagctgaattctaaaatcctacctttttttcaaaatcatttttcagaactttgcaataacaggaagtaaagaatcagaagggtgttaaaaaattgacttggggggaaaaacatttggacattttgctggctaggtttacgaaatatacacatccagcaaacatgtgagtccctttagggtacagtgcagtgaagggagaagtggaaatactcaaggttctggggaaggtcaaatgaagggtccctcacattggctgaggccaacctggcttcagaggtgtgcagaggcaccaggccgagaacagggctttgcagtggtgagggcaaaacatgaacacaagaaataccctaagttactgacctggttgtgcctggtgacagatgggaccagctcttttctccatttggtaattttggaaaatttggcagagttaataaagaaatccccttggtgcaagattgctacaataagaatctattatagatggcagatgtgaagttcacagtcctttttattatcctaacctagtaacatgactagaggtaaaattaaatattgagttagatgattgtttaatattttaaaaccagagggaagacatacaaatagattgagagcagtttctttctaaagataatcagaatatatctcctatattttaaacactgcaggaacagtcaaaattttaaaataaatggtttccacatttttttatccccatctctccccctgactatatagtaaaatattttatttggcaaccacgttttcctacttttaatcacacatcatcagagcttttcatcagcctaactagtcttcctactcactgagttgtgacgaaagcctggtctaggcacttttaccacggccatgtttttgttaagatccctgcagactgtgaactatgaaaaccagcccctggccccgcttgtgggtgctgcagagccgcgtgtgaactgctcctaggaaaccgcgtctctgggcagggtggctctcgggccgtggatccgcctaaaagcttttctgccagtgacgcccttggtctctggatgtgttcacgcctcagtgattttactctctggtttcttgtgtgtgcttgagattcttgagagaaagcgtgctgcagatgaaaaatgcagcctacatgaaaaagagaaggggaaagccattttaaaataacttccatgtaagttactgtaatcaaagtgctgctgcctgtgtgttcataaaaaaatatgtgcaagggcccggagcggtggctcatgcctgtaatcccagcactttgggaggccgaggtgggcggatcacttgaggtcaggagttaccgagaccatcctggccaacaaggtgaaaccccgtctctactttaaaaaaacaaaaaaattagccaggggtggtggcgcgtgcctgtaggtcccagccactcaggaggctgaggcagaggctgcagtgagccgagatcgcgccactgcactccggtctgggcgacagagcgagactgtctccaaaaaaattaagaattcaaatgtgaacccggctttcatggcgccccggccacggagagcctgggggagtgggataaaaacggtgctgggatgggagggcggcttgtccgcgaactcctcccaccacgcccggaccaaagccgccggcgccccgcttccggggccgccctaaaccgcggccgccgctccctgaggggccgcctgacccggcggaaagccaggctgtgtggccggaggtcaccaccccgaccccgactagtcccgcagcgcctgaccccttcgtgggcggccccgaccgccgcggctcgaggaggggcggggctggggcggccgagctctcgcgaggtttcgtcgggggctggcggctgcggctcggcggagagtgcggcatgcgctcggaaaaggagggggccggaggccttcgggcggccgttgccgcgcggggcccgagcgggagggagaagctgtcggccctagaagtgcagttccaccgcgactcgcagcagcaggaggctgagacgccgccaacttcgtcctccggttgcgggggcggtgcgggcaaacctcgcgaggagaagaggacggccctgagcaaggtggggacgggggcggggcgcgcaaacctcgcgaggagaggacggccctgagtggagggaggggagggaggggagggaggggcgggggccgggcctcccagcgcggtacgcggtgccttttgagctccttgtccacgctccgccccggtgggaacggccgcgcgctccccgcaggtggtcatccgccgcctgcctccgggcctcaccaaggagcagctggaggagcagctgcgcccgctgccagcacacgactacttcgagttcttcgccgccgacctgaggtgaggcccgccccgaggggaggaagagagggcggaacccagagctcggcggcggtggccgtctcgttgccttacgttccttaccctgatttctcctatatgggagtcgtgtgagctttttgaataaatacatttcagtaaaacgtgtccgttccgtcaaagaaaaataccaccaacaaagaaacacagatgtggtttacatgaaaaatgcggatgattttcagacggctaacgcttaggaaagcgggtgcctttgaaaggaccagcgttgcccgcccggcgcctcccgggcttccctgctcgtccgcggacggggcgctgcggggccggggggcgccggctcttcctgtggcctccacgctggtgccgcagccagtgcggttttaaataccggagaaggtccccaagtcaggagagtctctcggcgccacgggttcctctgggagtgcgccctggccttgccttagggtttcagcctcggaggaccggttctgggcagtggagaagggacctgagttctgccttgtaaagttaacgttttgcgtttgtttttgctaaagaatatccaagttgttacaattaactgagatgatttggcacaaaagttttatctaaagtagtttgttgtgcccagaaaaggaaaaagaggctaaattaatggactattgtatttttcactgaccattttcactgttatctcttatttcagtctttatcctcatctctactcaagagcatacattaattttaggaatcctgatgacatccttctttttagagatcgttttgatggatatatcttccttgacagcaaaggttggattattggtttttaaaaatctattataatctgtaggtatactaatgaagtattgctagaatattcgtgct

SEQ ID NO: 6350 - DNA, 6000 bp, Homo sapiens
gcacagctgctccttggattagtttatttttacagtcgtcccagctcgcagcacactgtggccttgcagcaggttccgagtttagttttcgtgtaaatgtctcatccttggcaggtttggaaggagcgccgtctgcctcagtggttccgagtggggtccccggaccagcggcctcggaatcaccagggactcgttaaaatgcagattcccaggcccctccccagaccgtggatcagaggcgttggtggtgcggccccaaaatccgggtctcagcaaggcctcttgatccactgatgcccaccggggtttgggggcgaacggcacactctctccacgtgaactcactgaaccgggcgagggaggcgtctcgggaaggtgggggaagcggagtcctgtgttccatctgcggccctgccactcctccgtgtggggtccgtcctggccctgggtcatcgcgtgcccacggcaacacggctacgtggtcatgtggtcagccgctgtcacctcctccatcagggctgcttggcaacagcttttaacaaggaaatccatccatggcttcaaaacagagctctctcttttggaaaaatgcagacaaacacaaaaagagaagtatgttcacacatttccttccggtctcttttcagcctgctcagcttcttccttttttttttttttttttttgagacggagtctcgctctgtcgctcaggctggagtgcagtggtgcgatctcggctcactgcaagctctgcctcctgggttcacgccattcgcctgcctcagcctcccaagtagctgggactacaggcgcccgccaccacgcccggctgatttttttttatatctttagtagagacggggtttcaccgtgttatccaggatggtctcgatctcctgacctcgtgatctgccagcctcggcctcccaaatcacgctgagattacaggcgtgagccacggcgcccggcctcagcttcttaaaaacaatcgggttagagtgagcttttcacttggcaccacgtcaccagccgcatccggccaccgactcttctcccacaaatgtggacgtgccattgtgcggccgccctggagttggacatcgaggatgctctagatttttcaacattataaacggcaccatgaaggcgacttttcctgtaatactcgagtctttgttcctcatccctgatgatctccttagaatgaatgactaacaggtgtgacagctaagattctgggtgcgtctacccaaaattatcatctggggaggtcagagacggctccaccccctgccacagatggggagaccttccagctttgctcctgtggtcacggctgctcaggagcagaacttaccccggacccaggctcagaaaacaccatcaaatcacaaagaccctgtctctccagccaagacccatttggtcccgtctctttgaaagctgggctggtgggaaggaatccctggtgaacctgcagaaaaacatctcactgggaaagggcggcagcccccagcctcagtggctcctctaagccattttgaaaggggttccggagacccagccaagtgatcccagccctcctccctcctctctgcagccccctctttcctccctctctgcaacctcccctcctctctgcaacccgctcctcccctcctttcagtagccccatctttccctcctctctgcagccccctcctcccttcctctctgcagccccctcctcccctgctcctggtgggcactgcccactgcagtgctggttcctgcccaggagcttgtgaggaaactctttctgccttctccgcccaccccaagcctgagcggtttgctgaatcttcagtctctgctgtagggacccaggtccctgggatcatggcagaatttaaatatgctgttaattttatctttcatacttaaaggtagagacatacacagtccacacagagaatagacacttctttatatgtgcttttttacctactgtacaagcaaagtatgtttgttaaaattttcttttaatatgttgcatatgcaaagtggttttccaaacgctttcactaaactgttcaatgtcaactcctcaatgcccttaggaggagcgtgtgtcagaagttcctgccatttaacaggaaacagtgacccagaaaagctttggcatccctgccaaccccgaattaacagcagagacagcccagaagccacagctcctggctcctaatctctttttctccctaccagacttttggggcccctgaaaaggtgggattgccccatgataaatgttctatagagtcatcttggagaaaaatgatgatgaagtaggtgatgattcctttttctctgcagccggaagagcagcaagacctgcagtgacgtcatgtctgtggacgcccaaaccctgaagaagaagatgggcaagctggcctgtgacccggccgcccactccatcctcagcagcctgctgctctacgtcacgggccgcgcagaccggcccccggggacagaggccggggggagcaggcccagccaccagccccagacccaggaggccacccagcggcccacgcgcttccagctcctgcaggccaagttcctgggcactggccgggagcgctacctcaagaggaccagggaggtgggccggctgatctccaaggacaagcaggggccgggtgggggcctcgtgggtgccaccatcaacaagctcctggagaagaccaaggagccggccccaaagccctgcctcagcgagaagccccgctggggccacccggccgggaagagcaccgtgaaaaacatcctgaagatattcttggccgccgaggagaaggaggcgaaggagaaagaagcacgcgagaagccccctgtggagcggcccaaagccgccaggggcctcttgccgaagatcatgggcaagagctcggtgctgtccaagctgcgggagaagttcgagcagaacagctgcctgtgctccgaggccagtgcgctgaggctgcacacgcaggagcggaagaagaggaacctgcagaggaagaggatgcaccggccggaggtgcgcgtgctgcacacggccaccatggccagcacctgcgtcaagatgccccctgcccgctttctggcctgcacggctgagcccctgccggccctcagcatcgccaccgtcgtctgtggccccaggagctggctgtcccactgcaccaaaatcagccactcggaggcaaggcgtccacccagaggagaagccagcgtgccccctagtgccagggagacggggcccagtgggaacaaagcagtgggaaaggggcccctggaggaggagccccaaagacagccaaggccctcgaagcccgtgacaccccaggtgatggctcagagggacggccacgctgtcccctcgctggccttctcttgtgctccctgcacaggtggagtccttcctggccttgtgcctgcatcatccccactgggaccggccagcccttggggcaccggatcagccggaggtgatgggactgcagaccccaccgcagagagcaccgcaggaggcgtccaggaggtgaggggagccaggctcacgtggcctcctgggcccccaggcgagtgtgcaggggagggccctgaaatcaccatgactgtttgcagttcagaggatgaaagggaaggagcaggcttcccagacccagggagagaccccctctttgccacccagaagtatttcccagaacagaaggtgccggagcacatcccacccctgaacgctccatcggtccaggctgctcggagaacacagcctgccacggagcctccacggataactgtccaaattccagttgtccatgaaatgccagcccctcccaccaggctgcaaaatatgtcaagtggtgaaaacaaaccttgtatttgtggaggagagaatgtggttgaaaatgcccacacagaatttcccaccgtgactgagaacagaaggggtcaccgagccccagtggaactgagcaagctttcagggatgcaggcgggactcagcgcctcttcgccgcaggggccacgggcagctccgcgtctggcagcagcaagaggggctgtgggcgccgaccacagtgtcccagagacacttctgacacagagactccagacagatcctgctggcgggaaggaaaacaaaggcagctttgagaattcacacggtcccaggaatcctgacgatatttcaggagagaggacctctgagctcagagatgtgaagcatccgttgccggaatctaatgaaatatcaatgcagaagaagggctccgcaacaaatgatcctgcagcctcacaaaaccttctgaggggaaacaccagccatgcctccagcagccagcaagtgccgtccccgactgggagaaacccaacaggagcccccacgtcactggcggcatcatccaaggggcgtacggggcctgagggtgtcaccccgatgggcatgacagtgcccggtgcgctggaggaatgcagaaggccgctgctaatagagtcttctcagcccctgaaggctgccgaggaaatcaccagccatgatgttcgcgagaacccactgtcctcattaaatgaaccacccaaaccaggtatgaaagcctgtggggcgatggcagctgcagggagcgttgcgagccgcgccacgcctgcaccagcgccaggcagcacccagagccctggagaccgcacagcgggagagccagagacgctgggccagtggggaagcagagccttgtccgaaagccaccccagaggagaggctctccctcgagaccctcacagccacggcctcctggcccctgggggatccttggagcccaagagtggagcagcagggaggagcctcctgagaggcgtggccctcgtccagcacccagaggacattgcgaccctcgcccgccacccggaggatgctgcggccctcgcccggcacccagaggcggcccgattatacatttcaaacacatcagcagccagcagacatacagcagctgtaggaggcagaaaggatgtggctgtggaaggaaaccttttgggtttcagcacagagtctggaattcctgcttctgatcatcctaggccacaggcaaggagcgtggcagagtcccccagctatggccctggcctcccgccgtcgcctcctgagaacccacaggcaaagggcagggagggcgtcaggtttccccgtggggcggagcctgaccatctgcttcccgcagtgcctcccgcggaggtggacatggggtgggtaggtggcacccaccagcggggccctccccatctacaggcacacctgccccctactgctggtgacacacaggcaaagctccgggccagtgtccccgagcctaggacgcaggcaggtgaatcccaggagcgtcccctgacacaggcggacctggggaggcaacagagtcaccaggcacaggaggagaccccccagcccggggatgcggggaagagggtggcgccgtcgggctcgaaggttgtgctgaacccagcaaaagagcctcagacatggtgggcacaggatctggccggggacaaagggatggccattggggttgggggcgcctgccagcgcagtgaccaaggtcagcagcatctgcagggaccctgggaggagcgggggcggagcacggcgtggggagagggcaccagggctgccaggaacccagctgtgcctccaggggagcccgaggggccgggaagcccggcagcccaaggacaggcccagaaacaggttcaggaatgggaccggggacaggttcagggacacgctcaagaacaggcccagtggcagacccagatagaggcccaggggcaggcacaggaacaggctcagggtgggacccagggacacagtcagggacaggcccagaaacagtttcagaattgggcccagggacaggctcagggacacgctcaagaacaggcccagtggcagacccagatagaggcccaggggcaggcacagga

SEQ ID NO: 6351 - DNA, 6000 bp, Homo sapiens
gaatgttaagaagcaagaatggtaaggtagaaacaagcagaagctctgacaggcaaaagaacaaaactaacaaggaatatctgggctgaatcattgaaagaagattataggaccataacaagactgagttcttgacccacagaactctgaagaaaaatcaaatgccctacatagaggcatggaagggaagagggagggaagcatcctgcccacgccgggatgctcagccttacagagatcaagggctgttttaccacagcgtgtaaagctttctgaatcctacctgagctccacaccatgctcagtgtcagggtgcccggtttacctctcctgtgacccacgacgccagcaggccgggacccacaggtagctgagcagcagcactggcagcccataggtttgctctctccccagccaaccctacccagggactcagctatgttaacagccaggcatgacaaacggactgagagcttccccattcttggctctccacccagattacctcattcaaccctcacaatagctatgaaatgagtactgctcttaccctcagaggagaaaactgaggcagaaggaattaagccacttgcccaaggccacatggctaagaagggcagggaggctcccactcagcattcaggccactgcccagagagtatctaagaaaagtatctaagctacccgctgaggctgccctggttcctctcggaacttaaactacctgaatcggtgttgctcaccttacagctctgaagaggaaatggaactcgctctccatccatgctgttaaaaatactcttatttattttgagacgagtttcgctcttgttgcccaggctggagtgcaatggtgcgatctcagctcactgcaacctccgccttctgtgctcaagcaattctcctgcctcagccttctgagtagctgggattacaggcacccgccaccatgcccggctaatttttgtatttttagtagagacagggtttcaccatgttggccaggttggtcttgaactcctgatgtcaggcgatccacccacctcggcctcccaaagtgctgggattacaggcatgagccaccgcgcctggcctagaagtgcttttaaagtgttacgtcatggaggtcaaactacctcatggcacatgcactaccccatggctcatatgctaccccatagcacatacactactccacaacacatacgccagtccacggcacacacgctaccccatggctcccacagcacatacaccaccccacggcacacacactctccaccccgtcccctctccccgtacccacagctcatacatcaccccagagagcatacaccacctcacgcccccgacagcacatacatcaccctagggagcatacactaccccacagcacatacactaccccacggcacacacgcttttccccacgccccccagagcacatacatcaccccagggagcatacactaccccataagcacaagcactcctcatggtatacaaacacggcaccatttacaaatacaaagtatctctgcatggctccggtccatccaaacacccaaaccaccagtaacacacagtgtggagtacctggctaccctggcctaaccttcatctgttctctcactcatttgcctctgctatctctccagggttaatccacaataaaatgcctacagcaatgttttccaaggacttctttatcttttagccaccctcacacatcagaaggagctggaaagctttctttgtcccaggaattctgactatgtgaacaccaagaaggaacagggtctatttatctatcctttttaataaagtaagtcacataaggaaaccatgaggaaatatgagtattcaatcccagactcttttttctgtagcaaaaggaaatataatttagtcctacatagtggacgataacgcaattacaagaaaacagatcatgactgtttctggaaaaagtcaaattagtttaataccatagacatgaacttaaaatgatagagatgaatggctctgtgtgtaaatatgggtgaggtagccagatgaatacactgcaaaaaacacaggtggaatgagaaaaacagaaataatattatcccacaactcgtattcccgagacgttatccaataatgtatatgctggaaaagttcactaaagaatatttaccgcttagattaaaagaaaatgtgatgccataagcgtaataatacagcaaaggggaattaaaaatgcaagctacgcaaacacttatatagatctatataacagaaaacagctgaaggcctggagaaagggagtcaagcatcaaaattggacgtctgtctgtccccctcccaagatgaaggggtcagaaaccggctgggaaggggggattctccaaagggtgagccgggctggcccatccatctctcatttctatggaaagaggctgcacattagccccacaacgtgaccctcctttttaacactgagtgttagaagggaacggaatgaactgggaacaccgcgggcaaagtgagtgttagtcccttccctcttccatttcgctcgaaggaaacaaagcaggaaaataaggtgtctagggacccacacttctgagcgacacaactgagaacagaagcttccgcccaataaagcatttctcttacactgcaggttacctatagtcactgtgattgggtcttctataacgttaccacagtgaaacacaggtttaccactcacattaggatttgaactgggggctcgagcaccagtgagggagtaacacaaggctcctggagccaagcctttcaagatctagcatcggaatcatcagaatcaccaggggtgagttctctccacttaagtaagtcaggctgaccttcctaaggcttccccgagatcaggaaacgatgtaaggtgcactcaagtctccttgactctccgaggtttttggttaataaataaatccgggggaaagcattgatctggcatcccccactgaaaagaaacctatctatctttggccaaggtctcctatttaaagaaggctcataaatatgaaaggctgcctgaggtaattcctatgccgggaaagaacaaagttcccataatactgccctctctagtatcaaacccggtgcatgcgacttctcgaacctgtgattgaccagtgaccgccagcctctatggaacaatgaagcctcttgtgcaagacagtggcaggaaacgctgtgcttgggacagttttcttcctctcctacacacacacacacacacacacacccttttttttttttttttttgatacagagtctcgctctgtcacccaggttggagtgcagtggctcgatctcggctcattgcaaccaccgcctcccgggttcaagcgattctcctgcctcagcctcctgagtagctgggatcccaggcgcctaccaccacgcccggctaattttcgtattttttagcagagacggggtttcaccatgtcggtccggctggtctcaaactcctgacctcgtgatccgcccgcctcggcctccaaaagtgctgggattacaggcgtgagccaccgcgcccggccacacacccctttttacacctaacgccagggattccggtttcccctcctctggtgtaaaacaaaatcaacttttccccttccgagtcttccctcctgagctcttcacttgcttatcactgaaggggcaaattccagaggaacccaagaagaccccggacttctgatctaattggttactttaaggtaaaaaataaaaagattccaaactccgcttctgaatcccccaggggtgttaaagaacaaacacaattgctacctttttctgcagaagtgtaacgcttcctcccaatcccttaatcttacagacacggctgcgcggaagccgcatctgaaggttcctccccagacccgggccccggcggggtcgaagttggctccctccgggcgcccggtccgccgggacagctcgaaccccagccagcctctccgagggacccccagggcgctgcgggcgggaagggggcgccaggcggccgcggccagggagcaggtggccgcccggggctggggccccgcgctgtgcccacctagaccccgtcggaagccccagggtgtcaactccgaggcccctccccagcatcccgctcgtccccgggggcggtccgagtcccagacatcggagacctcccgggaccccggggctggaccggccacagggtccgggctgcggggccggcccgcgtctgtctggtccccgggtcccccagcccgcgccgggagcactcacgtatctgtgcacgagcgtccgcacgaggctgcagtccatggctcctccggccgctcccgctccgccgttcagcgcccccgcgcccggctcggcgcgcccatgggctccggggtactagtgcggccgcgccccccgctccggtcacggcctcggcgcgccgggcggtgcagggggcggccgcggcccctccgcgctcatgcccggcccggccggcgaatgctgggtccgcggccccgcgcgtcggcagctgctccactggcggcaaggctgctgctcggggccgcgcgcgcgcgctctggcgccttctctctccccgtcggtccgcccgctcggttgggctcggctggagcaccccggccgcggcggagcctgcgctctgctcctcccgagtctcctcctcccctgcccgccgccctctggagcctccgggccccgctggctcctgcccctgctccgggcgcgcacgtcaccggcgcaagtgagcatgcgccccgcggccgcagcccccgccggccccgcgcccacacccgcgctcgcacccgcgcgccggccctgccccctcgcgcctccgcccgggccccagaccctgggggcagagggcagagggcagaggtcagaggccgcggggaggaacccccctgttgcttccgcctcccggggcgcaggcgctgggcgcggcggggaagggactcggcactggggaaacccggagtttcagccagggtcccagggcttccttcccgggttcctgccggaaaacttttctcctccgcccggaagcctcgatggggcagtgagatcgcggggcgaggtgggagtgtgggagggggccgcgggcagagagcgggagtccggctgggtgggagatctcctgagccgaagctgggtctcgccccagcgtggcgccaccgacccgcaggcttttcctgctctgcagatggagagacacagggacgctcctcaggtggctgccctgggctgccagcctgtcagtgggaggggagggtgcagacaagaggcccctgtttccgaaacccctctgtccccaaagctgcgacagcagaagacacttaggcggcctgaggggttggtgaaccacagaggagctcagcttcgcctggtctccagctcccggtggcggtggcgtgtccttaatgctgctggctttgaactggactgagaactatttaccacacaaacaccaccatttcaatcccggagaatgcctgttttccctagggtgacctggccggggtaacaaacacttgttctctaattccacggtcagccttgacttaattgaggtacttgatttccaacttcctgtcttgctgccacagataatcactgatgaaaccaaacaggcaacaccttttggtggcctgtggagagcgctgccccgtctgggtcttaggaaggcaattgaatatgaatgttctcccgagtgcttgtggaaaagagatggtgttggccactttttagacgaagagaaatgagtactagtgaacactaatcatagtgactaaacagtaaacggctcccatttgttgtcggctaaagcactgattcttcattttccatcccagcctgtcctgctctggcctgccctgtgctcaggaagctggcggtccccctcagtggatcttcacccacagggacaacctgctgcagaccgggtaggagggaggcagg

SEQ ID NO: 6352 - DNA, 6000 bp, Homo sapiens
cgctgcgccacctcctcgtgctccacagcctgcaccgcccagggaaggacgggaaacagcacccagaagaagcttcttcccaacaccttcatgatccaggtccggagggcagggcacagcaatccacgggtctctgccccactgagcttgcatgtcagacacacattttcagctgaaaaagagttattgtcacacatagttaaacaatgattcattactattgatcagagtattaaataatcagatctgaaaaactgacacctttctgaagaaattctcatttttcctagataaatatcaacatctaaactatttatttcactgagattaaaatcaaatactgaatgttgatgtaccttgtatggtgctttgtgaagggctgagatgattaaaggtcagctacatctttatagaaaggattaaaggtcatttttttggggggcgacgcagcctcgtatctctaccaactccaccatgtgcaaaagacattaaccaagtctatttaagagagtccatgttggttgggcatggtggcttatgcctgtaatcccaagcactttgggagaccaaggcaggcagatcacctgaggtcaggagttcaagaccagcctggttaacatggtgaaaccctgtttctactaaaaatatgggcctggtggcgcacgcctgtaatcccagctactaatcgctagaacccgggaggcggacgttgcagggagcccagatcacgccattgtactccagcttgggcaacaacagcaaaactctgtctcaaaaaaaaaacaaaaacagaaagtccatgttatcgaagcccagaaaataccatcaacttcccctcacaggtcactgggttgcttggggacaccatgctcaacgtcactccagaaacgaaatcttctgagctactgttagctctgcaggcttcttaaaatcatttgaaatgttgccacatttccaaagtcagtctacagtcaagtgctaccaagatgtcaagaattaaaaatatatatatatatatgccacaatacctagatctctagaactttttgttatcatcccaattcagtctccttctcttcctttctttaggaatacctaaaacaatgtatattaatttatcctggcaaggcacagcacagacaggaacctgctttctgaacattactgctgggggaatgaggacggtttcagtgcggctgtagccgtggtgtccaggtggtgatgagcaggggtagggcaaggcacccagacaggagcactgttcagaaagcaggatgagacagcggccagcaaaggtcactaaggcagaacgagctgagaggtgggaaaccgagaccgtggaaggaaggagtaataaacgtagagtccgtggaatttggccactaggagatcaccagtcacaagtagctatcccaaaaaaggcaacaaaaccaacacctaccacttacgcagatttacagtttaaagtaaacaacaacaaaatattaacctaaccattcttcatagcagcatccaatggactgttactcaggaattcctactcaaccatcacatattacaaagattccccgacctggaaacctggttactaaaagatgtatctatatatctatactttcatttcactgctaacccaaattctaattggtttaatcgagtttcccaggcaaagtaggttagatgcagcaaaagtaagggcagcatttctggaggcagcattctgcccaaaccatgaaatggcagccacagaaagagacaaaccttatgcaaaacaaacaggagaactaaaaaagcctggaggccagatgactcggtgaaggctcagcgactgtctgcaccccagcaggtcctgaagacagtactgtgttagacaacagtactgatcagaattacaagcaaaagtcaccaagaaaagactatattctggttagaaagtgttcaattcaaaacattcttggagactgactcccaaaaggagaagcacactccacagagaattcacttacctagaacaggtaacttcctaacaagataggataaatgataatgtgctgttccaatcactcaattttatgttagtttcaatacaactttaagtacacgtgtacaactttaagtacacatttaccaccttaaaaacaaacaatgaggcaatcacttagtcatgcctagccatatagctgagctgttattttaatgactcactcaactgctaagcttctctcggttggtccaacggagctaaataaatcaacagctacttcacaagtgaacttttagtattttccagaaccaagacagaaatctgagatgctttgcttacacttcccagtttccccaaaagatcccaaaaagtgattctttgatggattttatgcttcagaaaaataagtttcaacacagctcatgtgtgaatgacacctctatgttcatttctggttccttcctcaatcaggttcctaaaattagttgtccctctaagggagctataatttttatgagaaacctttgaggattttagttgtagttatactaaaatttcccactgaaacatactcataacatgaaactgaaattatttatggacccttaaaatacaaatcacctttattcaaactcatttcattttatcttcaaacttgcctccaaaatcctactgactactaaattgtagcatgttttttgagcaaattagtaaacatctttagctgttctagttattaaaaagacactttggattcctgtaatgtgttttttttgttgttgttgctgtttgagacggagttttgctcttgtcacccaggctggagtgcagtgttgtgatctcagctcactgcaacctttgcctcccgggttcaagcaattctcctgcctcagcctcccaagtagctggaattacaggcgctcgccaccacacccagctaatttttgtatttttagtagagacggtgttttgccatgttggccaggctggtctcaaactcctgacctcaggtgatccacccacctcagcctcccaaagtgctgggattactttttaaataatgaattcttagaatttctgcatcttgagcaattgatacacataacaatgcggatgtatctcaaggctgagtgaaaaaaaatctcaattttattgagaagacacacaggtgtagattcacactcactagtgcatgtatagttggtgcaatctcaacaggtcaggggatttgatcaaagaaaattccccacatatactatggttttgcaaggtgctaccattggagaaaacagggcaaaggcactctgtaggatttctctgtattactccttacaacttcatgtgatctacaaccatctcaaaataaaaaggttttcaaattctacctaagaccaggtgcggtggttaatgccactgctgtattacgacacaattatctgtattcccagcgctctgggaggctgaggtgggcgaactgcttgaggtcaggagttggagatcatcctgggcaacacagcaagaccctgtctctattaaaaatgaaataattagccgggcgtgatgctccctgtggccccagctcctggggaggctgaggcgggagaatcgcttgagccttgaccagccactgcactccagcctgggcgacagcaaaactctgtctcaacaaccacaaaaaagctttagaatatttaagtcaagcctgtaggagaaaaaaactacaaatatttcacaagtaatccaatcattaagacactccttttgaaaaagccggtaaataagataaatttggaagacagaataatcagaaaaacaggcagtgaatagggacccgatacgcagcggtcttgcttcccccgcgcaggcgtccacaccctgggtcatggacaccgtgaggagccgttaggagtcacaggaggggggccagggacagggctgcatctctgcggccggccctggaggccccgagtccacccgggcggccagggtgggaacgcaggttccattccaggttagaacgtgggcctcagcgaagagcgcctaggcaaggcctggaggagcgggaccccaggccacacagaccacccgaccccgggagacaatacctgcaagaaaaggggagccccgaggagagagagaggggaggtgagccccagggagggagagagaggaggggagccccagggagggagggaaggaaggaaggggacccctgggaagggaagaagggaatgggagccccggggagggagagaggggagccccagggagggagggaaggaaggaaggggacccttgggaagggaagaagggaaggtgagccccggggagggagagaggggaggggagccccagggagggagggaaggaaggggaccccgggaaagagccccggatggacgggcctggtgctcaccgggacgcagggatccgcgcccgcccgtccggcccgagcatcaccgttccgcggcctgggccgggctctgaggcgccaggacccgaggggcggagggggacgctgtctcccgcctcggagcgcagcgccggagggcttccttgcatcccttcccaggcgggaccagggaggccgggaggccgggagtccgggagggagcggccgccgccctgcccagcaccgcccccgctcagccaagccgacccggactcccgcccagccgcagtcactgccccctttaagaggcggggcgtgggcgggtcccgtcggccgcgggcggcgagcacttcctggccggcgtggggcctggcagccgcaggctggcgttggaccccgcaggggcgagccaaggccctcgcagagggctggacgcgcaggggctgtggggcgcgagctcccgtgggcccccgggcggcgctgagcatgccgggagtgggagtccccgcggccggctcccggcactgccccggagccgagggccgcggccgtccgaggacgagggcggagccgccgccgcgcctgcgcagaaggccggggccggccagaagcgggcggcgcgggggagatggtaggtggcccggcgtcgcctctgcccgtcggggtcggggtcggggtcgggccccaaggtcggcgcaggcggcgcgctggatgtgggaggccgagcccagcgagctgcgcggggcgttccgcgtggatccgagggaggaacgcgccgcgggcccgcgagccggagcggtggcgtcggaggcgcgggaccgcggggagcgcgggtttgacccggagccgcgagggacgaccgggagtgagcggagggcgggggccgggaggaactgtaggggccttggggcaggggccggggccgagcgggaacccaggccgggggcttcccagggcggcttcgaaacgggcagtcgaggcgggcgagggctcggctgctcctgcgggcgtctgtgcagatgctgaggctgttgaccaaaacagcgcaaggaaggaatccgcgagaagctcagattcgcgggggaggccctgctgccgggaggggagggagaggcacagcggggccctagcgcgggctctagccgggagctgtagcgtggctgtaggtgtgcatctgtggagctggtagagttccgcagcgcaggagggaggctgctggaggtgcacatcagttactttgaaatgtggtggaaatggtgatggatgggatttattcagtccacatcggttcagaggccagcaaggtgctgctgggtgtgactggtgctgggccaggcatgatcttggcgttgagggagttgatgccccagcaggggagacaggcaccagatgcacaattgtttgaccacagttgggacaaaggctaaggcacgggttccaggaacttgtaggatgcggctgtgggagtggtgtcagatgctgagggtgtgagttgaactgtggagaatttctctggaaattagccagagaaaaagtgaggttccggggcagccagccgtgtgcggctccaggcagaagaaacagaatgcacagacccttagtggtaggcgatgatgacgtatag

SEQ ID NO: 6353 - DNA, 6000 bp, Homo sapiens
aataattcaaagatgttttatctgtaggtatgttaactaagttaacaaatgcaatatagatttaatagtcttgtaattagttatgaaaaatcatatatgtgcatatatgtgggagaatggtggatatctacataaatatacaaatatatatattaacccagacatttaagaaagtaattcagaacattaaagtttttagatgttctataaaatatatacgttctatcttccacctaatcttttctcatttccttcaactactaacgttacatacaagtatttagtactgtgaacaccacagatcctagtatagagcaggaaaggggaaatacttatgtaaagacattgaagttacaaaataaaagtattccacagcaaacaggcagatacaaagtacttttacaaagaagaaaacacatgaacaatattcagtattaaatatttgagacatccaaaattcctaatcatttatccttgttgtgaatagaaaacatgaaatgtttaaatcagatagttttatgatgaaaaaaatcttctggaagaatgttttcttccaattcaatactctttactcaaattatcattttcatttgaaaacagtggcttattttaatgctagtgtcatttttaatgtgccaattcaagacataagcattaatattatgctttgcaatctttgctgattcatcagaataagtgagaagcatcatccctctctgttattgaattaataaatcctgacatgcaaaaacatcccaatctccaggttcttctcttggtcaaagtggtaacagcacaggaccacctttcccgcaaacttttggtaagccttatagacaagaactaaagtgttctctgggggcagatatcaactgggaaaaggaaaatacaggtttaaattacaaatgtcctcagcctctccatgacaagcagtttttcgaaggaagcaatctttaagaagtatttttaataggtaataggaggtgaatatgtccaaatgccttgaccacttatgaaatgtgatgcagaaaaagaggaaactaatagttctgccatacactaacaacatgacaaccaaataaaggtaaccaaataatggcaagttttaaatatctctttgaactcaaagaggtaaggatgaaaaccttaagcagtaagactgtgttgcactacatatcacaaaggaatataaaagagaaggaaatccactactattttacagaaacaaaccaaaaagttcattgcaaatctacctaaattattaaaagttgcaaaataaaagcagcagagatgggaaaaacataaaagtattaatgtggtaagaaagtacatatttacctaactaaacgttggaagttcaatttggtaagctcactctgaatttcagtgtacattttaaatgttatagaactaaattcagttatttccaaagacacttaagcactgaagttatccctaagaagcttaaaatttcctaaaacagaaacaagtcaatttccttcaataggaagcaaataaaagttgtagtcacagaaagaatttccctgaaatgtacgaaactcacaaaactagggactgtgggacttgggaaaatacaacatatacccaatatataattaggaatagtgcttttcactacaacataagaactgagctccttggaaataatattcctttgttacatgtaacattatacattgttcagtatcttttatttccagggcaataatatcataaaatgttacaatagaccaccttgcattattccttagtgaattattgttgatttaaagctcctctcatcctcaaatacatgaaagtaagtgcaataaaaggacttgtgggggttaagaaacgaagggttctttcatattttccagcagtctttttttccaagggtttggagtttaaatcaaaactctgggcctgaaatttaattcagagttcttcctgcaatagttgttaactgtgtatgcttcaaaagaaaacttaaatgttctcagccagtgactgtactccagtgaaaaacttcttacctttcagaatagttatacaacatggtcacattaaaccctgatgcaacaaacagattaatttcctctaacatctttactaatatagaaacgaagaacacgaactagtgtctctaagccactataatagttgcacatacaacatgagtgtggtgtggtaggatgcttttccttttaggtctttactgaactttcaagggattaaaaccaatgtatgtcaactttatagcaaaagtttcagattctaatcctgaataccaatgcattttagagggggaaaaaatgagggatgtaaaatatatatagtagggtaagagttttgcctttgaacaatgtgcatattctattttaatttggaatgttttatacttgcatttcatgttatgtagtttttggactggactgtgtttttccacaaaatgaaaaatcaactattttgccaccttattattcaacctacctgcccatagttgtctatgccagttactaatctatttaaatttaataaatcaaaagctgtccttagggattggccaagagtcgtaagtccttcagcctgaaggtttttcaattcattcataaacgttgcatggttttctttccatccagcctgaaaagaaaaatgtaagatttttttttttcattttttaaagccatgtacacagagccgttataatctgacgttcaccaagtagcagcttcacttttggttggtttggcttggttaacgtgttaatactgtaccgctgctgaggaaactctcttccaaaggtggcccaggaataacccagcttcctctctaggttttggtagttaactgccttaatactttataacttcactgacaaatttactacctaatctaatacccaaaatttgggtatgtgaaggtactagtggaagcagatgggagccggacttaggaagttaacctgcagctgtcccaccggccctcttaggacgaatctgacaagaccaatcctggcagccccgcatctggcttccgggccggccgggccgattcccctttaatgcaaaccggggctgtgcgcggccgggcccggctgtcactccggctaacttgaataaatatcccccacagttcattgctgccgctcacgccgcggaggggaaatgtcggccatgttgatagcagcgccgccgccgccgccgccgccgccgctgccgggccgggccgggaggggacggcggtggccccgcgactccgcgccgcgctaggacgctgccgagcgggggagggggtgggagcccgcagggaagagacctcagcggctgggagcgcagcgggtgggggaggggagcataatgaagggtgaatgggggggcggggagggcgagcgaggaaggaacagggaagggaagggaggaaagggggagggcgagggctgttaccttgatagcatagggcggctcttcgaaagtgaccagcatatacctgtctcctctgctggcagggtcccgggcacggagctgcgggacgggaggaggaacagggcgggcgacagggaagcacagaggcgaggttacgaggcggagaaggggcgcccagcggccccgccgcccccacagtaccgcacacgcagcggccacccctccacgccgtcccccacacacagatcgctccccacacaccgcccggggccggagcccgggccccggccgaacccggctcgcagcgcccgcccgcccgcgcggtgggggagggggtccccgagcccggcagctcccgcagtcaggtccccgacacccccgccccggccgccctcccccaccctgccgcccgcgggccgccgggccggggtcgccgcccgggctcggtcagtcggtaccttcatgaaggtctctaccgcgcctttggccgtgtccaggtaggtggtgcccagatggctgcgctggttcatagaggcagacgtgtctatcaggaacagtaagatgggcatagtgctggccggggacaccggggcccgaggtggtggagaaagaggagatggtagaggtggaggcgccggtggcggcgaccgccgctacgcggggcgggggagcacggcccccgggaggaaaacactgtctgggtctttcctccggctgcggggagtttctcccccgatagttgagaggaaactccccagacccagtgctccccgtcgtacccccgcctccgcctcctcctgcctgcctgcccgctggggcgggcgcccagccgtctgtctgtcggttcgtcccccccgcctcgggggtcccgtccccgctcccggcccctgtgtgtgtcccagcgggagacgggcctggctccccaccccacccccggtacaggagtggggacctgggagctggcgaagaggggagtgggctgagggaagattggccctggggctgttgggagaagtttcagggactccctccgcaccccggcggtgtcaccactttctcagcccctctcgctactgaagcgcttttctctctcacactccggttttaactcgggcaggggctgcggaggctccgcccctgacacgtccccgagccacgtgatacaccgcctcgccgttctactggtcaggccctatcctttcattagcatatttaaacagctcaggggcgggggaagcttgtaggccggctccggggacagttattgagcacgcgcagaggcggggcgtcgggtgcgcgcgagcgggcgggcgggccgacccggaggcgggcttcgggaaggggcggggccggactgcggaaggaccgcgaggtgggggcgggggccgcgtccgcgcgcgcggggcggccgcggcggtgagcctgcgcgtcagggccgccggcctctccttggctgttggaggtgataggggtcgaggggagggaaaaaggggctggcgtcagccgcccctgtgaggtggccgtagcgtggacgagtaagaagggttgagtaaagtggacaaacacctggttaggagaagagggcaggcccgcagccgccctccggaggaggactcggggcctcgcgggcgccggaggaggttcctgggcctcggagggccgccccggcgcgccgccccggcgcgagcgggcgcgggcgggggaggggaagtgagaggttgtttatgaccggggactaatctcctccgcgagtcccagcgctccctctggggagtgcggttgaggggctgtcctcgcacggagcctcgctcggcctcgggggagccacgagaggtgggagttggacccgcagcgggccaggagccctgtcattggaggacccgccaaaaaggaagcaaaccctctttttctttatccaaccccaaatagctagggcctagggggaagactcacatatcgataaatggtttgttgcccgttttattctctgggaaatacaactgatcttaccaaagaaataacctgtctcttgccgtgtttacttagagccatagaatacctgtttcagagctgaaggggacctgagcccatgataatccattacctcgtgagaaagcggaaaaactgacttcagcttgcccagatggcgcagagaatgggtttcccgtaaccccgcctgtgtctttccttcagcctcgtcccaaatgccgtgggagggaaggcactctctgtcaagctgctgtcaccttacctgaagtaaggagtccacgcctgcatgtccgaggaaaacagttttctcaaacacattagttgaaaaactgaagacgctgcctaaaatacaagctgagttagagacagcccttgtaagactaggtaggtatttacagggcctctcccactagctttgtttttccagagtttgttctttatccggaaattcttaatttgcctactgatcatttaaagaaagggttctattaacattgacacagaagagacactttgtggcactttttaaaaatctgagtctcgtgacttggtataacttctgaaacttactgttaatttatagcag

SEQ ID NO: 6354 - DNA, 6000 bp, Homo sapiens
aacaatgatattcagcatagagttgactgtggtccgtctgtttgggggacctcccctgcctcctgggggcttgctttctggcttatggagtgtgactagccgaggggcttagtagaggcagccttattgaggagctctgtgaccagcctgccaaccccattgcatatcctgggtcagaccagctcccaatagatctgcgaaaggccatttataggaccaagtacagagaacttcttcaagacagaaaaagacagaaaaacatcttcaagactgaaaaagggtttagcagtctactgtttcctctttgtgctttatatgtgtcctgaacccagtggatgtgcagcaaagacccacttcggcttcatagacgcgctccttggaaatgatggaaaggtgcttgagcacgggaattctttggttgaacacccacttgcacatttggggtttcacatattctagttattttctttcacctttcactggtaaaagccacctatgtggcttttggtggcttttatattgaaaagtatggaagttattgaagatgaagatgacatatgtttagagaactaagaaactaagaatcccaccataatactcattttagtgtaagaaagatattctgtgtttgtatctggcatgatttgtaggatgcagcatgtgggaaaactgcataatataaaaaggctctttataatgaagctctgtgtctataatatttctcctctgagtcctgaatgtttctggaaataatatgtaccttttctctttcaagttcaaggagtttcaattttgtttttgtctcttatcagatggaaattagggaggaacattaaatatcattattttatggataaactgaattccaggtcaactcggtcattcgctcagggatcttactgtggtactcaaggcaggggtcgtgaaggcgcccaggactccgtgttctccctcacctgctgcctctggtcagcgagcagtccctgtgcctcagccttgtgctctgctgcacatccgtgtctgtctgtctgcctgttgtgtgccattcccgcccttctgcccgcagccacggcagcagcttcccgccaggctctcaaacggggcccatccaaccccaggcaaaccacaagctctgtgtcatgacacacaagttccctcatgatctgagctccattccttcttcaggagggttgctggtcagcttcccctgatcgtggcctggctccaggcatgcaaaattacttagaacctttggatatcccacgttccctcacaactctgtgcccggtaacattcttccctctgtttgatgtcctctggcccctatcctgtatccttagctcttactttccttcaagccttagttctaagtatcccaggagcattcctgttctccatcctctgaaaggcagtgtgggtgtatttgtgagagtgctgtgctctgtcatagtgtctgcatcattgattttcttccctgtctcccatgagcctgtgaagtactgtgagtggggaccctatggtgttaatttcttgtatctctaggtgatgtatgatcgatattcaataaatacccattagttaaagaatagcaacattgcagctttcttaatccttaatgaaaggttctttattacaccccagtaagcccttgatgaataataatcaattaaaattactaagcagagactgtgttccaggcactgccctgggcactctatgtgtgtttactcattgaatcctctcagaactttcacaagtccattgacagaaggtgaaacggaggcaccagggcacttaagtgaccaaagacctagctgttaaatgttaggattcagacccaggcagtttggcttcagaagtcacattcagtacaatacattttatctcctatttccgacgtgatctgctattatgggtagaaaacaagtaaaataggaaggcatctcaaaaccttaacgtacactaactcatacctatctgaacaagagagactaggagaactgggggaagggaatgggagcagggaggaagagatgttgattcaaatgaaggagtttattagtttatttgtagcatattttaaagtaagtaaaggttttataaatggatttagagtactgttttaacagtattttaataataaaacaatttagactgaaatttcgattgaaaaaagatggtgaatatctagaataggcttttatgctgttaattgatttttaaactactttttagatatttgcagagatttaacaaaatatttttattcttctctttgggcttccaaaacaccacagccatctgtgttactgtcacagctttcagaggattctcacatgtgttatctcattttatacaatgcccagacttcttgagaaggtgataaaccccccagactggagaacaccacgcgtcctctacacaggccacgtccagggctgcctaacaactccagcaggtcttaaccatagcagagagaaaagtatccctgtaaacggctttattaggtgcgaagctcttttaaatgtaagcttcttgaggatgatgacttgatctcatccaacattttatcctatagaatgctacagaaccaacctacaatagatatctagtaaatatctatagaataaataaatgaattaaagtcatatagaaacctgagttaatatttattccattaactgactggtcatggtactaattagctctaggaagccagatgaaagtaatttatgcaagggatcattaccattgtcactaacgcgatacataaacatgtgagtgaacattttgtggagtagcatattctttgtggttttatgtccaaaaagtgcagtgaacccgcagagagaaaacatgctaaaatataagaagtgtgcagtcctaccagtaagcacagttagatgtgtgatcatccatagactcagggccatttatttatttatttatttatctatcgagacagagtctcgcatggtcgcccaggctagagtgcagtggcgcaatctcggctcactgcaacctccgcctcccaggttcaagggattctcctgcctcaccctcttgagtagctgggattataggtgagtgccaccgtgcctggctaacttttatatttttagtagagatggggtttcaccatgttggccaggctggtctcgaactcctgatctcaggtgatccgcctgcctcggcctcccaaagtgctgggattacaggagtgagccaccacacccagcctgattcagggtctttatgtaaaatatccataacatatctgttggattcaccctctggtacgtcagtggccagagagatgggagaagaatgatgggagacagttttttagcacttataatgagaggcaatgttgtaaggacttggcagtagtaatactccccattttacaggtaaagcagctgaagccagatattaggtaacttgtgtgtgggggggccacacagcttgtaaatttcatttgatcctgatttcagagcccttgctcttattacactatattgtactcagagtgacaccaaaaaaacaaaataccacgcccccctcccccaacacacacacaaacacacatatataaaaccctcactgccctttaaaggaagtctcttcacagcttctattttgccaagtttctgttaccaccattcccaacctggacataaatgttgccaaagcactgcatagaattcattgtgattttttcccctcaggcacatagaaaagatacgtttagtctaagtaaacacaagtataaaccacacaacagacttttttttcacttatctaattagtagtatttagcatttaaaaagcaaagattggtactctttgctggcgggagggtaaattggtaaaatgtttttgtagaccaaaaagtaccgttttatatctaaagctttagaaaatataccctttgccctaggaattctacccctgagattctatcctgagaaataatcttatatttctaataattcctatagcataggaatattctatattaaaataactttgttccttttccttcatactaagttatcctgaaatattggcattatttgcatagttttgcttgatactgtcttttgtcattgtgagtttatacagtagtacatgaagtgagccctattttttgacaaagatatttctggtggacccatcgctttcagtcaactttataagaactaactagacctaccagtcagcagagagagtaaacttacattattaatataatttttgttagaagtgatggtagcttgttcttaaatagattgttttcctttttaccttttaccttaaaacttaggcttttaaagtttttctttaaaaagtttgttgaaaaagcaaaagatcttgtacttacatatcagtgactcgttcgggtctctgtgtagtagctgtgagtagttgtccaaactgaagtaagttttaactgtggcatgttgttttaagagaggctgtgcagacctccttttatggtggtgactttttttttctctgtcaccctgtgactgagcatgtaatgagcagttagcctcgtgtacgtgtgtgcactttgtgtttttttttgttttaaatgggaagtgaaattttttatagtgattaaaaaaaactatccaaaagccccttggaatttatgaattgttgatatctgtggaactttataaatttttctgtaaaggtttaagtatcaaaaaattctttgaaagagactgaagcaataaaccttaaccaaaaaaaagaccaagttactgatgattttatattgattttgcatgtaaaagtatgggtttttaaatgttttaaggaaaatagtgtcaactttgacagtgctttttacctggaaacttggtatcagggagtagtttacacattccaccttatccacagcttatgagaaagaaacaggtttctgtggcgtgggggtgagtgacagtccaggatgtggagtggactggattagtcgccgttttcagtcgagaggctgcctgagtcagaggctgtgtgagtacttgaataacagggaaacagttgaagggaggcccattatagataaaatccagcctcttcagcacagggtgaaagagactcatgccattcacctcatagttgtagttgactcagtttaaaccaactaacgtgtctgtcagaatgcagtttatttgtaggctaaattaccagatatgtagcactcagatcaggagaggtgatgtttacacttagtcaggactgatctggccattcccagccacttctgggtgctgctttttacgaagacatagataacacctgtggcagtgaggggcctggatagcaggtcttaggagaactgattaaataagctggggatgtgtatgctttgtaggcatagggtcattatccttatgcttgtggaaactctcatagaaaagtgtttacattgcttgtgtcagtcttcctaactccagagactagcgggagggtcagtaagaagttactggacatagcttttggatcaaaagatgagagtcattcccaaaagttgtgattattttgaaaaatggaatatgctgtttcttatttagatgcttgagtaaacttgatgattttgagggatgatgtaaacagaattgaatcatttggtaggaatttgtaactctgtgatctcagaagcctttctgctccaggattctgtaaaaatagtcgagtagcttttgcctcccacagatgtcattaggttcttctaacgtctaaagtgctgtgagtatggaggaacattgtcagacacaagaaagagcatcaagcaagtcagctgaattctttgggccgccacctcactgtgtataaaataaaggtattgaactaaatgatctccaaggtaattcctagtacaaaaattctatgagggggtaatacagagattttatgacttggtggataaacatgacatcatattctagaactagttcatttaaaacttaggctgcagagtacttgaag

SEQ ID NO: 6355 - DNA, 6000 bp, Homo sapiens
aaactggacaaaagattgtcattgaggataagcacctgcaacaaatgcagtttcccaaaagcattgggttcaatgacgctgatgtagttgtaatcgacctgtaggtactccaggttctccaagccaaggaaggtatcatctcgcagaagttccagtttattattgtttagatgcaatctcctcaaaccccgtagcccatggaaagccccggtctcaatgtcctggataacattgctacctagatgcaaaattgaagccccagtgtaattgacaaactcattgggatagagacggttcaaaaggtttccggacaacaagaggtggtagattgggaaacggggagggctaatttcagagagactgatgatcccccggttttcacagctcacagttaaaatgccgtccttttcctcacaaggacatgcattgtcacagatttccccataataatcgatggtttctgcacacgaaaggacgagagatgttacagcaaacgctagagtctgcagcatccagctatgcatttttctgtgaaggtcctgttccaaagttactggggggcagcaagtgtgcattttacctcctgtaagggagagagaaaacaaggaaataacagaatatgacaaaaatttaagggatcagtcagaaagtctctctctttcttaacattattactctaaaacccaaaaggaagagatacaaatgacacacctccccaagtgaaacattgacattctctagattttattaaaatctattatacattttgatttaaaggttgattaatttttttaaatgagcacaccacaaatatgctgctccttacaagataagagcaggttagataaagtcccattttagttttctcttctcccccccttttcaaaaccaatccataaatatacataaaatggctgtcagttcagtttcatggttctaatttaagaaaaaagaagcaccattttacaaggttccccacctcacctatacccagcccccacccccccttctttctttcagagcctcttcagttaacagttcaccgtgaaggtctctcatgttcacagagaggcaaggagccaaaatacttggggtattttaaaccatcgctagaaatgccacggtgggaacctaaaggatacttttcagaggcaaaaaggctgtaatataatgcatcaaaggagccccaagaagctcttaaatcaccaattgtctcccggagctttgagtaaggagaaaaaaggagagcgcatttgctttgatggtggacttcactaccacgctattaaagcacatcagcgtcctaattgcatgcacggtaccacttagcagcgcttcccggagagcgccctgcgaccacttctcattgatcatgtcagcgacgctaccaaaccgcatctttaagccactgaaatagttctgcacgatggattacaaagaactcagcgaaggtatccgcaatctccgaatacctcccgatgcctagagtttaaaaaggacgttcctaccgcttaccgggaatcagtacaccaaggatcagcacgaaagcctcccttaccttgggctccgcgtctatttgcaacggtaatagcaaggtttgcacggaactaccacctcgacagcatccccatctttggagttgcttattacatttaattgttaacgctcccctctctcttttttttaatctcagggaaaggacgcctgggctgattaagaggcaaaatagaaaggtgggaggaagaactgtaagcgacttaggtcagttgtttaatatccgaatttcatctcccacaggaatcaatatgaccccctcccccttttttttcttgctctctttttgtccccttgaaggcttccttccacttcctacttctgatcaacagcagcactcttaaaggaaggacataaatggaatgagcgtgtgtgtgtgtgtgtgtgtgtgtgtgtgtgtgtttgtgtgtgcgcgcgcgcgcatgctgcgttggttaatggggtggaggacatttgatagaaatgctggactctaggaacctatgccttttctctggtcaaccttgcctttgcctcactaccgaagtctaatatcgaattgcaactccaaactaaagccaagatgtttccgagacagcgggttcaagcctggagaccttgctcctgatccccaagtcgactccagcccgcgttattaaacgcccctgcattcaaacgcacatgtatcagtgtgcctgcgaatcattcacgtgtggccacccagacgtgtcgagatgaattggaaccacagtgcataaacctcgcaagtatccccgacctcccaacgcaacggtaaacgtctcccggcttaaaagcggcaaaaacatccccaccccagtgaaagcaaaacgtttaccttgaaatttcagttctccgctggatcaaatccgcacatccattcagcgaggttgggtcccctccccctccctccctgtgcttccccgcccccattcacctcccaccccatctgaaagcccattgcaaattcagtccagccagtattaaactccagcgtttacaactttaattcagttctagttagcaagggtcgaagagcttcctctcaacccactcccttccccctcctccttgctagcaaaggagaccaaaaatttgagaaaataaagttgaatgagcctggggaggctgacattctgacggggaaacgcacctccgatgcaaattcgcgggtgcgctgaacattctcagattctcagatttttttttttcctggagggcgggggcgggggaactattcattttctcccaaagaatttagatactggatcaccgccctgtacgtccctgcagtaagcagcatggagcctctcggactggagcccagcacccaggccgcaccggaggctccgggcacagctgctcaagcagcagcccaggcagaagcacccggagttccaggacgcgaggctccccctcccccaccccgccccaaagagaaggaagggaaaacggaggaagaaggggagggaggagagggaaggaaaaccaccccgccacatagacacacacacacacacacacacacacacacacacacacacacacacacacacacctcttttgcaaagtaaacgatagacttacccagtctcacatctccaaggcccagtcatcatagccaccctttaaaaacacacacatacacaaaaaccctctttggggtatgcactaggtttctcaagcccaggcagggcgaggagactgcgagcagcgcagtcccagaggctggaggaaagaggcgcccggacgcctccagcctggggccgccgccgcggtggcgaccgcgggttccggggctccccaaaaggctctccccggtgctctccgcggtagtcggagcgggcagcagggttggggggtggagagcggggggcgttctgcagcggcgggatagggaggcggcgggagggggcggcggaggtccggctggagaggcgcctcgcggtaggggccgggagccggagccgggcggggcggggagggggagctgctgggaggggaggcacggagcgggaggagggggacgcggagaagactgcctggccccgccggccccgccaacgtgacggtcagccccgccgagcgctcgcacccgctcacactcatgatcactcgcacactcgctccaatacgtgttaaggcgcgatcgcggggtccctggcagccttcgctgcaccctcccccccacaggggtactcacagttgccatctgcatagggggcaactttctccgacccagctgtggccgccgccccctccagcctcctctggctcctcgcaccctccggcctgggttcgcgccggccggccctcccctcccccctcggctctcctcctcgccgtcttcaccacattcccccctggtcagtggcgcacgccgggggacgagccagagggagcgggtcgcgggggtgtgcatgcatctcccgccttcttcttgcagcgcacactgtacatggtagtgagggggcgagcaaaggtggcaccggcccctcggctgctccagcgaaggcggcggctgcagctcctgcgctgtcctccgccccccagcgcagcggcgaccaccgcgctgggatcccgccgacgctgtctccgcgccgagcccgccgccgccgcggcccctaattagtatttgagaggctcttgcatccctttggcagtttcatcctcacggtgtttgcagggtttttttctgtatcccttccccagatgcggcgcacaatcgtcattagttggaactctctatcaccgacatcctttggggtttctgggggaaggggggggcgggcagcaaccgcgtcgttctatgcctgtggcttgtcctggcagcccggtggctctaaaaaaaactccgagaaagttgcgtcttcctcccgggcgccgaggaggtggcaacgcggtaagcaacaccgggtctctgagacagctgctccggagcgggtgcagggcccagtccagtgcacttgtttattgtcgcgcctctggtgcgagccaagctgcagcagacatgatgggcccggggcgaagcgggcgctcggtggccgatagatggcagccgagggcgaaggcgtccctgggctagggcggcgcaaccggggcccccttggatgtcacattcgtaggaagagagagaagtcttggaccatgtgtgtaattcgagcgtgggactgtgcaattctcggattgggaaagggaggagtggaaataaccccggcagtgccaggcttgctggtggtcaggaacagatgattccagccctgtgctgatcgcctgccttcctcctgccattcagaatgctgctgtctcgtgtacttactgttaaggatcctggaaaagggagtggttcctcctagctgcaaacaagggcgctacttttcttttctctttaatagaattacgttttataggtgtgtctaggcaacacaagggaatgtgaaagactttcagagggaatgtttgtgaatacatctggtgtgtactaaaaagctggaaaacccctaagtaaatgcaatatcgatagaaagcgagtttcttgaagagtcatctgctaaactccactagagtcatctctacagtaagtattcttgggtctttccatgaaaccagacacttccatccccaaaaaggggtctttactttcataagacatgttttcaatatttgtaatattagacctgccgttcatcccgggtataagagaaaagttgataatagtaagtgacccagtgcaggctgagtgcacatgtgcctgttcctttgataactatgtagttagtttctccatgtaaatatattttacccactttattttgcaattaattacgtcttaattattattgatattgttttattcttagtaatatttgggataatactgtgttataatctggttaatcatatgtttaatattgatatagagtctgataatatgtctatgttctgagatgtatatatatctcaggtgatgaacattgcagtctcctgaggtactgcaatcttttttgaactttcccctgcgtatgttgtgtgaatatatatatttttactttataccataaaaactttatttggaagcaattttgtttaagtatgggttatattcaagggagaggaaggaaagaagtaatatgtaatttcagacaataaaaacaaaatcttgtaatgaacgtttcattaaatttagaagcatttgacctaggaatgatagccactagctgtagatacattgcatcaacaaatataacttacacgtcatccacaaaaggcttatttctgtattttttattcagtcattaacttttaacattatataaacatttcagaaaatttattttaagtttaaaattacttttatattttcaaaatgaaatgaaatatttaaatttaaaattatataggaattacagccagaagcctttggaatataaatattgagtcctatcagaa

SEQ ID NO: 6356 - DNA, 6000 bp, Homo sapiens
cctaaaagtttccagggacccagctccttgaggaagtccaggcagatcagacatgtttcccaatgcttttcagcttcccactgcagcaactccagataaagtcccaccaattccacagcctgaagactgtagcttccaataagagctatgacattttgtgatttgtcaactttactgaactctatattcattaaactctagattaatggaatagattcacattgacatttctgggcctctgggcccttagtgtgccaacaagagagtaggagaatttcacaaacccccagaaattgtgtatattgaattctcaaagagaattataaaaccccaccaaaaaaattagaaatcactggtttagatttaagcctctcatattaggatatattaaatatagccttcataactcatttaaattacttttttctgaatgatcatacctgactactctgaaattctaaatgcattaaaaaaactacgttgccacaattatttaggagaataaatggcttttaactggtcctggatttgatattttggtaaattaagccattagaataacttccactgatattacacactacagaccagctgaagggggtttcaagagaccgaaatcctgactcaaattaatttctgaaaatgtttaccaagtattctactgtgggatagcatattatttgccataattccaccaaatgctcccaaatgagatcctaaaacaatactcaaggttggagatgaccatgcagtgcctgagcatgctttgtgcagtgggatggggtggaccacagggtcttgggctggatgatctgctttcaagccccagtttcattactttgtagtggtatgacattaggcaagttacttcttcacctctctgacaagtagtttgcctagatctaaagcaggaatgataacgatacctcctctacagggttgttatagtgacttaatgaaataaaccaagtgcctagtgcatcattaactggtagccattattatgatattgtgtctcaagctaaacctaaggccacaaggtaggattcaataatgatgaccttagtgatgggacgtaatgtgatgaatgtgtttgtgacccatgtagattaatggatggacagatttataatgactcattggcttatttcagaagtaaaaacacagtcatgttaagactggatggcttcagggaaaaggatgtaacttcctagggaaatcatatgggagtttgaaatgaaagggaaactgtatgacctcttggggagtcagaaattctctagtttattacaaatactcatttaaccagacagaggaaataagatggttctggaagagctgatttatatctgtcctggaggcagcacaccagaactaaaaaaatgttctcaatcccaccttctacacagcacttcagctactgtctgatttagaaaggtttctaactgggctggacatgtggggtttcctgaccccctaaacagaactttcataaaatcctgtgccaacctagcaaaactagattttaatctccctttgggaagagatcttgttagatttattttaaatttatcacaacaccttgtactgaaaagttctcaattcggttttgatgaattgaattgaaattcctttgccaaattagaatgggaagatttagtttgtgggacgccttaagaagtaaaagggtcacttctggccctcatggagttgtggctgcatttagagattcaatttcagctcttaccaagtaaatcctcacagttcatcagaatcaattgccatacaggattttaggatttcttcaatcgattcccccatttccgggggtgattccctttagagaaaactatatcctaatccactctcaccgctaaacctcagaaatgttcggaattccccttaaaatatagctattgggttaggatttttagagatttatgaagggaaatttacaggcatgccttatggtaactactcctgccaataggtcaaagcattccctacaacatttcccaactttacattccatttttttccccttgtactgaagtactgaagtcagggctagctataggcaaatctgcaaagcacaattccatttccttacactgtgattgtgtttttatgtgcaactttctattgctgctgctgctgctgctgctgggaaagttttaaatattttcatatgtctttgaaattttccaactgttttatttagactgcttttttttttttaacaccataaagcctcagtaagtgggcactggcagccttattgtggaattgaggaaactgaggcccagaggtgctgggatgtgtctggagttccaaagcaacctggagcaacctggctctttgtgtgtttctactgacgcccatggtaatcacacaataatgttaactaccgaaacccttacagattttgagtgctccttggtcttgtccatgaaataattgatggggtgccatcatatagcttgcactttggaacctgacagattgggtctgatccccagctccacctctaattcatttactttgatcatcctaccagtcatctgtaaactaattgtaatatctacttgtgggctgctggaaggaataatggaagtaacacatctcacccagtccttggcccactgtagatatttaatacaaagtagctacagtccgtcacagcaggtgaactgtgtttttcctactcaccagtctggatctcttttttccaggccatttatttcctaaatacctactttgtacctgctactttcaaagtcttccaaaacagtccttcccaaagttagtgggcatatcaatcacatgaagatcttaagatgcagattctaacttagtaagtctgaggtagccttgcattcctaacaaactctcaggtaatattgatgctgactgtccatggaccacacacttttgactagaggatgtaccccattaggtgcacttagggactagatccttcaggactagtggttctcaaactttacagttcatcataatcacataaagggcttgttaaaatacaaattactgtgctccactccagagtttctgattcagtaggtctggggtgaggccagaaaaatcttcatgtgcaccaagttcccaaagtgatactaacattgctagactggggactacgcttgtcctaagcttagcagaggtctactgaagacctgaatggaattttattccaatggttactgacttttatgagtggacagaaccaaatggaatttggttccaaagattactgacttttaggaggggcagaaccttaagagggagctaaagggaagctccctctacaagctttctcatctccccgtctccaaccaggcccccttcctcaagcccaccatgatttcagcaggcgccctttaccttgtagacattgatagggatgtcaatgacgatgtgcagcaggtctcccagagccaagctggcgatcaagatattgggaccgtttcgcatgcacttgttcttgtagataattctcagaagtgtggagttcccgatgatccccagcacgaacacaaggcaggacacaaccgtgttgatgtatttgaaagtctccttgatctcgatgggtccttggcacgggggaggggagatggtgcgtggcggagatcctgccgtcctgtctcctttaggcacctccgcaggtgccaacgaccgcgccagactggcgttggaacccttgggccataaggtcttagtgggtggcgtcattatctctgcggtttgcaaaagcggagtggccctgtcaggcgggaagcctctctcctctccccagatccgcgacaggccgcaggcaagaaccagcgcaaccagggcgcgtccgcacagacttggaggcggctgcatgctgctacctgctccagaaggcgtccggtggccgctccgcagtttcagagcctagagacaagcagaggaaggaagacaggacacttgggtcagctgcccgagccaagtcgctgcaaacgctaataccgcccgcagcctcttcgccagtatccacgctcaaaagtaactcaagtttgcgcgccagtgggaaacttggcgctcatgactcgccagcgcgggtcgaaactccttcctgatgccctctcagctgtttttcttcccccgcgtggccaggaggggtaaataatatgcagtggggcggggcgttctggaaggggtgtgccagggagggaatgatgggggtcccaggcaaagctccgaactctttcacgtaacgggaggaatacagacacgtcttagttaagcgtgcgtgggaaccgcggaattaaggcacctagaggccaagggcttgtgtcaagctctgcattttgccccgcaggggaacctctataccccgcgattgaactcgaaagactcctcccggcggatgaaagccgctactccctggctggctgagctacagctcccgcagcgcgcccaggagtgcgccggagattcggaaacccgcagagacttctcaagtcagcaggaacttggaaaccgctgttccctccaaacggcttcaaacactcgcgctccttcctttacccaacctaattttaatttgccctctctataggcttaatttttatttttttaaaatcccaaactagtaagccaaaccgaagccccagaataaggttcaatcaatgattttaattcaacaccaagcccgaatgtttacctctcggatctgacaaaccagatgcagagcgacgaatggagaccaccttcccgggaggcggaacccagctgggttccagcctgctctgggagaggagcacgcctcccttgagctgcaggcgggtccggctctgacgaaacgctgcgagaatgccagacagtgtagcctccaccgtttgctcggggtctctgctgccatcagacaagtacttttattcattcatcccttcccatcaatcaccgccagactcctcccgcgccttccgaccccgctgcaacctttccccttgggcgatgcctggacagcatcagtagtagttgcccgagggaggggggcagtcctcgtccggggacaggtcccaaaaggctgtttatttgttagagttctacgctcttcaaatgaacccaaatcaagggcaagttatcacgcaccatgtgacacccggcagctccagactagaacaaggctctgcactgaacgtgataattgaacttttaatgccaagtgtcacttttctttcaggtaaatgttccgccgctgtgatatttaaggttggtttgtgggcgctgctctttgctctgcttcattttgccctgaagtttcatttcaagccaacattaaccccaacacggaacagctcgatcttttcttcccaggccctctcactgccccgagagaggattacaagtactcctcattttccccagtacagctcttctcctctcttcctgccacagtatcggtgttaggcaatctcaggcatttttatactgtacctatgacagacttgatgcttatcggagacatgaaaataatcagaaagctgccatgcaaattcaacatgatatttatttaccaggtagagcaatacaataaggtctttctatccattcttgagctccatgtttaccgcagagaggaaaataacagcgactggtagttttgcccagagattgtataaaagaggtcaggaagtcaggcttggagatgcactggagagtactgtgccgtcctccaatcagcaaaatccctactggatctgtggaacttcaaacccagaagcacccattccatgtagcagtttcacccagagacaggaggctcgttttttgcttcatgttagttaatggaatagatgggacaagaaccttggatttttggctcttaggcaatgctttctgggacagtggaagtagaaaatcaatttctatttaaaaaggtgaactttaagtgtgaaatgtggttaggaacatggttacggagtaaggctaaaggaatgagaaatatggtct

SEQ ID NO: 6357 - DNA, 6000 bp, Homo sapiens
ttctttcttccctgactactctgtccttaaattgtcacattcattcccatggttttccctcttgtagagagactaaccacatccacatccctaatttctgaggtctaaggccatactgtagattcagtacttagaggacaaccaagatcattttccccctagactgtggccctcttcccatatttcctaacttgattaatggcaccaccatccaccaagctagggacttgggattgacccttggctcctattcacaatctttgtcctctttgttgatgctcctgaggtggatagctgtggatttctccagccatcatgcctttccccttcttttaccccccaacctttttttttttttttttttttttttttttaatgagatggagtctcactctgtcgccagggcgagagtgcagttggcatgatcttggctcactgcaacctctgcttcccgggttcaagcgattctcctgcctcagcctcctgagtagctgggattacaggtgcctgccactacgttcagctaatttttttgtatttttagtagagacgggatttcaccctgttggccaggctggccttgaactcctgatctcgtgattcacccaccttggcctcccaaagtgctgggattacaggcatgagccaccgcgcctggcctccccttcttttatcaacagcattctcctttttctttgggaaactacctgcatgtagtcttgctaggactgctgggaaactggtacaccagtcaagactttttcccccagacctgagatcttgagaaatgacataaggtctgaaaactgaagttgatctgttccaatggtggcctaaagagatcactcccatcagtttctgctctccctacccacaggactgctctgacttctcttcttcttggagctgctgttagactgtccttttgtaaatggaacttcccctgtccttccagtaaattcctatattgcttatgtgaaccagtgtcctcatgtgttacttacgcccagagaatcctaatccatatactacctaccctaatctatacatgacctctccttcttcactgcaaaggtccacttcagactctcacttttcacctggactgttagaatgcctctccttaagtggtctcctaaattccagattctcctcttacagttactcaaaaaatatttttttgtatgttggcatttgtatagcagtttgttagagtgctaagtgctggggatctcataaaataaacaggcaaggtttaggtcctcatatagtatagagtgggaggcaggtaatgcttagataatcacgcaaaaaattatagaccatggttatgtgctacaatggaaaatacagagtgctgtgaaactaacaggggaacatggcccaatacgtggggaaaggacggtatcagtcaagggaggcttcccccatggactaaccttaacgcgaagatggggatgctagggaagggaagaagaagatggagctttccaggcagaggggatagcaagtgcaaacaccctaagatggaaggtttaaggaagtcataaaagccaagtgtggcaggaacacagaaaaaagaaggaaagtggtaccgaatgagactagagaggaagcagggtcaaatcatgcagtgccttgtaggaaatattaaggattggggtccttattctaaaataaatggggaaagccaataggattttttttaaaagagacatggtctcactatgttgcccaggctggcctgtaactactgggctcatacgatcctccctcctcagcttcctaagtacctgggactacaggcacatgccactacactggcctaattagaagagtttaaataagtaagtggcatgaagaatttttttaagagcattatgcctagctgcctacaatgtaggaactggatgtgggaagaccggttaggacaacagtgacaacagtagtccaaagagaggatgagagccaagattcaggatggaggagatgaatggatgcaaagatagtccgcaactaaaatccataggtcttggttgatgaattggatgtggactggtggtaaggaggagggattcatcaaggaaaactcttaagtttttggcttaaaagctagaaggatggttctaccatattctgagatacagagtattgaagaccaagttttaccggggaagtaggaagaagatcatgcacccatttgatgtgccactggcacatcaaggagagagatgccaagtagcaggacatgtaggttggggccacagacataatttgagtaatgaatatatagattatctttgaagtcctggatgtgagtgagatggggccgaggggggagtccagaggagctgagaacagggctttgatgaactccagcatgtaaaggcaggtggaagaggatgaactggcagaggagaggacactgagaaagatgaggaaggaaggaagcagaagagtgcagtccttctggtccttctgaaccatgcacttgctcacggccctcccttatgctattagcccctcctcccctgatgaagttcagtctccagagcatggcctacaaggcccatcataaggtagccccaataaactttgatcatttatttccttcttcactccccatctccaatatcctagaattcagacactgctcacttcaacactaacctccagactttgcacattcatcaaatgttctttccctttcttctttttttaaaaagtctaatgtcacctcttgtacaaagtctttgtcaggaagacaaataatttcactcacatatttttaagacaatatttagcacactgtaatatactgtgttggccggtggcttaagcttatttgggctgggtttcctatcttatatgttgtttcctaaaactaagcacaatctgagaagattgtgtttgccaaataaattaatgtatgataattatatttttgctttgattgacaaaattaagacaaaatcagtctagattaagctggcattgactgctcccaagaggatatttggcaatatctgaagacagttttagttgtcacagctgggagaggtgctactggcatctcgtaggtaggaactagggatgctgctgaacatcatacaatgtatagatggcccctgcaataaagaattatctggcccaaaagtccatgacgcttaggctgacaaacccagttttggtttgccaccttaaacgttcttctatttatactgtaaatttcctgtaggatattttttctgaatgaaataagcactccaatactaataccattgattctaagatctacaaatatactagtcattctttagagcagtgtttctcaaatttgtgcatcagaatcactgggagggcttgttaaaacataggtgcctgggccccaccacaggagtttcagtagatcaggggtatcctatgcactgtaggcctgataatttgtatttctcaaggtttccaggggatgttgatgctgctggtccaatgtccatactctgtgaaccactgctttagcgaagagcccagggttagttaacctgagggtttatcacacttttccccattagaggccatgcccagaaacttgagatgcaacttccctgggtagccctgcctttcttttccccgtatctcccagccaggtacctggagctgcatctgtggtgattgccaggctggcagcaccttagactcaaaacataccccattcctgagaacagatgaaggctgctagcagggcaaggcaccaatccctctccccccatttatcagccagtaggggcctgaggtccaggcccttggaaatgaagtaacatctaaaggaactatcctagctcctcagagcacctgtatcagaatcacctacggggtttagagtcatgggcccatccttagtaattctgtcagcctgggaatctgcattttatgaaactcttgacatcagtgcttctgtaagtgtggtcctgggaccagcatcatcatcaccacccgcgaacccgttagagatacaaattcttgggtacttccccagacatattcgaaacgctggggttcagacctcgtcacttgtattttaacacgccctctatgtgaattctgttagctcaagtttgagaattactggtttaaattagtctgcttctcaagtttaagatgtctggatgtagacttctggatttttctttcacttcactttctagattcctttcctacctgtatataccaaaagcacccacaggaagcagagtgccccccccaccactccccaaaaggcctgcctgtagaacatttgtaccctacaaaagagagcaagagtgaactttcgttgaatctggtcatttgtttgcatgccagtcggcactttatctggccggacattggtccctcaggaggtcgacctggcactctcggaaacccgaacacccgggccggtaacctccggagtggcggtgtcgcgggtcggctttgcagcgggtactgggctgccgtcccgccccgcgctcctgcgtaaacacgcggttccctcggcaacgctggaacccacgtcaaaggctccgccaggtccccagcgaccgccacccctccggccgagcccagctccccgcggcggccgctagcccccggccccgagccaccactccgacctagcggccgccgcccccggtgcgggatgaggagatccgcggccgccactgggccccatggaggagccgcagccgccccgcccaccagcgagcatggccttactgggcagccagcactccggcgccccctccgcggccggcccacctggcgggacttcctccgcggccacggcggccgtgctctccttcagcaccgtggcgaccgcggcgctggggaacctgagcgacgcaagcggaggcggcacagctgccgctcccggtggcggcggccttggcgggtccggggcagcgcgggaggcgggggcggcggtgaggcggccgctaggcccggaggcggcgccgctgctgtcgcacggagctgcagtggcggcccaggcgctcgtcctcctgctcatcttcctgctgtctagccttggcaactgcgcggtgatgggggtgattgtgaagcaccggcagctccgcaccgtcaccaacgccttcatcctgtcgctgtccctatcggatctgctcacggcgctgctctgcctgcccgccgccttcctggacctcttcactccgcccgggggttcggcgcctgccgccgccgcggggccctggcgcggcttctgcgccgccagccgcttcttcagctcgtgcttcggcatcgtgtccacgctcagcgtggcgctcatctcgttggaccgttactgcgctatcgtgcggccgccgcgggagaagatcggccgccgccgcgcgctgcagctgctggcgggcgcctggctgacggccctgggcttctccttgccctgggagctgctcggggcgccccgggaactcgcggcggcgcagagcttccacggctgcctctaccggacctccccggaccccgcgcagctgggcgcggccttcagcgtggggctggtggtggcctgctacctgctgcccttcctgctcatgtgcttctgccactaccacatctgcaagacggtgcgcctgtcggacgtgcgcgtgcggccggtgaacacctacgcgcgcgtgctgcgcttcttcagcgaggtgcgcacggccaccaccgtcctcatcatgatcgtcttcgtcatctgctgctgggggccctactgcttcctggtgctgctggccgccgcccggcaggcccagaccatgcaggccccctcgctcctcagcgtggtggccgtctggctgacctgggccaatggggccatcaaccctgtcatctacgccatccgcaatcccaacatttcgatgctcctagggcgcaaccgcgaggagggctaccggactaggaatgtggacgctttcctgcccagccagggcccgggtctgcaagccagaagccgcagtcgccttcgaa

SEQ ID NO: 6358 - DNA, 6000 bp, Homo sapiens
cctcggtcctgtgattttgccctgcctccatttgccttgtgatattttattaccttgtaaagcatgtgatctctgtgacccacaccctattcatacactccctcccctttgaaaatcactaataaaaacttgctggttttgtggcttgaggggcatcatggaacctgccgacatgtgatgtctcccctggacacccagctttaaaatttctctcttttgtactctttccctttatttctcagactggccaacacttagggaaatagaaaagaacctatgtgaaattacgttaaattatcgggggtgattcccctgatacttgaacccctgggctcaagcgatcctctcgcctcagctagtgctgagattacaggcgtgagccatcacacccggcccatttcttgttgacctctaggtcctccatgtctagcttggtgctgtgaacatccgagatgctctacacacacttgtgcagtgaaagccagggtactggatagttcaagctgcttcatctgtctgaccttggttttctcatctctaaaatggacacatctctaaatggctgtttttaaaattggacaagagaacagaagtgaaaagctctgtaaactgtaaagtattttgcaaataaaaggtgtaagtgctcaggtttaatcgctttttcttggggcctcgaatcagccgggagacatcccaagggctgcgacctggttgtgcccacaaggtcctgctggatcacattcccctgccagcttcctctgtttccctgccttgggagctcttgtagggcatgcactcaggagctgaaccctggaccttccagactctcctagcaccttgctactcaaagtgtggtccatgggctggcagcatccgcatcacctggcagcttgtttgaaatgtaaaattcctgagccccagcccagactcactgagtctgaaactctggaggtgaggcttagcgatctgtcataacaaattccccaggggattctgaagcacctaagttcaagcactgcagcattagaataccaaaaccctcttttctctccaaaatgaacgtaggaggtgctttcatctaaacggagtaaatgtttcttttttgttctttaggcttgaatgtttctgactttagttgccagaattagcttattgttggcctagggaagaggaagcaccaccctacatgtatatacacccaccactcgtaaactatagcctgatgacgctcagtgaatttccaagatgactggttgtgttttcatgggggcttcatttgccatttggggggagcctgggggcctgtgcttttatgaatggattttatcttcctgcgggcagattttgtgtggactgtggagaatctgaagtaaattcggaaaacggaacggccctggataggggaccatttggggacacgagctgcagtggatttcctcatatgtaagcctggcaaaggatttggccccacaggtgtgagcttgcaattcagggacaggagggctggcaagaggagggtgactagggctgaattctgattcattgggctgtgggaagagttttgggatcacggacttcagctgttccttctcccctttttctcaccaccaaaacatacaaatgaaaacaaacaaacaaacaaacaaaccccaaacccaccgttgtgtattgctggtggaaatgtaagatggtgcagccactatggaaaacggtagggtggttcctcaaaaaattaaaaatagaactaacatatgatccagcagttccaattctgagtatatacccaaaagaactgaaagtgggaacttgaacagatctttgttcactcatgttcttagcagcttcattcacaatagccaaaagataaaaacaatcccaatgtccatcaatgcatggataaaccaaatgtgggctgtgcataccgtggactattattcagccttaaaaaggcaggaaattctgacatgtgctacaacatagatgaatcttgaagacattatactaagtcaaataagccagacacaaaaggacaaatacggtctgattccatttatatgaggtacctagaatagtcaagttcatagagacagaaatggtggttgctgggggctggggagttattaattttgcaagatgaaaagagttctggagatggagggtggtgatggttgcacaacagtgttgatatacttaatgcatttgaaagtggctaaaatgggccgggtgcggtggctcatgcctctaatcccagcaccttgggaggccgaggtaagtggatcacctgagatggggagttcgaggccagcctgaccaacatggagaaaccccgtctctactaaaaatacaaaattagccgggcatggtggcacatgcctgtaatccaactactcaggaggctgaggcaggagactcgcttgaacttgggaggcggaggttgcggtgagccgagattgcgccactgcactctagcctgggtaacaagagtaaaactccatctaaaaaaaaaaaagtggctaaaatggtaaatgttactttatgtgtgttttaccacaacgaaaacaagaagcaactccctccaccaccaccactggaattctaggccagtgccctgaagaggatggaagaggtgagtcagagactgggagtccctgttttctgggaactgagaggttgagagctgagtctcaggcagagactgtacgtggcagggatgtggagcaaggagacctggattctagcagcaacgcttccaacctcaggctggcttcaggcaagtcacttgccctttagaaccatagtttcctcacctggaaggtgggaagtgtcgttcacctattcatccaagaagttcttttttgtttttgagacggagtcttgctctgttactcaggccggggtgcagtggcatgatctcagctcactgcaacctctgcctcccaggttcaagtgattctcatgcctcagcctcctgagtagctgggactacaggtgcccgccataaaacctggctaatttttgaatttttagtagagacggggtttcatcatgttggccaggctggtctcgaactcctgacctcaggtgatccacctgcctcttcctcccaaagtgctgggattacaggtgtgagccactgcgcccaaccaaaacattgtattgtatcttgctcaaacttattcatatatctggaatcttctttgttaaattctcaataagaacttcttttttttgagatggagtctcactctgtcgcccaggttggagtgcagtgctgcgatctcggcttaccgcaagctctgcctcccaggttcaagtgattctcatgccttagcctcccgagtaagctgggattacaggagcccgccagcatgcccagctaattttcagtagagacagagttttgccacattggccagggtggtctcaaactcctgaccttaagtgatctgcccacctcagcctcccaaaatgctgggattatgggtgtgagccactgcacccagccaataaataggaacttttcactaattccagtaagattataatctcctactcctcctctttgcttctggaaaaacaatgccctgtgtttgcatacccatcatttgatctggccctgacactgatccccaagggcaggtgtttttatctccatttgacaggtgaggaaacctaggctgagacaaggtaagtgacttgcagtctgtatgtggctggccctggcttggcgctcatgtcctggagccttggtccagagcattcccggagctccatggaggagaggagaggtagctggatgaacacccaggagtccaggctgtgcttgcgggaaactgggtttttgtttcttgccagaacgcggtaaaatgtggacaaggttgggcctcttctgatgctatctggagaggtccccatggggggcagtggcctcagtgtaaatggacttaagtagtacattcctgtgagcaagtaggacaaatgtgaatgccgcctattgctgtggatgaaggtggccggtgctgtcacgtgtgggttagaactgatctttgccccaagtctccctgggagagcaggctcagggtaggcacatgctcataagaacctctagccttacttgctacaccaagggagcaggaaaatatataaaggataggcaataaataggcaaagccagggaatgggaaggggagacgtaagctaccctgcagcatcttggtatgtgacccattcggatatattcttttttttttttttttctattgacacagagtctccccgtcactcaggctggagtagagtggcacgatcttgggtcactgcaacctccgcctcccaggttcaaatgaatctcctgcttcagcctcccgagtagctgggattacaggtgcatgccaccatgcccagctaatttttgtatttttagtagagacagggttttgccatgttggccaggatggtctcgaactcctgacctcaagtgatctgcccaccttggcctcccaaagtgctgggaatacaggtgtgagccacctcgcctggggctcccattcagatctattcttcttgttatttatttatttatttatttatttatttatttatttatttatttatagagacaagggcttgccatgttacccaggctggtcttgaactcttgagctcgagcgatccccacctcccaaagtgctgggcttacaggtgtaagccatcatgtccagccgttcagatattctagttgaattggagttggtgggctagtacaccttctaaattaaatgagtaaaggatttagaatggtgcctgacacacagtaggtgctacattcatgttagctactattataaacctttcctgcctctgactttcagggtcttgcccaccaccagcgatgcccagcccttggtagagcttgaaccaccttctataaacaggatggcggtggagagacaggcccagtccctgagcccatgaggagtgtggccccttcaggcccaaagatggggaacatcactgcagacaactcctcgatgagctgtaccatcgaccataccatccaccagacgctggccccggtggtctatgttaccgtgctggtggtgggcttcccggccaactgcctgtccctctacttcggctacctgcagatcaaggcccggaacgagctgggcgtgtacctgtgcaacctgacggtggccgacctcttctacatctgctcgctgcccttctggctgcagtacgtgctgcagcacgacaactggtctcacggcgacctgtcctgccaggtgtgcggcatcctcctgtacgagaacatctacatcagcgtgggcttcctctgctgcatctccgtggaccgctacctggctgtggcccatcccttccgcttccaccagttccggaccctgaaggcggccgtcggcgtcagcgtggtcatctgggccaaggagctgctgaccagcatctacttcctgatgcacgaggaggtcatcgaggacgagaaccagcaccgcgtgtgctttgagcactaccccatccaggcatggcagcgcgccatcaactactaccgcttcctggtgggcttcctcttccccatctgcctgctgctggcgtcctaccagggcatcctgcgcgccgtgcgccggagccacggcacccagaagagccgcaaggaccagatccagcggctggtgctcagcaccgtggtcatcttcctggcctgcttcctgccctaccacgtgttgctgctggtgcgcagcgtctgggaggccagctgcgacttcgccaagggcgttttcaacgcctaccacttctccctcctgctcaccagcttcaactgcgtcgccgaccccgtgctctactgcttcgtcagcgagaccacccaccgggacctggcccgcctccgcggggcctgcctggccttcctcacctgctccaggaccggccgggccagggaggcctacccgctgggtgcccccgaggcctccgggaaaagcggggccc

SEQ ID NO: 6359 - DNA, 6000 bp, Homo sapiens
gaggtaaggctgggggcttcccatggctgtggaggctgtcgtgccagccctgagaaagaggaaactctgtggattaggtgggttaggcatggtcgtctgggttttctggggtcacaggcagcctctccctggcctcactaggacacactatgactgttgaaaccatgactcatgattcacattgggggtatgccctggtcaaaggaacatgcgctggcaacaaggagtttcagaatgatccagttcttgggttgacacttctcaaaagcccctatcttcccctgcctcttctgtctcggggaggctgtcttcaaaatttccctaaaaaccccttccctggctgagacctggggcctcttgccttcttaccagagcagctgtcccccaacagaaacctcaggacacttccgcctttcctcttcccacttggcctgtcatccggtccccaccccctgcttgcatcactaacacccaggggtgggagaggccaggacagagccctcctccaagggagcgaacaaggagtcagaaaaggctgggaagacttcttccgagggatggaatcaccatctgagcagaggggcccggcgagacgtgaatacacagacacacctgatggagggagggatggaatcaccatctgagcaggggggcccggcgaggcgtgaatacacagacacacctgatggaggggggctccgtgcctggaaactgacacacaggatttgccctatagtcatcagcacagaggcagagtgggtgacttgtcaaatctgggacaatttgagcatcatcaagaataatgactaggggccgagcacagtcccagcactttgggagaccgaggtgagcagatcatctgaggtcaggagttcaagaccagcctgaccaacatggcgaaaccccgtctctactaaaaatataaaaattagctgggagtggtggtgggcgcctgtaatcccagctacttgggaggctgaggcaagagaatcgcttgaacccgggaggcggaggttgcagtgagccaaaatcatgccactgcactctagcctgggccacagggcaacacgtcatctcaagaaaaaataaaaataaaaaaagaataatgactaggttggacagaaacacttggaagatataaaagtccatgaatcccacacacccatattcacagcagccaagcgacatccacccatcaacacctgaatggctaaacacagagacatggaagggatgttatttaccctcaaaaaggaaggaaattctgacacgtgctgcaagaatgagacttgaggacactgcactaagtaaaataagccagacatcaggacaaaaggacaaaggctgtgtgattgcgcttacgatgaagtacccggagtagccgcgtgtatagagcagaaagtggaaggggctgggcgcagggaggaatgggatgttactgtgtagtgaggacagtttcagttttacacgatgaaaaatttctgaaaatggacggtgggggcggttgcagagcgtgaatgtgcttagagccactgaccggtacacttagaaatggctaagatggtaattttcatctcgtgtaattttcatcttgtattttaccataaaatacaaatctatgagtccttaataatcaagagagaaggccaggtgcagtggcacacacctgtaatcccagcactttgggaggccaaggtgagaggatcacctgaggtcgggagttcgagaccagcctgaccaacatggcaaaaccctgtctctactaataatacaaaattagtcaggcgtggtggcacatgcctgtaatcccagcgactcaagaggctaaggcgggagaatcgcttgaacctgggaggtggaggttgcggtgagccaagttcctgccattgcactccagcctgggcaacaagagcaaaactccgtctcgaaaaaaaaaaaaaaaaaagccaggcgtggtggctcacgcctgtaatcccagcacttttggaggctgaggcaggcagatcatgaggtcaggagttcgagaccagcctggccaacataatgaaaccctatctctattaaaagatacaaaaaattaactgggtgtggtggcacacacctgtaatcccagctacttgggaggctgaggcaggagaatcacttgaaccaggcaggcggaggttgcatgagccgagattgcaccattgtactccagcctgggcgacgggaccgacagggatctgggcatctgcccgccacacctgtcctcctgggaggctgggaggcctggggcccccactctcaaagcctacccttccggccactgtctctctacagttatagagcaaaggcccccgacccaaccctgccgccgtcaccagaggagcagccccacaagcccccacagcgtggtcacacctggcttgggggacagccgcaccccacatgcaaggtagcccttgggaacttctgctccagatgcaccaggtggggaaggccagagctggccattcagggttttttagggccagacaagagcaaggccctgtgtctgcccgggaggtagagcagaccacactggccccatgcacaggggctctttgggtccctcgtcccatctttccagctccttccaactttgccccctggacatttcttgctctgaccctcccttcccttattcctggccttgtctccccctgggcccaggccttcccagactgactggacaaattagcaagcaatcaccagctttggcttctgcagggtccagacaggccaggagaacggctggtgaacccaccggacagcagggcggtttctggtgcacacatcgggatgtgaagttgtaccccatgtctgcagcttggacctcaccactgctgtgtctgggccgcagggagctgttctggcacgtgactcagccgtgggatgttcgggtgacttcctgtctgaaacctgctctcctgttggtgagggattctctgggtatgaatcgctttgctggggtcagagcagggagagccatctccctgacgggcttctcagagacaacaccccaggtgccgcacagcccggggcagcctccactggtcccgaaggcccggtgggaataggcagggccagtccacacccccaggctgtcagtgtttggactcccaggctcctgcctgccctccaccccagcctggcttctccacctggcaggggcaggggagccggtacacggctgccaaccccccagttcatacccacagctcctgccacccaagggacccaactttcctttcccagaccccagtgaaggacccaaagagaggattcaactgacctcacttgaatcggctattcccggactgcctggcaaaggccagaaggcatggagggtgacaatggcctgagccgggtccgcatgtcactcctggacccctcaccgggggcgcagaggaggcctggtgaacgtgacagaccacccagtggggcgcaggacggggcaggtcctaggaggctgctggggccagcgacaggaacccacagctgtccctggccatcacccccactggcctgatgtgggcttcgtctattgctgctccgagggtggggctgccctggcccaaagacccgggaggccagtgaccccatgagcagtggcctgtggaggcgtgtgtttgcaccagatcccctagaggatcactgtcccctgggcaagtgtttctggaaagccaaggtaggccctgccctgagacctgcgcctccccgccagggcaatgggaaagcccagctttccagggactccactgccacccacacaaaaccctctgaaatcgctgttcggaggcagcctccagccatgcggccctgcagcagggggcagctgtgatccacgtgtctgggggaaagtgtagactgggggctcggcctccaccggcctctcctggccgtgggtgtacccacccaggatggcggcttcttcgctcagtgaccgtccctgctgcggtgctgggcagtgtcgcttggagacatttgtggtccccagctccttccctcagcccggccctgtccccactgctgaaagagcctggcttggatggagcttggcaggctcgggagtgggcaccagggtgggtctgtgccctgaaactcagaagcagcctggaggtgagtggagttgtaggtgctgtccacagccagctggctttgtccaaggaaactgggcccatcatggccggaagccccacagtgagggggactgtcccaggcaaccctgcctgcccaccctccagttcccacagggcccctcacagagaagcccacccgcagggctcctgggccaggccaggcttggttctggatgcaggaggggttgaggtagggctgggggaggaatgtggagtgtgcagtaggctgttcttcccacacggccctgccccatgtaggaagagggaggcggggaggggagggtgcttgtgtgcagtggctgtgccgagccttccaggacatgcaggtgccatcctggtcccggggctgcagtgggcgcactcagcctctctactcctggcaccccggacagggactcctgggaggacacagcctctgggaagtcaccctgctccgtgcttgcctggcccgagagtgggcaacaccaggcctgagctgcagaggagctggattttgtctttccaggacccctccctgcagcctttccaggacccctgtcctgccttgcctgtctggggacacacggacagccgctgtgccgcgccaggccccagcacctgcctgggagctcctgagtgagtggagcctggctctgagtgctgctattgctaaaagaggtaagactggggtttcctgccactccctccctcaggaaggtgacgaggccatgctgtcatcaccagtaagataccccagcccggttggctaacccctagctcagccctgtttgtggttaggggagttctagacagaacataattagacccctgctacttcctgaaacctcagctaggactgcagggaggggtgcgaggctagccacgcaggcggggccctgggtaagtcgctgggctctgcgtgctggggagtgggcctggggggccaggctctgggatggggctgggggctgggagctggaggcgggcagagggggatctgaaggcaaaggtgatttgttggtaaagatggaggctttgttgagggttcttaatctggggtccctcccgagagaacccaggacccccagtgaccacagatgtgatggggccggaggatttgggggagagggacaacagtttccattgtatctttgtcaccgccaccttcctggagactttcttctggaaaaggcttccctggctactggtccagatgggggtgagtcagggggctggactttgtccctggaatctctccttggccacttgcttccgtgattggtcggggggcactgaagggctgggcttctctctgtggggcctgtgctgcttgtggggttacacagagggaaaagcagggcagtgggggctgtgctgcggtgagtggcagttggcccagtcacgtgacaagatcctggagctgggcaggtcaccggcctttggagtggcgttcggcgcaccaggcacagcggggcggggggcccaataccttctgtcaagtgcatgacgtgggtctgtaccactgcaagggactgggactgaccactgaagactggccagttgggctgagcacaaaatgatatttcaggagattggccaggccgaggtgggagagcagaggctcctggaagaagatgaggataggggctgggcacggtggttcatgcctgtaatcccagcactttgggaggccgaggtgggcggatcacttgaggtcaggagtttgagaccagcctgaccaacatggtgataccctgtctctactaaaaatacaaaaattagccgggcgtgttggcacacgtctgtaatcccagctacttgggaggccgaggcaggagaatcgcttgaacctgagaggcgg

SEQ ID NO: 6360 - DNA, 6000 bp, Homo sapiens
ctgatggctcctttctgataggaaacagagagagagagagagagactgaccaacagacctacctatcaaagctgagacagggaagaaaaagtagggagggctcagccacagaaggcaagtcaatcaaaaaataaagaactaggctgtaatcccagcactttgggaggctgaggcaggtggatcacctgaggtcagaagttcaagaccagcctgggcaacatagcaaaatgccatctgtacaaaaaatacaaaaattagctgggcatggtgggttggcacacgcctgtaatcccagctactcgggaagctgaggcaggagaatcacttgaacctgggaggtggaggttgcagtgagctgagattgtgccactgcactacaccctgggtaacagagcaagacagtctcaaaaaaataaaaaatgaaaaaataaagaactagctgggcatggcgggggaggagagagaaggaggtgtacagcattgcagagagattaaagagtttggggatttggcatatgagatgctctgggacagttggaatgtggcaaagatttgagagtgcagaaggggatgtgagaagtgtttctagcttattcatcagtctctttaaagttcctacagagatacaaataaagaatagctttctttttaatatttcttttcttttttgttgttgttgttcgagacggagtcttgctctgttgcccaggtagagtgcaatggcaaaatcttggctcactgcaacctctgcctcctgggttcaagtgattctcctgcctcagcctcctgagtagttgggactacaggcgtgcaccactacacccggcttatttttgtatttttagtagagatggggtttcactgtgttggccaggctggtcttgaactcctgacctagtgatctgcctgccttggcctcccaaattgctgggattacaggcataggccactgagcccagccttaatatttattttctaattacttttttgttgccagactatgcttctttataagaagttcaatgcagaaatggaactaggagttgtcccagaattttttaggcttgcccatataacaaatattcagaattttgtgtgcatgtgccatggatttctatagaaaatttgcaaaatatatatatagagagggagggattttatttcttaccccatgaccaacttctcatttttgagacttccttttcctcccctcactcaaaggaatggaatttctgccaatgatgccttttcattatacaaacatctgttgactctgctgtgtgacaagcaaatgtggacctaaccttaatggacccaaatgctaatgggtgagatgcacatctaacaaaacctgaaaataatggctttagtgctgaaatggaagtagaggcaaggcaccagtcatactcacagaaaaggaagcacctgcctagtttccacggccagggaaggcttctgagaaaagctgagtcctaaaggataagtaggggtttactagcaggcaaaatagaggaagggatagggcatttctggcaacagaaatagcatgtgccaagatgcagggagaaagcagcacagtcccatcaggaacctgttgtgaaggttgtaggatataaggctgcgacaggccctaaggtgagaatgtggacaggtgacatcacagaaggctttgtatgccatgcagaggaattaaggcatatatcctgtaagcaacctggaggggaagatactgaagaattatagtaggaaagtgacttgatcaactctccatctcagcaatgtacttctgatggggatggcttcgaagagagactggaggtaggaggacaaagtagaaagtattgtaattgcacagaaaaaaccaaagcatttgtaaaataagacagtggcaagaggaagagagaggaggggtttgggcaaggagatagtttggtggtgagaaggaaaggaagaggaactttaaatcagattgggataacaaagataaaaggttttgggattattcttatattcctgatgtgggcaactggtttgtattcctcattaaatgaaatggagaatatagaaagaggaacaggctttggatgaaggtatagtacataatttggggattattaaacataactccaaggaacatccagctagaaagctcaataacataggagagacatcaggccaaaattatgtcctcctcattacccaacctccgctaccagtagatgtaagaaatacaaggtattaatgcctgcaaataggccatgcatgaatgttagagtattttacagactttgttttacccagtgataaaatgtactgggataggctcatggttagcaattgatgcataaactattaatggcgagatgtcattttcctaagaaattaacactttgcaaacttggtatgcaaacttgtgttaagagctctaaactggattaatctatcctggccaagctatacccccacactttacttttctctcctgaaaaagaggctattaggaccagttgaaaagcaatgaggtattaatgaaagagaggtcttaaaatctagtttttagctttgtatagagttttgttggcacctcccaacactggcgattaacctactgtgagttttataagggccagagatggaagaactaattaaaaggcagcaggcaaaattcctagagattttattgtttgaaagaggttttcctatataggcttaagtataaataccaacctatataggcttaaatataaataccaaccatcggaggatggttgagagagagttagaaacaaaaagacacaaaaaattactgtacttgaatctagagtttatgccagaacctacttgtctaaaattaaccatagtcttgtttccaaccattaataacatgcttctcatttttcttagacttggcatcatgcatatttaaatttacatttaaaagttcctggtaacctttggcacaagggttcctggtttggagataactcacatgttggtggattcatgcccaatccctctcactactgcatttctatctgctggtggatcaaagctagttgctcattttcaatcttaaatcaatccattttgtaattttcaggtgtgagtgagttgacatcagggtcctttttgatgaaagatttccttgaaaaaataagcaaactgttcaaatcaaaacaaagggtgttttgggactgtctcagaacatttcatagaaattaaattctgtaccttctaggttaacgtgctgtggtcctcacgatgtgtttggaaggctcaactggagagttattctccatcagtcctagatttctaacatttcctgttagtttacttgctggaggattaaggcaaaactggattaaaaaggaggagttggggaattaactgtttcctggcaagattagctttccaggcactgattcctgagaagaggtgttttttgttgttgttgtttttgtttttaactccataatgttgcctggacactagaacaggattccccttcccccatctcatgtttaatctgtagcttccccaaagtaccttgtgttagtactagggggagaatgactcacacgttgaataaattgttattaaagcatctgggctcaattgtgaacatactaatagtgaggaattggaaaaccaagtactggtgagggttcggctgctgactggcgaaatcacttgctgaatgtgaggcccaacatcctctaaaaataataagagttaatatgtgccgaatacgtcctatatccccagaactattattagcaccttgtataccatctcatttaatcctcatatttccaatgtagagcatgactatcatcaactatgttttgcagatgaggaaactgaggcacatagatgttaaataatttgcccaagttcatacagtcattaatggcaatttggattgaaattctggcagacagagacagcttgcaggctctaccctggtgggttctacgatattacctcctaagatgaagggaagggactggaggatcatgagggtccttcagccctactagtgtgtgtggaatggggagaggagtattcagtttctctgttgggaatgtgcagcattcagcaccacctcattccttcccatctatgagaatcttttgggaatagtcctcactattaggcctataggtagcattgccaacttggtttagttcccgtgccccataagaatacttatcagggccattcttttctgagcatgtgggttaagtaagatctcagtggtagtgggaccttggagaaatgaagcctctgaaatgttggccacagagaaaaatgctgcagtgagaagctgcaagctgcaagctgcaagctcccagctagctggcttgatggggaccacagtaaatcaggaggaacagtggaggctggtgtgggatctcgggggccagaacctggccaggggatgttgacccaaaaaaaaacagcagcagcagtagaaacaacaacagcaagaacaacaatagcaacaagccaggttcaggctaaaaaagcaggcagtgtgccaggaagggggccgactgagcagtgtgtggaagctgtcgtggaggtgaccgtggggggatgagaaaaggggaaggaaggaacagacagcaccagagggacttgaacaaagggagaagggggattaaagtcaaatcactgtcagcagcccaggagcagacaaaaccaccagagtaagccctgaaatggaaatgagagggaaaagaagcaagccgctaacagctaccaagaagaggaggaagtgggagatgcgctgcttcctgtagaaagaacgttgattgaagacaaagctgggtggggactagtccctgggctgcagccgctgctacacatactcacaacgctgccgccgcgctccgtgggcaactcctactactgctgggctgggctgggctgggctgggctgcgccggagctcgcctgcacagatcagctccggagaggggaaaaccacgctcctcggaccaagcctcgggagctaaggtaaatgaaacgttttccatgttgctcgtttttaattgagaaaaacgaccgtcgcttgtggttttaaggtccgatttctaagggatgatagagacatcgcttcaggactaggggaaatgattagattcttttggaagggtctttgagaataaccacatttatgacacatttgatttaaaaaaacctcatcatcagtgcttagatttgatgactaaacaggccaacatgctaaatacaagaagctgtttgtatagttctctcggaggaaaaccagggctgagtcgaaatccatctggggctgtgaagctgtggtctggtcatcggagcccggcagtccccttgttttaggggagtgagtggtgtaaaatattaattgcattctctttcttacacattgcactgggatatcttctgttttgcaaaaataatggctgtgatttggcttttgggggagttaaattcttttgtacttagattttgccaacaaaggcttgaattgcgtatgtgaggggcagtatttaccattaaaaaacagtgtcttcctccctcagcttgtgcagctgctttcaggataacctcagacacagctatcatttgccagtaggtcttatcctaaagttgcatccttgttcaaaggagcgtggcgggtttaaggccagtaacttgtccagaatcagatactagcatatgcatggattttatgtttatatgcattttattcacctctaggtcaaggtgcatgttagcctcggtgagggacaaaataaaaaagtgcagctgggttgtttccttacgcgaatatctggtagatagactgaagtagtaaaaccagaacatgatttttattctttgattttcttgagcaaaggatgttcttaatgagagcctgggtctatgacttgttcatatttatgaatgatatgtaaaagtacactaaataggtctagcagatgagaactgagattgtgagattcctctg

SEQ ID NO: 6361 - DNA, 6000 bp, Homo sapiens
gtgagacaactttgaggggccttgtcagcttctgagtttccagtcaggttagttaaggtctgtcattggaactatcacaacccaatttctctactcaatcctgtttctgttccttctttttcacaggtgtcaatctcaaaagcacttcctaataaatacgctacatatcctatcctcatctccatctcagagtctgcttttctcaggcaaccaaaccagccatagctgccaacaacttcccttggaagcttatgcaagctgctagaaaagctcagtaatcagtgaaccctcacaacctgtcatcaggttacaaatggattataccaccatttatttactctcaggtcatcacccaaagacgttttcaaaaaattcatgctgatcttttgaaagcgtattttctcaaattcctacacatacagagatcctgatcctgatttacacatggacagaagccaaagatcaaaatggaaattcttgctaggcaaaaggttggggaagcctgaaaagcaggaataagaatcaaacaaacatgaagattttattaaactacctgcaaatagcaaacagatgccaaaatatttgggcagaccaccacaagacattgtgtgaccccaaaaacacagggcactgacacatggtctgtccctggtggtagttctgcctcttgacttctgagcagatagaggaagtggcaggatctctcctttctctctcactctctggtcttctctgcaattctctttctccaaggcagaggcttggggaatccaaaagacctggatgccaattctagactcatcacataccagttgtgtgaacttaaacaagttattaacctctctgagtctcattttccttatccaagaaaagagagataaagaaaacttctgcagtgcagttggcaggaataaaaacattaatgaacatcacttacggagccacgcagagcatgccacagcacagtgcttaacattctcacctgagctgcacacaggaattaactggggagcttcaaaaaagatactgaagcctggagggcaaccccaaagagtctgatatcatcaatttggggtgctgaagcatcacaaaggtttaaagctctccaggtgattccaaagtgcagccaagattgctaactattgttctatgcagattatttcatttaagccagatactaccctaagagttcagtccaattatcccccttcaccctccttccctcctttctacagacaagcggattgaggtttagaaaggttagaagattatgcaagggtacacagctagcaaggggcaaagctgagatttaagttcacacagtatgactcccaggacctaacacatcatggccacacttctatgctaccactccaggtcctgaatgtgaacgaacatctagcatggtctctagcatgcagaacatgctccaaatttgagagctaagtttgtttatcatttgttagcatccctcctctccattccttgctcttcacaagccccagcccaaaatatcacttggagttcagtagaagtgagcaatggataagatttagaagcatagttagaatggatccagaaaaaaataaatgttcctttttccttcttttccccttcctagatccccaccataagcatacatttcttgtattagtctgttctcatgctgctaataaagacatacctgagactgggtaatttataaaggaaagaggtccaactgactcacagttccacatggctggggaggcctcacaataatggcagaaggtggatgaggagcagtcacgtcttacatggcagcaggcaagagagaacttgtgtaggggaactctcctttataaaaccatcagatgttgtgagacttattcactatcacagaacagcatgggaaagacctgcccccatgattaattacatttcatcagttccctcccatgaccacatgggaattataggagctacattcaagatgagacttgggtggggacagaaccaaaccatatcacttgttttacatttaaagtcttttaaaataattattacatatacaacattgaaaatatcagaaaccaaggagatatttttctgccatcccttctcaagtctaagtgaatgttttcatttgcctatgtcagcttctgagccttgtccatgagaatctatgatttttatgtttatattgccataatataattatatatttaaaatagtcatccacatgatgtcatatattttcagaagatttgtcctataacccaattaagcagcctggtacagctctgtagataatggaggtaattttaccactaacttagcctaagatattttcattaaaggtttcccttttaaggaaaaaatgtacttagcctggttactctgaaagctgatataaaaatgtataagcctgtagaggtcacacgacatgatgtttgcctttccttatctgttgtatgcccctcagtgcccacatgcttcatcccctcacccccatgcttggcacagagtaggagcgcaaaaactatttgacgcatgaacaaatgatacttttcttggttgtatggtgaaattacaaaatagaatttctcgggaactgggacagaagactccaaagttaggcctgagaacagggtagggtggacaccagcaaagcaatcaggaaaggcaaccggaaaccccatcgtaaaggccagctacagtggctgagaggaaacgtgtggtttcctgaattgcacttgttcaaaaccttcaaccttaaagcatgatgtatgtaaaccttatcaaggacccacagctggcccaacagtcacactttggggttgttttctttaaaaggtatttgtaatcttagggttcctaggataaatacggagttgtaagccactgtagcatgaaaataaagctgcaaagaattgaagtaggtatgcttcagaagaacaacccatgcaatatttttagaggaaggattcttaagctagtgtccattgggtctcctctgggtaccatagaagggcttcaggaaatggtgaacagcctgagattgatgtaaagtgtgtgtgtgtgtgtctgcgtgtgtgtctgtgtgtgtgtgcctgtgtgtgtgtgtgtgtctgtctgtctatggaggagaccacagctttcatcaaattctcatgtcttttggttatggggcctgctcttcctttcacttcattaagtcgagtggggctcttctaaacccattcttatgtgctaggggctagagatgggaatgagagagagtaggtagaagacaagggaactaactctatacaaggccttctattgagtcaatataagtgaaaggcttagagagtgtccaacctgcatcaggaccaataaatattagctcttattattattattacactatgccaaagcacttcaagttttctcaacctcacaacaaccccacaagttcagcataagtctcatattccattaggttgaacaactaacccagggtcacacagccagtggtggagttcagaactatctaattccaagcttagattcttcttttccaccctgtggcctgaattactggccagactttcagtctggaggcagcctctctgtctacccttcaggctttcacatctaaatcccaagggtcttgctctttccctgagtctgtccatcagaactggcatgaggcctaaaaatgagccgtttcaagcccaggcatcatctactcacttacataacaaaaccttagtcatcccactgagattccacactcaaagccaatttctctcacagggcatcgaatgctagttaaagatataaaatcacgcttatcacaattaactcccttgcctttatgatgcagccaagtcaaagcccaaacaggaataaattttttctagtagccacaaatcagaggagtgagaaagctctatgccaaatctaccattttctgatttcaaaatccatgctaaaaactgcagttaaacatcagctaccaaaacacccttctatcaaataagaatcatggtgattgcatgaattgagcactttctatgtacttgctctttacgtgttatttctatgcctcagaagagccaagcaggccagatagatgttactgcttgagaggctaagcaagtcccataaggtcacacacacagtgaggagcagaacctggactcaaacccaggcctatctgatgacagcaacagtgctgctaaccatgcccttccccccagctctctacagtcaatgtgattcatggcacccaggaccaacaccggctcttggctttcccacaaaccacttccctgaaatctggacaacttcttgggaggaggagtcatgggaacaggacagatgaactccaaaatagaagatcgggtgagaggtccggctctgctacttctgtagctctgtcaccacgggcagatcacttaactttccaaggcctcagtttcctcgcctatgcaatggagatgaccgtgaatgccccaaattgcgctgatctagtagagaagaggagctaaggctcaggggctttccagacgtgagttatctttacctttccttgactagctaattcaagacaactaggtagaagccctttctcagcctcccctcttcgctcatctttcgagttcttggccaccccagttcaaacaccagcaccattgccctcctctcaggtggctgctgcttaatttcccctccactttagtagttcttctcttgcctcgctagaaggactggtgttgggtgcttggaattctggctattttcctcctgccgttccgactcggcaccagagtctgtctctactgagaacgcagcgcgtcagggccgagctcttcactggcctgctccgcgctcttcaatgccagcgccaggcgctcaccctgcagagcgtcccgcctctcaaagaggggtgtgacccgcgagtttagataggaggttcctgccgtggggaacaccccgccgccctcggagctttttctgtggcgcagcttctccgcccgagccgcgcgcggagctgccgggggctccttagcacccgggcgccggggccctcgcccttccgcagccttcactccagccctctgctcccgcacgccatgaagtcgccgttctaccgctgccagaacaccacctctgtggaaaaaggcaactcggcggtgatgggcggggtgctcttcagcaccggcctcctgggcaacctgctggccctggggctgctggcgcgctcggggctggggtggtgctcgcggcgtccactgcgcccgctgccctcggtcttctacatgctggtgtgtggcctgacggtcaccgacttgctgggcaagtgcctcctaagcccggtggtgctggctgcctacgctcagaaccggagtctgcgggtgcttgcgcccgcattggacaactcgttgtgccaagccttcgccttcttcatgtccttctttgggctctcctcgacactgcaactcctggccatggcactggagtgctggctctccctagggcaccctttcttctaccgacggcacatcaccctgcgcctgggcgcactggtggccccggtggtgagcgccttctccctggctttctgcgcgctacctttcatgggcttcgggaagttcgtgcagtactgccccggcacctggtgctttatccagatggtccacgaggagggctcgctgtcggtgctggggtactctgtgctctactccagcctcatggcgctgctggtcctcgccaccgtgctgtgcaacctcggcgccatgcgcaacctctatgcgatgcaccggcggctgcagcggcacccgcgctcctgcaccagggactgtgccgagccgcgcgcggacgggagggaagcgtcccctcagcccctggaggagctggatcacctcctgctgctggcgctgatgaccgtgctcttcactatgtgttctctgcccgtaattgtgagtccccgggccccgaggcagcagggcactgagactgtccggccgcgga

SEQ ID NO: 6362 - DNA, 6000 bp, Homo sapiens
agagagcaagctcaccagcactgtctctcctttgcccctggcttccatgtagacttgatgcctagacccgtgggacagtagttggcttcgtattgtgttggtccagctaagcagcatctgttacgcagaatcctcccatagttccaggttagcattggccacaagggaaatattgcatgagatctgggaggcagcaaccaagcagcagccatggtttttatgctgtgaaggacaacacaaggcgtgaggaacattggcagttctcacgcattgtcgctgacctgctgcctcaccttgctggcatggggcagcaagactcacagttcctcctgctcccaccagatctcctcctatggcttcttcaagtcctaagccaagtgcatctgtagctcggtaaagggtgccagcatgttttgcaggacacctgtattattgaggctggagacagtgagagacacaggcagatccggtctgtcctaaaggacttcagtcattcatgaatttcagtttgttctcacagattccagtctgttcttgctatcatccacatccaactttctgccctgactgaaatcctgactgacctatagtgacttcagactcaacactagaaccgaagacaacaaacagccatgccaggactcctccaccaggtctcacatcctgcaaggtctagggcagcactgtccagtagaactttctgtgatgatggaagtgttttattgggcacctgagctgcccaatatgatacccacaagtcacacgtggctattgagcatttgaaatgtgcccagtgctgtagaggagctaagttgttactcttatttaatgttaattaatttaaatttaaatagccagatgtggctaatggctacaatattggtcaagggaggcctagtgcctaataataaattccatgttttcttaatcactcgtagtggctctgtttctctggttgaatcctgactgatacaggcagcagctgctagctacatggggagagcatggagacacaaagccagcattactaggaatcacagggctagaggaagaagcagcctggctcctggaagttcaaccagcctacaacctttgaacttcttagtaagaaaaaaaatagacccccagtgggcagtgaactatcactgtgtacttccaataaaccctgtctcttttcttggtggcttctgcttcctgccgtgaagtgtagaccttgtctcaaataccacaggacacagatggtgttcttaggactcaatttgaaaaaaaaatgtatttatgcatgcataggaatcataaaatataaatttaaactcgtcttttgaacgaggaaagtaacatcaataaaactatgaacaagaattaatgttagctttttgcccaagcaattctcctttccttcatgtttatctttgctttctcttgaagaatgacctaaaggaagtaacccaccttccacagtcctttgaattcatggatacataaatgaacactatgaactttagactttaagaagtgtatattagtcagggtttgccagagaaacagccagtaggatggatatacataaagatatttattataaagtatcaactcatgcaattgtggaggctgagaagtcccacaatctgtcatgtacaagctggagacccagtaaagctggtgacaaagtttgaaagtctgggagctgaagagccagtggtgtagattccagtcctggtctgaaggcctgaaaaccataagtgtcagcggcaggagatcaatgtccccactcatgcagtgaggcagagagtgaatttcaccttcccctacttttttagtctattcaagccctaatggattgcatgaagcccaccaacactgagaagggcatgtgctttactcagtccatcaactcaaacactaatctcctccagaaacactttcacagacataccccgccatcatgtttaaccagctacctgggcatcccatggcctagtcaagtcgacacataaaattaaccatcacatagtgttccccacatacaatggccccacaaacaggaactaaacaattagcaaagctctatggctcaattctagaattgagggtgttaatctgttttctgttaaggaactctaggctctatgtaaactgaaactgtatcaaaatgctgacactaaaattagaaatgggaagaagtagcttttaaaccacaaaattaactgggggtaactgacaagcaagattagacttgcacttaaaggaacaaacgtgatggtccagttgctacgtagcgacagcaaacttatcaactctcctactcagcaatctagcaacagggaacacagcaaactgctaaaccaaacacacacacacacacacacacacacacacacacacatatgtatgtattctgtccaaatgctggaagcaattaaaaggagtaatttgaacaagcaatgctgagcagcacagtaattaataggatactggcctcccaagatttatagggcccactctagtcttcctcttgtcacataccttaccacaggtgagacaccctcagggcactattcacccagaccccattacccctccattctagaccaccttccaggtacctgagatcatgaaatttcctgctcaaatgttggtcccataactcgcttccagggcttgatcaggcatcttccctaggtccatccaatcaagggtcatttgcatgtttgagatgcatattcccaggaccaaggtggctttggggagagagcttggttatcaacaactatagtgtccacatattgaactatactgtccacatattgaactatactctccacatatttctgtgcaagactccttgtggtgcaagactgagtcaggggttaggaagacaagggggcaggggcctgggggaggatcttcaactgcactcttgctctcgtattcacaaaaaccaggggccggcctgccaccaggtacccatccaaagaaaagctagagacaaatatataggaaaggttaaatagtaggtttttgttgtgaggggccttatgaaaattaaaaaggtataaaaatattcggaaaataagcactgtgcaaattcagtgaatctaaaatcccttatttaatagtaaaactgcagtgcagaattatgctataaatcatagtgttttcctattaagaaatacttctgatttaagtttgatgtttccccattgcttggggtgagatgggggaatgttggagtaggggaatagtcagagatggatggcaaagattggtaataagttgttactgacctgcagagtttacagcttgaaagaaaaactgtaggagttaagatcctctttcctaggaatccatgccatgagaagtttagggattgaagtagtgcctgctgacatgtgaaaaccggcctgtaaactttgcaagcgatccagtaaattatgcttgttctagtgggaaccaccccccccaactccgcattccaatccccaggccagaatcatcaaagttggcaaaaaatattcatggagagtaagcaggctgtagcaagataggctcttcagcaggcaatctttgcttcctcccacgttatgactgtctttcttgccagttccctaggcagatcagacccttcacttcccagttggcctcccttccccaagtgaatgtgacttcttacagaacacaattacctatgttgtctgccaaactggattttgttttgttttgttttgtgttaaatatcagcccattttcacgactctgcaattatgacaatatgtggtaggaaaccattactgtcagctccagtctgaaactggccacttaccaatacactttgccaggaacaagtctttctggatggatactacgtggttaacaacatgtaaagataaacggctaaacaaaatatcaacattttcttacaaggctcagcttaaggacagaacagtgatgtgcaatggttttcatgttgtatccacaaacacaattctgtataagacacactcctctttttttaatggttgcttaaacaagtggttatccgttatgctgttgacataggaaacggtgaaatgctagtaaccgaatcaaagcggcagtgcaacaggccgctcggtggtgcgcattgtgtggtttggttccttggatggacacacttgctttacgcttcatcccaatttttgtcccaacctcttagtgtatcttcctgggaatagtaaaaacaaagcaaaacattctggtcttacttcaagctgcctttgcactgttattcccttgttccgctcatttcacgggattgggttctcctaacttcattgtttggtgagttgctttgctttgctcgttgccccgatcttctgtgtattctgcgcagaccccgcaagtgctcctgcactccctcccagccctctgctggggcttaacgcttcccagccgaggtcagactgccgtgcgcttcgagtaccggaccccgaggaagcgagaaacgccgctcccgccggtcgcgggcagcttcagtacaccggcaacacgcgcgcctctgcccagtgccgcgcccagcgggtgctcagactccttctctccctccccgccggcgcgccccagggactcggaacgcccccgcgagtgtgacgcgtcctgcctcccctgcagctcgcggacactcgcacttgcaaggcctggccagcactcttgggcccgccccccgacagtgcgggggcggagacgacggctcccctaggctctggctcccggccttggccggcgcgggtaggcgcgggagcctcgagcgccgctcggatgcagcagccgagccgccactcggcgcgcggcgggagacccagggcaagccgccgtcggcgcgctgggtgcgggaagggggctctggatttcggtccctcccctttttcctctgagtctcggaacgctccggctctcagaccctcttcctcccaggtaaaggccgggagaggagggcgcatctcttttccaggcaccccaccatgggcaatgcctccaatgactcccagtctgaggactgcgagacgcgacagtggcttcccccaggcgaaagcccagccatcagctccgtcatgttctcggccggggtgctggggaacctcatagcactggcgctgctggcgcgccgctggcggggggacgtggggtgcagcgccggccgcaggagctccctctccttgttccacgtgctggtgaccgagctggtgttcaccgacctgctcgggacctgcctcatcagcccagtggtactggcttcgtacgcgcggaaccagaccctggtggcactggcgcccgagagccgcgcgtgcacctacttcgctttcgccatgaccttcttcagcctggccacgatgctcatgctcttcgccatggccctggagcgctacctctcgatcgggcacccctacttctaccagcgccgcgtctcgcgctccgggggcctggccgtgctgcctgtcatctatgcagtctccctgctcttctgctcgctgccgctgctggactatgggcagtacgtccagtactgccccgggacctggtgcttcatccggcacgggcggaccgcttacctgcagctgtacgccaccctgctgctgcttctcattgtctcggtgctcgcctgcaacttcagtgtcattctcaacctcatccgcatgcaccgccgaagccggagaagccgctgcggaccttccctgggcagtggccggggcggccccggggcccgcaggagaggggaaagggtgtccatggcggaggagacggaccacctcattctcctggctatcatgaccatcaccttcgccgtctgctccttgcctttcacggtaagtcactccctacgtttccacagcccggctctgctcagccttctcatgctctcccctgacgcctccaccctttccaccgccctacaaactttttgcaacttgtaaaaatatgtcctaatttgtaaagatctgtagccttccccactagtttccc

SEQ ID NO: 6363 - DNA, 6000 bp, Homo sapiens
tctaacatgtctaatcaggcatttattttctttcaggatttaacatgaagcaaaagtgacctggaatcttttctccttttattgccaaaatgcaaagaaaagagtctttagctctcagaaaaagactacatttaagagtgaaaataagaaaatgtgggagtttgaggaaaagtatcatcagctgtcaaatgtcatgaatgcgcagtcttggtcaatgggccacatgacccaaaactcattatcctccccaaagccaccaatatcaatacatgcaccaaatgcatcgacgcaatagttttctaccttggcctgtcaatgaagttattgaaactaaattgccaactcatttccattcttctgttcaatttatcacccgttttgagagctacgccaatcaattctattacacattttcctgcaactcctcacttgataatgaagtaatcaaaagaatcagggttttacctataaatattatttcacttgatactttagatgaatttcaggatccttgcatgcagtgtgcccttaataagtaattgctgaatgaatgaacaaagtattgggctgaatcacattattgtatatattcacaaagtaatagatcaaatcatatttttagtacagccagtcatgaattgattcttaaaataaacccatggtgatcattttataaaagggaagacaatttttttaatttggtaagaacacttatactttaatgtatgttttttaacctttcattttgaaataatgttataataaattacaaaagctataaaaataattcaaagagctccctttccatcttctgagggtaagttgcagatgtgatgcccctttaccacttcatatttcagtttctccttcctaaaaacaagaacactctactacataccttgagtacaacatcaggaaaataacaatgatccattttaatccattgaatccacagaatccactgattgtgccacaaaagtcatttataggttttggatcccattcaagatcacatgctgcatttagttgtctcatctctttagcatccttcaatctgaaaccatctttactatcatagtcttgacatttttaaagaatacaggccagttatttgatttttctttcaatttgcatttgtctgatgttttatcctaacttacatatttatgcataagaagtgacactacattctcagcatatcatatcaggatgctgcacaaggctgatttgtcccatcactggttttcatttatgtaaaattttaccagtcgattaagatgatacctcccaagtattacagctgcatgttaataagtatgctgtacttattaataattaatgatgtattaatgaacatttttagagatatgctttgagactatgtaaatatcctgttcctcatcaaacttttacccaccaattttagcatttattgatgattctggcctgaatcaattattaagatggtggttgccaaatggtggttttctaattctatcttttcttcttcatttattagtcgcattctactatagagttcccttctctgtttctatcagcatggactcatggactcttattttactcaaagggttaaatttgtcattaactattttactccttaaatagttcaagatttggccaacaggaaccccttcaagctgacttctgtcttcttttgacatgtctccataattctttaagtattttctcatttccttgcacaacaaattattctagtttcatccactataccaaggaactgtggttcctttcagtggaggatggtattaagaaaccaaggtctgagtgttaggtgtgttcattgctactggggtgccattgcttttaggccttctcagtcgacaaacctaggaaatatatcaccatatacacacacatatacacttatatttttctgtctatctatctataatctctttggatccaaaatcattttacaccttcatctccaacttcaaggcacatagctagatctcttgcctttctgtattggtaattcccttctccagcagtgagatgactggctccaattttcttaatgtatttacttctttgctcaattccctagcacataaaccaatctcttggccatgtcagcaaaaaatgtgtcctgtctctattacatacatatatatataaaataccccccacatacatacacatacatatgaaatcagatattttatgtataagaaaccatactacatagatatatcaggaatcccatataatacacaaaatgtatcaatatgaaaatacatatctaattcctataaatatctgatttcacatatttttttttaaagagaagtacacagtaaggctttcttctgatgagcctggagcctgctgtttatacttccacagtattattccttcatgctgtacttggccctcaaggagctgctagcctcagaaatgcagagttcccactgggtgtggtggctcaagtctgtaatcccagcactttgggtggccaaggcgggtggatcatctgaggtcaggaatttgagaccagcttggccaacatggtgaaaccccatctctactgaaaacacacaaaaaattagctggcaggcacctgtaatcccagctacttgggaggctgaggcaggagaatcgcttgaacctgggaggcggaggttgcagtgagcgaagattgcaccaccacactccagcctgggcaacaagaaggaaactacgtctcaaaaaaaaaaaaaaaaaaaaaaaaaaaaaaaaaaaaaaaagcagagctcctcaaagcggaagtttccctagttgctacctttcgctccatgtacagcctattctttaactgtgacaaacggccacagccagctccacaaccggcttgagccaagtattgagcctgaggaaagaaagattttatatttcagctttaataaacaactgggacatctgttacaattctattttcctcactaggctgggtatggtttctcttggttgcaggtttccccccaccccccgcctttctgtgtactaagcctaccataacacacatgtctgcttgtgtgttatcccattcgacgtgaaggcttcagggcagagactgcttcctttattatccatttctaatgttagaagagggtctaacacagagcaggtgctatttgtctattgaaggaaagaatgaatacatccattaatcaatgtagaatggcgggaaaagacacaatttgggaaggagactttactctttaacttctggacccatgtgaatgaggagtccaggtcatccatcgttaaaggcatttaggtattttatttcaagtatttttccccttttctggtgacatactacaattcaggactaaatctcaaatttattcttgatattgatagcattgatattgcacacaaatcccacggttaccgtccagcactagtgatcttgtcctatttccacctgcagctttttgaatctaagtacacatcgcatttcaaaactcccacgttaaagaaaggcatcagttcaagttactttctcattttctgtcttcgacttttttctgcttcccccaagaatatctgagagttacttttctcgaaagttcttttgtagtgttccagataggaatcatcctgtaatattccaaatgcagcgtgtggtgtgcatgttgaatacataaaaatgacgaggttaggaacaatatcgctgacggtcgcggtgtcccgttttaatttagagggcgccagcaacacgtcagtgagggagattcagaagccgccgggcacctcaccccgggccgggaatccctaagagaaccttgacgccgctgaagtttccggaccgggccagtttggaattgacgaaagcagcctccgcccggtcgagccagtctctcggttttctcggcggcttcttgaggatgaggcatttctaggttttctcctcctcgagcaaatcacggtctgcgccttccgcggctctgggaacaggtgagccgtgcggcggcgcccgcgggacgcgctcaggtgccggtccccgcccgccggcccctccctgcagcacgcggtccgggcccaggtgccggggcccaggtgccggcgcccaggtgcgcggggcacggggctgcagctccgctcggcatccgacagcgggcgccgctgcagcagctcgcgggccgcggagctgaacggcttcgcgagttggggcagctcctcgcgctcggccctgctcggcggcgagagctccgcctgggcgccgcgttcctacagccgccggagccgccaggcgccgagggaacggacagacctccgcgcacccttgccgaccggggcgggcagaggcgggcaagcggcgaacgcctgggagcgcggagagccaggccagcccggagcgcgccggggacaccctgtgcgccccgagtcccggcaccatgcgacccgccgcgcgtcctcgcgggcccggggcttcgctcttcgctcgctgagcccctgcgctcgccaccacggaaactcggaaagaggaggcgaggctgtggggagcggcgcggagacggactagacttcccctccgcccccaagaggctgccggtccccggttccctgggcttctccagctttatcatgaacctggcgcaaggttggctttaggaaaaattctggagccagagggagagtcaaggcaattctttggttgctaaggtaattgtagttgtgataaaaaatgggcaagaaacaaatgggggaaaaacatggtttaaaacagtatcctccctccccaccccattaatatgtgttgatttcatctcctgggtgtgggtgcttgtccatttcagatgcgtgacaggtgcccgtgtgtgtgtgtctgcagtttgggactgtggaagcacgagcttacataagtggttaggcaagctggcgtgtggacttgtgtgggatgggtgcaggtctgcatataaatcatgttcctgggtttctgggtgtgaagcgcacaccgacggggacgagagcgcagaggatggcgcttttagatacttccagtcttccgatgttgtgatcgcaggtagggcagctttgcctctaatcaggcgttcattaactttttccctgaacaagctcgcccatttgtggtttggaagaaaagaaagcgagtctccgcggtgaggtgtggagggcaggggcgggtggggaggtttgttgtttgggaactgcgctagcaaaggaagcggtggctattcgcttggagaggatgacaaatgaactggttgcgtgaggagtgaagagaccgtgtttacagtcaccagcaggctgcgtaaagaagtggcccagtgagacagggaaagtgacccagaaaatttagttttgttcagaatgaaagctgctgtatttcatttttgtttcttaatttgacggagtaggaacgttattttccttctctgtcattgagaccagtagcatttctatgttacaaactgaagatatttggggtctcgtcggcttgggattatcaatgcttgggaggtgagttctgatcaatacctttaacaaccccaaagaaaaacgcaaaaataatcaagtttaggtaaaacttccactggactttctttccagggagggtgagagatggaagaactgggcttgtaagtatcaaaatggagttagagaatgagctacaagtttgtgtgtgtatggtctgtcaaaaagtgttaagactgaaaggaaactgttaggtttagttaaatgtgttgacaacacggctcttacatatcaattttcataggcaaataggtaattacatagagtgggaactgggactatggtgggaaactttctgtaagatgtatattctttattcttaatttatcactttttcaatgggtgggactactctgtgaaggaaagtagagggctgagggacatttggtgagactcttgagagagaaacctttgcaagccaaatctcgcatgctatagatgataaattctaagttctttgatattgtacca

SEQ ID NO: 6364 - DNA, 6000 bp, Homo sapiens; identical to SEQ ID NO: 697

SEQ ID NO: 6365 - DNA, 6000 bp, Homo sapiens
aaatacaaaaaattagctgggcatggtggcgggcacctgtagtcccagctactcgggaggctgaggcaggagaatcgcttgaacccgggaggcggagcttgcagtgagccgagatcgtgtcaccgcactccagcctgggggacagagcgagactccgtctcaaaaaaaaataaaggggggggcggaattccgcttacaacaacagcatacataatatgatcctgttcatgtaaagtgggatatattgaagtacggacatatataacactatataatgaatatatgtaaacacacagaaacatggcatcaaattctttttttttttttttttttaatttgagacacagtttcattctgtcactcaggctgaagtgcagtggcgcaatctcggctcactgcaacatccgcctcctgggttcaagggattcttctgcctcagcctcccaagtagctgggattacaggctcctgccaccacacctggctaattttgtattttttagtagagacagggttttaccatgttggccaggctggtctcaaacccctgacctcaagtgatccacccgcctggacttccaaagtgctgggactacaggcgtgagccaccgcgcccagctggcatcaaattcttaatcatctccaagctgtacacttttcagttgattttcactttttatcatacacattaagttcaaataatagagaaacaatacatccatattatgtatatgatcagctgtttttttttgttttttttgttttttgagacagagtctcactctgttgcccaggcgagactgcagtggtgcaatttcggcttactgcaacctccacctcccaggttcaagtgattctcctgcctcagcctcctgagtaactggcattacagatgtgtgccaccatgcctggctcatttttgtattttttagtagagacggggttttgctatgttggccaggctgatctcgaactcctgacctcagatgatccgcctgcctcggcctcccaaagtgctgggattacaggcgcgagccactgcacccagccatgaccagcttttttaaaaagctgcattttcatttggggaaggggaagacatgccgatggagtcagacttggactcagctcttggctctgctgtttccactgtgcaggatttaggccaagttaagtaactcctctcagcctctgattctccatctgtaaaatggggatactgactggtaaccatctcatcaggctgttgtgaagggtcgtgtgcttacgtagggcctgctacagagatcacttggcagcgagtcgccatgcggggctagggctggggggctcatgcctgtgccagaggacagtgcccccacaggctgtgcaggaggcctctgggaagggaggccagaggcagagaaggcaggccagagatggcacgcatgggcacatgggctgggaggcgcattggggacgcagaggctctctagagttcttagctgtgagtgttagtgccaatcaggcaaaactacaggctctgcatgggttttgccatgaacccaaatcagcacttatcctctgaccctgctttccagtttccctgctggtctgtctgacctgtgtgtaactggtcagccttttgcagggcggctgctgattcacagaggaccagggagtgcctttctggtcagcactgtggcattctggacaaaagcacagcccgctcctggaggccgacgaatagaataatggccttcccgggaggacctgtgccttacacacagacatgtggagagaaagatctggaacattggggtggagggtggactttcataaacaaacatgtacacacatgtctacagcccgcttttatgctgttctgtttggcctggtctttccttcatcccagtaaggttggatctgggcacttttccctatagactgcttgtactccttgcagagggcacctcctatgtgccgggtgataaatagcaataagtaagacggggtccttgcctcgtggtgttctcagaccaccaagaacagttccggggtgtgttagaaaacaggcatgcaagaggtgcggacaagaccaggggcttcaggaaaggcccccaggcagcctcccaagagaagagcaggcttgattcaagcgagggcgagaaagggcatttcaggcagagattgccacatcaaaggccccgggtcaagtgcaatcctgccccactcaggagtgcgaggggggtctgtggggctaaagtacagagggctggccgtggctggggaggctgcagtggccggggaggagacagcaggaggaacagcttcttatcgtgccatgtgaaagagccctgcttagtggggcagggttttgccaaaataactggatccctcctgtggtccttgctgaacgcagttgggctgactcgaacctggaggctttacagggctgagccaccccctgcagaccccagccaaggagactgagtggtgaggagtgtgatgaggctgccgctgcagggactttgcaggggcgttgagacaaaccttctcatagcaaaaatgcagtacaaaagtgtgccactccagacataaactgggtgctactgagtcctcaaggaacactttgaaatcctccgcctggctctgcccataggcaggggactggcctcagggtaaactcctccgaggcacggggatgtctgaggcatggggatgactgattcattcacttctgcttgacaatgcactgcctggctatgtgggtatctgataaatgagtgtgtgggtggatggatggagggagggagggagggaggcagtgagagagggagggatggactgatggatggacagacagacggatggatggatggacggatggacggacagatggatggatggatggatggttggatggatagacggatggacagacagacaggcgaataagtaaatgaatggttggataggtggataggcaggtgggcggatgtgtgggtagataccagtgtagatgaatggaagagtgtgtaattgttttataagattaaaatattcttttgatggcaggacacaacacagtgacactcagataaatgaaaggtagaacttttgtttcttacagctccaaatgagaggctgtcaggctgggccacacaggatgtgcaactggggacagggtccaagcaagctggagctataggcggcagctatgtgtggcacgtagggtggtgttaacgaggtttccttggctccctatggattggctaacttaaataagtttgtgagttccagatgatgggagctgtccattattgtttggtacctggctccaaggccatcagggcaggtggctagtggcccagagtgtgagaacctggtaagagaaagggccagaatgtgaacttaatcagctgctcatgaactggctggcctccagccaggacctcaaaactggtttaaagtagcctttttaaaaaactatatgacagagatggatggagatgtgtgcagatggacagatgtcttttagagatttctgtcaatgatatttacagaagcatcaacattggattcagatccttgaggattttcaactcatagatacagagctctacaatatctaagttggaagagacttcagagggtctctggacgctcatgcaggtctcaatatgttgtggatctcagagctcttcaatattttagtgaaagctatagatgaggctccataggggataaagcacagacacaccttttcagagggcttgtggactctgggcagcctgtccatagacctctgtccccaactggcaagtcaggaaactccagattaaggagccccaatgtggttgaacagccaggtgcacagatgagtcaaccacacagccaggccagggagggccttcactcaagagcctacagccagttcacagccaagccagggctagcgcccaggccacccataaactgatctgagactctgtttccctgtctccatgatgatgggatcaggcttgattgctggtttgtaggcttgttatgaatcaagtcacagggaagaggagctgatgggctggggggacgtcctctggccctcctgtctcttccccagatccactgggcccactcttatctgttctcttctgaaggaagggttttaaggcttcaaaaaaaaatgttttgaaagtccctgccctttccagctcctaccgtctcagccctgggagtgtaaagtgctgcagatagttagtaagtctttgagcaaaactgagaaagccagcctgagccttgacatgggagaaacctccgccatacatctccgaagaaacggccgcgtgtctcaggggagcgcaaacacccgtacccaggaaacaggacagcttctgccactgtcgcccttgggagccgtacgtggcatacaaagaaatcccaggactccgcctgcccacctggccaccctctgtttacaccttccgcgtaaacgcccactgtttacatccaaaactcagacacaaaataaccacctcaagaagataaataatgataagaaataaatgttacgcgaggcaaatttattcacatggggcttcccaggccactttgtggtcagccgggagggacgtttttgccgtcccacgactccaacgggcagccgggctacgcaaacatggaaatcttccaagagcctccctggcccccagggctcagagggtggcagagcggagagcgaaggtggccgcagccttcccggccccacagccagcctggctccagctgggcaggagtgcagagctcagctggaggcggagggggaagtgcccaggaggctgatgacatcactacccagcccttgaaagatgagctgttcccgccgccactccagctctggcttctgggctccgaggaggggtggggacggtggggacggtggggacatcaggctgccccgcagtaccagggagcgactgaagtgcccatgccgcttgctccggagaaggtgggtgccgggcaggggctgctccagccgcctcacctctgctgggaggacaaactgtcccagcacagagggagggagggagggcaggcagcggggagaagtttccctgtggtcgtggggagttgggaaaagttcccttccttccggaggggaggtctgacaggcgatggggagaagggttcccagcaggaggaatcgccctgtttgtctgttgtaggtttctcttctctgaatcaaggtgacagacaggcttgtgtgtgtccagtgtgtgagggatttcgtgattggattttcacatactttgagtggacaccttggagtaaggcagcgaggtgtgtgtggtgcagcagggacgggtgctgggtggaggctccagaacctggcttttcacccacagctgtgccactccttggccctgtgtgaccctggacaagctattcaacctctctgagcctcagtttctctgtctgcaaagcagccagctcgctggctccctgggggtggcagggttaaatcagaagcaggcgggggtgggggggtttgtgaatgttggctgatgcgcctccaggaggcaggtggtagtgactacctcagatgggcttagagaccctcttcccacggtcctggctgaccagggcagggggataggatggtgcaggggttccaagcaccggctttgcatccggcccaggttgcagctccagccctgctctcaccctgtgggtgacgtttttgggcgagttattttgtcctgtctcctgagctataaagaagacctggaagttcctctttatgcaaagatagaggtaggctcttgcctgtgaagcaccacgtatgtcataggcactaaataaatggcagccgtgattcgagttgctgagagtaggtcgtttccgcagcctgggtggaggtgaacagcaggtgttgctgttccaggcaggtcagaatgtgcctcactgagtcacaggccgcctgtggctccccagcctacaggaagtgggagccctggcctgg

SEQ ID NO: 6366 - DNA, 6000 bp, Homo sapiens
tggaggctgagaagtcccaccatctgctgtctgcaagctggagacccaggaggaccagtgatgtagttccagtgggattgtgaaggccagagacccaggatggccagcgagaaggtgggagaagacagatgtcccagcttgaaaacagccaggcggagagaaccaattctcccttgctgctccttttggttgtattcaggcctccgacaggttggatgccacccaccatgtcagggaagacaatctgccttactcagtctaccaattcaaacattaatcattcaaattaacctaggaaggttaaactcgctcacggcccccccagaaaccatgtttaaccaaatatctgggcaccccatggcccagtcagcatgacacataaattacccatcccactccacctcgagcagaactcatttttttcaaacctcacactcagacacagcctcagaacttcattgccactctgctttctacaacatgttgtcactggatgtcagcttgtccctgtcctcagccatcccaagagctccttaagtgggcacggagtgggctgtgttcgtctatgcaccccctgtgcccacacagggcctggcccccacaaggggtttggcacatgtttgttgacataagacaagctattgctattatatacttatttgtaatacatagttatgaatacactcagcaaatatttgagcacgtgctacttatcagccctgttgtacaagttgggaagatgaacctaatcaaaagagataaatccgttgcctggtggagcaggtggcaatagggctgtgaagagcagtggagcaggccaagaggaggagaggttatttcaggaaaggtctctctgacaagggaggattggtgaggaccagaaggacctgggggagcaagcatggggctctcgatgggaaggtgctccatgtaggggaacggacagtgcaaaggccctgaggtgggagaggaggtggtacattcaaaacagagaggaaaggctgggcatagtggggagtgcctgtaatcccagcattttgggaggccgaggtgggaggatggcttgggcccccaggaatttgagaccagcctaggcgacatagtgagaccttgtgtcaaaaaacaaaaaacacagctcgaggaagccagggcagccaggcaccatgagacgagtgctctgggaggcggctgggtctgtgcatgtgccctgggagacagctgggtttgcgcgtgtgctctgggaggcagctgggtctgcgcatgtgctctgggagacagctgggtctacgcatgtgctctgggggacagctgggtctgcgcatgtgcaaccttgccgccgtaaggtctctgttttcctgggcctgagacagcagcagaggagttcgagaagagacatgagacggcctggcttcggctttaggagacagagaaatgcagctgattttcctggtacaagccccttctgagagcatgtgcactcctgggattctcgaggctccctaaagaggaaggtctcgtgatcccctgctctgcctgggcgagaaggctttcatctcccaaagcagggccacacaagggcggggaggaacccctggcccagtggagctttatctgctaagtgggcaccttcccaccccagagccagcacccaggacccttcacttctgggctggctgccaggccatggcagcacctggagctgcctgaatgcccaggacgtgctcatgtccaccctgtcatcctgtagatctccaagtgtttgtgctttgctaaatgtatatttgggattttctgcttacctccccccttacacttagacaccgtctgttcaccccatccattccccgcttcctatgtgctagacacgcatgctcttctagggtggcatttgcctggcaccagctgggtgctccatatgtgtttttaaaataaaggggaaagcactcaggccccgtgcttagagaaaagcagaggattacaccaggacttgagtgatggatgaacactgaacagtgcgaggaggaggaggtcattttcagcaaatgctcacaagcaggatgcattcagagcccatgagtcactcgctcagcatggagggtggctctgggtgttacagcaagaccgttggggagctcttgaattccaaggggttgggtcgttgtcctgtggcatgacaaaatccaggtgtttccagaatattaatccagcagaaggatagactgaaggaaaggaatcagaaagccaggagattggtttacagtcctttgttgcagacttgtatgtacgttgcatgagtttctaaaccctgtgatgggaagaaaggtgtgaccgccaacagccttggtcgggggtgaaaggacacgagctggaccacagtgagggtgctgcatttcatcctggcaagaattctgcccagctgtggctttctgtcctccgtctacaattgggagaatactggagacatcagatgtcgtgtaaggactaagaacgaaccctggagaggctcagcatctgggtgctatttgtagaggtctgctgggtgacatgtactagagtctttcattttgaagaacctgctggatatgactagaaaagtaaaggagaaaaaaactccaggactgatggatgagagaactgaaaagtggcccttgatgtcacagtgggcactgggactgcatgtccccaggggctgcaaactccagagctcaccttcccttgaatacacatccagtatggcccaagcccacgcatactacagggagtccagcctgcctggagtgccccctcactagtatttaggacaccccagggaaggttggcctgtcctctatttccagaggcaggcctttatcctctgtgaccacctcttcacccaagtacccaggggacttcatcaagcacagcacacatcagactgtaaggtttaaccaaaccttatagaggctgtgggaattacaaacaactaaattcagaaaaggcaagcattggccgggcacggtgtctcacgcctgtaatcccagcactttgggaggccaaggtgggtggatcacctgaggtcgggagtttgagaccagcctaaccaacatggagaaaccccgtctctactaaaaatacaaaattagctgggtgtggtggtgtgtgcctgtaatcccagctactcgggaggctgaggcaggagaatcgcttgaacccaggaggcgaaggttgcagtgagccgagatcgctccattgcactccagcctgagcaacaagagcgaaactcagtctcaaaaaaaaaagaaaaaaggcaagcgaagcctcagaagagggtcctcagtgcctacccacttcttagtcccctgctatcttctgccacactatagggacctgcttttctttcacagatttggggtcccctccccctgccctcagccccactcccttggccccagagacagtaggagaccctctgctcccctgagcccgggcctgtctcgcatttcccgtggagatgagcaacaaggggaaacgtgggtcttcttaaagaactttcctttccgccctccaccaccttggcaaggcagccagatgcatctccgaagtccagctcactcaggccagctctcttcacagactgtcttccagcaagaggcaaagcagagatgagacctgcacgtgctctttgtggcagagctggccttatacgcactcctgggtgaataaacagggagacatctcctaagaacaaacgcttctcagaaacagtatagtctaaactcatactgaagggagaataagccagccacgggctggagagacccccgcctacattactaagtaacaggaaaggctaagatttggagccttcctccggttcagatctatcccgggagtaatggaagatgcttgcctgttgacaatttttttttattaaaaatcccacccaggaggtctctcctgataggaggggaccatcctatcctctaaggcaaattccagcttcttccctgaaatgtacatccgctactgagcctcagaatgctatttgttccacctacttccacagttttaaggtcttcagcaacaggagaagacagcaggaaaacttgaagtgcagttggctcccgctgagatgtcactagcagaaaaagggaacacaagcaaaaggcaagattctaaagacagaggtgacaccttctgctccaaacatttggagggtcacctttccagaagtcagactcgaagtcctgaattctggcatgaatgagttctcctacgtgtagggggtggcctggaaagatcttaatttgtaagttgacaggtaaggggccttcagttggagaatcttgtcacctgattctcaaagccaaaaatatcttactgtctgaaacatgaggtcttgagtagttcaacttgacccatgcagacataatttgagagacgccaaggaggattaggaaaaaatgtatctggtcttactcaactctgaacattgcatgagtcaaacgttttcctagctctctgtttgtgtgatgggtccactctgatggattcttggcgatgtatctttcatgaccaaaattcaaaagaggccattcgaagtggctcccacaaaagctgctgcagagccccagacattcagaagccaatagtgaaggggccaaaagccatccctcaatgttcactgacactttgcgagccttggggcaagttggcgatgtcaaaacatgtttttagggcgtgtttgccaacatacaggtcttgggcaggattgcagacctctgcagatggtaccaaagtaaagggggagatggtagctgaataatctcttatcatccctaaagtgcaaagtgaaatgagagtggatttttccttccaaatccacttggagtgagtcccgaaagactcacttttgcggcaatccccacaatgacatcactggagcggaggttatataatttaaagcaaccacatctccacagcacttcccagaagagaaaactcctccaaaagcagctctcactatcagaaaacccaactacagttgtgaacgccttcattttctgcctgagtaagtaaatgaccaccttttttttttcttttatgagagtacaatatgagaggaaatctgtgtctcttagaaaaacaaaaaacttccttttacacctacctattggcaaaattttccacttctgtgagggtactttttaaaaataattctaaatcaatttaagagacttttatttcatgcctagtttgggtcttaattgcttttccagaacaggaggaggagggaaaggttttagaactcgtaggaaggttccagtagctccttatatcaaagtcaggtgaaacatgtcagggctgaatgcagccaccagagttcgcatggactgaccagttacagcctgcaaattctgaatcataaaaattaaattagtctctctgggatggcttacaagatttcataagaccaataactggttgggttattcgtggcttgaaagtagcatcttactatgtgaccgtgctgatggtctttaacatctgtggctgaatttccaatgcctttaacatcaccatgctgttgaaattggagttaatttgaagaattaactaatttgttgaagaaagtcacactgtctcatagcctaggttaaaatgtgcagaattcagaaaataccacacaggaattacagaattgccatctcttgtagacttgcccagtgccccttctgagttcttcaaatagggtcacatattactaacaatatccagagatattgtttattgagcacctactatgttccaggcaaatatcagagctaaagctgaaaactggcaaaggaagatttctcctctctagccaactttataaacacagacagcagcaggtgaggacaatccctttaaaaataagccccatgtgagcagacacatgctgtggctgcagtggccccagccacctccccgtcctggggatgggggcggtgtccactgacctaatcaggttcgagctaa

SEQ ID NO: 6367 - DNA, 6000 bp, Homo sapiens
ccagccttcaaccagatttcttgacagcacctttatatgtgattcttacaccaatcttcattgttaaccccattttaaagaagcagaaaccaaggcccagggaggctacataacttgccagagctctcagagccaaaaagcaacagatgtggaattcaaacccgggcattcagatgcccaagttccctgcactcccactctcccaaactgcctcagcctgagcaagcccaacctgaagccttcctcctggagtccaaagtccagccaggaatgtgacatgggctccccagccctccagatgtgtgtgctcacactttgtctggacttgttcctccttggccttcgaacgttctgccctcagatgtccccattagtcacagtctgtctgagagccctcggattagctggatgggagcagacgcaactttgtggtggtcatcaggttgtcccattcatcagctcaggcctgagcctgctggagtgtggtcgttgccagaaacaataactcttaggaaagaaaaccagcctctttctgcctgaaactgtcctgagaggtgcttgactcagcatcggcaattatttcccagaaggaaagttaccgacctgattcggcagccgcgtgctccgctctagaaagctcatggtgacgggaagcacaggacaggggtggatcagcaagagaaggcttgggcctgagcagagactgagatgagctggcgctagaaccgagggaggaagtagggactcattctgttgtttaggggataaagagagatttccgcgaaggctagccagctgtgctaattggaagaacgaagtggaaaaacagtgattttcaaaagtagatcatctgtgcacattctgaaatatatgcacatttttccattagtatgagtttgcagtgaggatgtatctgatgcatccgtttctgtatcagtcagactcagcaggaagcagatggcaccctcaagcagggtaactgatgagagtttaacacaaaggtgtggacagggttaagggatggtgccacacggtgggacggccatgcctcaggagctgttactagccctaggcttgcaggaagaaggaagagacaagtgcaggacagggactccaacaggaactgagctgacatcttcagccgagggaggcagccaacctgaagtgaccctggcagagtggataaatactgccgggtcttcactctcctcccatcctctgatctccagttagtgcttcctatcacccaaatctaacagacgctggaaggcagggtgccgggtgacatcatccttagagtagggggatggagactggatctggataggtggatagaaagtatgcagcacattgctggtgcaggagcctctttcacacattcctttggctgccattttctggacacctgcagtgtgtcactctgggtttgacactggggaaatgcagtgaatgagctgtcctcaggctctgtgtagagattctgcctttacagatgccaggataaaaagaaaatcccacaagtgactggaaaagaagaaatggatgcaaacatcactggcactgggggtggtgaatttcagaccatgtctctggagcccagcccaatgtgggagataatttctgtgggcgagacagatagttattagtgcagcatttccaatcagcatttcaaaagcgtaggtcataatttacattctctaggctcaggaaggttctggaagacaatatgtgcttaatttaccattagtgagctgttttgttgcttgtaaagccaggttttatttacaaaacaacaaattctgctgtctctgccaaggactggacatcttgacaccaagaaacatagcaaaatccagtcaaaagtgactttgcaagcagtatgatgaatttctatatggttctccagctccagcattttcttagggaaagcatggccagaaatgcccaagtctgtattttggcaacagcccaagcttctcagactccactggccagttccagatctttaagtaactataataagagccatgctgtctgtctctaaaaagtgaagcatgaatcaaaagtgactttgttttaatttaacagcattgagactgtgaaaggcactggatatgtttaggcacctgtaaacggagaatgtggggtgaaaaaagagaggcatagctgggtgcgatggctcacgcctgtaatcccagcactttgggaggctgaagcaggcagatcacttgaggccaggagtttgagaccagcctggccaacacggtaaaaccccgtctctactaaaaatactaaaaattagctgggtgtggtggcacacgtctgtaatcccagctacttaggaggctgaggcatgaacattgcttgaacccaggaggccgagattgcagtgagccaagatcatgccactgcactccagcctgggtgacagagggagactctgtctcaacaaaagaaaagaaaaagagaggcaggagacagggccaccaagtactggcacactgtgccaactccagggaccaccaactgatagattgcagcatgcacggcacccttgaggttgtgcagtgtggtagccctggcaggattcattctgtaatacattttctacagggcatgctctgtactcctgatagtcagagtcctcgatctggcaactgacaatgagctttaaaacagcccacctctttcctagagagataagacgaggcagaacagaatcattggaagaaacagcttcagagtcagaactcctgtcaagtcctggctcagtcacttgggaattgagtggcctcaggcaatttatgaaacctcagtttcctgatctgtgaaatggagagaataaaactacttgttttggagatgaaaagagatcatgcacaggcactaaggacacaggaagcatttacaagataagagcaattgagcctgcagtgagccgccactgtactccactgtactctgggggacgacaaagtgagaccctgtttcaaaaataaataaataaataataaatgataagagctgcaaataagaggatatttggaatgtccaatgacagtgataataacagctaacatctattgaaccctcatgtgtgctgggccttgagctaagggctttacttggtttaactcatgtaatcatcttagccctcatttgaagatgtgtctccatttcacagatggaaacaggcacagagaggttaaaagacttgtccagggtcaccctactagcgcgtagtacaactggaattcaaatgctgacactggctttcaacgccaaactcttcacaactacattcagtttggcaacttttagaaagcagatgtgaatttttatggcatagtcaacccagaaaattccacttgtgaggactttctaaggaggaatttcaaaatgaagaccagcagaggaggcttatccagcctcttagcctgctgggatgttgctggggtagtgcccagtgagaaaagcaaatcctcccgcctccacactccctgtgcctctctctgcctcctcctgctccccggccttcccccgctagggcaccttctgtcctcttacccactgtccatccttctggagattcacctagaggctaagtcacaccgtgtggagcactgagccacctagaggggttagcagaaggtgagatgtttgctctctttctccttctacctcccctgcctgcagttccaatcacccttcatccctaacctgcaaccatctgtcctgacaaccgcccaaccttctgcagactcttgccgtgacagttccagacattcatttcacaaataggaatgggggcaccctgctttgagcaggataactgggctgagagcaagggccctgtagagagacagctgtgtgccagcgaccccagcggcagtgcaatgctgggaaaggggctaagggcacacagcagggttcagcacacattacctggggcaaccaagaatgctccctaggggaagtgacttggggtcttaagatgggggcaggagttcaggaggtgggaaacaggaggtctatagagtggggagggccacaggagccaaggtatgcaattgtgaaagagcagaaggaaacagccaagggtggcttgggacaggatgtgggtaggaggagggcttctgtacccaactgcctggatttgaatcccgaggcctctacgtaccacctgtgtgaccttgggcaagttgtttgccctctctgtgcctcattcccctatgtataagatgggaataacaatactgtctacatcatagagccctgaacatcaaatgagttaatgtaattaagtacttaacaacagagcccagcacacagctgtgctcaatagatgcgggctgggactattattactattatctgtgaggatgtggggcagaggggcctaaggcctccttgaattatcaagaaggtcagtaggaggtcctctaagccatccctgcggcagacaggctccggctctgaggagcaccgggcagggacccaggaggctgcaaacctaagtgcagatccccaggctgggctggacaggctgaggtcagggcaggtgcagagaggcccagagctgcaacaccgcacttcatttattgcgtggctactgatttgcccgtgctgggcacacggacgtggtaaaggacagaagggctactcctggactgttctctgggcttctcaccctgcggttgtggtgagaggctgctgacagccagggcacccgggagtgggcgtggctggagaaggacccctgtccttttacagctaggcccactctgagccccacgcagtgttctagagcctgtccccccagggcaggatggtagtgggggcaggggtccctgagccattgcggcccttcccggcaggcgccaagcctaggggctgtggtcagcgtgaaaggcagggcatggaccctcactcagggctgcgtgtgcccgacgtgggtggggggggcgtggaatcggagcacaacttggccctgcgttcccaggaagggacccgaagacctccccaggccaccccgccatctgcgtgcgcgctggcaagaggaggggcgcggggtaatggtggccggcgccacagccccgcgccgcgcaggtaggtgtccccgcgagccaacccctttctctcgcctcgcctgtgggtccccggcgcgccggaccccggaaaccgcgcgcgggccaaggccgggtctcggcacctcccccggagcggccccgcgagcgcgggggaaccgggcgggccagtgcgggtgcaggcgcgtgcgcgtgcgaggcgggggcgcgccccaagcgaggccgccggggcgtggcgggggcgggagacgcggcagcggccgggaccgcgggtgtctgtccgcgagcgccggcgcggcccggtccctgtcccgggcggggcgtctccgcctgcggtcgccgcccgggttagcagccgccccctcggctggctccgcggccacctggtaattactcccgcccccacaaaaagtgcgagacaccgcgagcccttcatttcccagagcccggccgcaccggccattccgagtccgtttgggcctttacatcccccagatctgcgcggcccctcagggcagccctgagatcccgacagctccccctgccaccgatgaggggagagctggctcactgctcggtgggctggggcagcgccaggtggggtcctaggttgcaggccccccaccccccaactactccgccaagcaaatggcccaacggaggcagcagggtccaggtggtcctctgggtggtcccccagctggagaacaggggctgcggtggcgagagggcacaggcaggggagagagccctgccttggagccagaggctgtgtagctttgcgcaggtcacctgctgtggctgggcttctgtaaaactgagatgaaaatgttagccattgtcacctcactgaggtgtgaggctggtttgagagtctgcaaatctgagatgctatagttacgtttggctttac

SEQ ID NO: 6368 - DNA, 6000 bp, Homo sapiens
gtcttagtggtaaatatttgatatttttattggaaatgtttttgttagtttgaggggaagggtatgaagacagatctcaaggtaaagtcagagagggctgtcatcagtatgctggggagtttagggacaggaggcattggtaggggattagatgtagcagcagtcaggctgggatcaagatgcctgggggacatcttgatcttggcctttcagggcaagtgggaggccagaaaggtggctaggaaagaacagcattcttcaggtaagggtatagacttgggatgtgaggcgttatgctgaaaggttctgtcacgaggggatcagaggacagtggggaaattgggtgggttatctagcctgtactgtctgcaggtcctgaaatttgatgctgtcatagtctttgcagtgggtcggttggaatgattctgggggcagaagctcagagccccttagtaggaatggaggcggcccttctgctgccactgctcagccccctccactgcatgacgaagggtggaggaaattcccagcaacatatggcccaggccttgcagcagtgtggaggtccaacgaaggagctccctgaatggcagagacaagaggaaatcagatgatttggaaaacttgggaggaagccatcaagctgggagatgaggactttccacaagcaagagctaactaggggtaggtgggtgcaagaggacgaattatggggactatccaactgtaggggatggggcagtatgacatgttgatttctgacctgagtactttctttgggccaagtccttgaaagtcacaactcatagagtagagcccgtagaatgtggctttgacattcaggctgccaaagaggtctcgagggttttgcttgtacacgtcaaaggtgaatcgggcgatgtccttgctgtgcttgggcctctcccgtcccaggccatatgacagcactccactctgtaggacacccttgtcagtgcagtagatcctcataccagacacccaccactaatctccatcagcactgggtcagaccctccctcgcttggactttctgtccactgtgtgacatccttgacaattccacaactcctcctgcacctggtccccaggatcagggttaagctagagaggaagcccgggaaagctctaaaggacaggcattggaagcagccccagtataggcctcttacccttgtagggctccagctctgaccagactgcaacaccatcaggcacgtgtcatcctccagcagctggaagaagtcctcactgtccactgcagttccatcctcctctagcaccagggttagcactccattcagcagtagggtctccaatgcctgcccaatggcaagaagcaagaagggcaggtcttatcccatgccccttccctctttagctgcccaacatccatcagttggctctagacattggtcgatgtcccactttgactttccggcactttgatacctcctaaaggttgcagctctccgtgttcttcagtttttgggggatcctagctagaggctgacctttttcctctttgctcctaccatgtcattggcatctccccttgctcccctccaagtcacttctggtttggaattggaaagcaagccaggttctcacgaagtccacccttctgtcttatctacaatgctgcacctcacttcccacaccctcaagagttctccagaagtgttttcagtaatagtgtttaacctttttgagtccttactctgtgccaggtatgaggactttacctacattatcctcttactcctttcaacaaccctaggaggtgatgtattattattgcctttttatagttgaagaaactgaggttttggtaggttgaacaacttcccaaggtttgacaggcaggaagtggcagaatcagaatttgaacttgatttgtcacacaaatcacctttccatactagcttctgaattctgtccctcgaactctccctatctcctgctaacccctgctcccatagaaaagctcactcggtggaaaatgaacaaattgaccagagctcattaggcccactccgctgcttttagccctcagagggaggggcagctgtgtgacttcagccctctgctccatcatcacaagttgccactgttgtggagccccttggctacccctgctataggaaccgaggaacttggcctacttactttggctagcagctcctggcgggtggcagctgtcaggcctttccggatggtccgcttgtgatcacagacacggaaaggtcgctggggtggtggagctgaggtccagaccctccgtccaaactccgagcttatattagatactgacctggtagttgagaagaaaagtcaagaaggggcgaggaggggcttggtgagtgtaaagggcatgatgagggtagagtggctagagggctagggagggagagatctaggtttatcgattagggatgagggagagaccatggagtgcaggtgggggcgggtggctcaggagcttgacaagcccactgtggagtggggagcaggagaggaaggggtactggttagtctcctaggggctgagtggagtattgttgccctgcctatatcccctaaaggtggagggtagagcggagggttagcagtcacctgagtaagtcactggggttcagagctgagaggtactccatggtggaccggagagttccttccctggaacttctgggctgggtggttctctcctgtgctggggctttagtggtgttttctgttacaaacctgggatctcagcccaggacaaggtgggaatgagtcaagcctggactctggcccccctgcctggccagtaagaagggcaaagtccaaggggagggatgagggaggggccagatggggtcctggaggaagaattgcctggcaaaagccattggagcttgtatgtgtgtctttggtgatgacatgtgttgtgagggtagatgggaaccatgtaaaaggatgaaatgtgacttctggtgtttttttatttctatggagggaatttctggggacggtttctggctctcaggctctgagaagctgcagtttatgagtggctctgtgtgtgctgccacctactggagaagccataagctgcagctttaggaaaagggaacccggggcagagtgtggggaagtgggatggcagcatggcagggctttggaaaatgagaggtgagactgtgtccaggaagggtgtaaggagaggatggatcctgatacatggattcaggatcattagggtcctgtctgggacactggccttcctgcttacctgctctttccttcctccttggtcggaggaggggctggctcactgctctggcttcattttccagagctgcctgctgcagtcacacttaggtcatcttctctcacttttctccttttgccgattagtggacgtgacagagatgtgaatggggcagggatgtcctttgatggcatcaagactttagcttctggtgcgctgtgtcccagctctgatttcagttgcagccgtgatggacagttgcatggaagctgagactctcactgacagtgaaaccctcaaatgaacacaatccctgctttcctgccaaggatccttgtagggtcccccagcttccccactttttttctgtgtcctgacaaagaaacacagagtaacttgattgccctgtgacctggccagttgcatttcccctgcaggcttgagcccaagccagagccttgaaaaggtattcaggttgttgcccaaaacactgaaaaaaactggccctggccctgaaccaaataccttgaaccctcgtaaactccataccctgacccccttgttttggatatacccaggtagaacaactctctctcactgtctgttgtgaggatacgctgtagcccactcattaagtacattctcctaataaatgctttggactgatcaccctgccagtcttttgtcttgggcaatctatacttttctcagaggttcccaaggcctactgaagggacttaacatactcttaatggctttcctctctcttgttttaccttatgccctcacttcctgagttaacctcccaaatacaggatcacctgtacccaagcccttagctcaagaatacaggatcacctgtacccaagcccttagctcaagctctgctttggaagaacccaaactaagacagtgctcctggtgccctccccaagcaacctcaagttctggctgttacttgagcagaggcctttcttttcccttcccccagctctatccatctgccaggcccccctcaaatctcttcatttccaagttttgcttgacttttccaagaggagagggctgcttcttagtatgtccctactcatcctttcctttcttgtcttgtatcctggtgcagcctggtaatggggcctcttcatggttgtgtgtcatgactccctaaccattatgcctccatgcatcccctgttcctcctggaacctagcaccatgccttacatggaaaagctgtcattgacagcccggtgagagccctgagggtggagtgactggggcagggcctgaggcaagaggtgggaggaggtaggaggccaggggctcagccggaccaggagactggaaacaggcaaggataaggcaggtgggggactgagttgtttgggtcacctctgcaggccagagagaccaggcaacatacacactgcagaaggtgggctgggaggattggggccagagctgggggagggatgagaacagaagcaggaccaggattcagcagagtcctcctatttccttccaccaccagggaatcttactgccccacttcagcttgtgctgtttcctggcaaggcaggctctcacatgcctggacgcctgggtgcgttggtgatgggaaggagcagggtgagggaggggccccaggagaggcccaggatgagcctcatcttgtccctccccattcttgtcttaccctctgcaaatgtgataggcacaggacaggagtaggcacctcgcctactgctgcttaacctttcagcttctccaggcccccaatcctgcttgctcccagcttggtaagtagatctgtgcacgtccctttacaccccaccatccagttttgcccagatgtgctagaatggggctggacaaagaaggaggggccagactagaggagtggtggtagagatagtgacagcctggggtgatgactttatgcctgtttaccactgagctctgggaaggaggccaggagtggggcaggtcaactgactgggagcaggggatctgggttccaagaaggagttgtgtttgaggtggggtctgggtcctcgtggaagtcaggactcccaggcagaaaagaggcaggctgcagggaagtaaggaggaggcatggcaccttctcatcgggcatcacaggtggggttttgccccacccctgaacgccctctgtggcgccttccacccacctgtaggcccagaaggatgtcggtctgctaccgtcccccagggaacgagacactgctgagctggaagacttcgcgggccacaggcacagccttcctgctgctggcggcgctgctggggctgcctggcaacggcttcgtggtgtggagcttggcgggctggcggcctgcacgggggcgaccgctggcggccacgcttgtgctgcacctggcgctggccgacggcgcggtgctgctgctcacgccgctctttgtggccttcctgacccggcaggcctggccgctgggccaggcgggctgcaaggcggtgtactacgtgtgcgcgctcagcatgtacgccagcgtgctgctcaccggcctgctcagcctgcagcgctgcctcgcagtcacccgccccttcctggcgcctcggctgcgcagcccggccctggcccgccgcctgctgctggcggtctggctggccgccctgttgctcgccgtcccggccgccgtctaccgccacctgtggagggaccgcgtatgccagctgtgccacccg

SEQ ID NO: 6369 - DNA, 6000 bp, Homo sapiens
aagggagagattttctggagttattggggaaatcttcatggaagaagtaggcatacgaatgtagaagaagctgtgtgcaaaatgttagcagggattgtcagaaagcagaaagatctgctaggcacacgattgctgtgactcattataaggcacaggacaaggaagacagccacaggttagaaaggaggaatgttcatgaagattaagtcagggacattgagactcacaactcagtagctcaggagctgtgggacctggggcaaacacttaatgaagcctccacttcacatatttaagatgagaatgataatagcttgtgacccataatgttgttgtaaggattaaataagataccgtatgtaaagtggttagcacagttctgacacatagcaagggctgataaatattagcaattattctaattactgctgggattctgacactgttggagcattgcccacaggagattgcagtcttgttgaggaaacaagataaaacacataatatattttaagaaggaaaccattcagaatcaaatgttcaaatataaagatatgagcagctctaagttattaaattttcctagtatagtacttcctgtatcataaaaagattttgaatattcatgctacatagttgtatgtgagtgttgcaaacgggtagggatgaacggtgctgcttctcctcgtaacaaatgagttttagatatcactgatttactgtctccactgcctaacagctaagctcctgtttggtgtaacaatgactatcgctcaaacaagaagaaagaatgaagaaaaaaagtgatctcaattcagtctgaaagtctgtcctttgttttcatgtgggagagctaagacataaacaggctgtttcctttcattttgtcatagaagcatttcataaagaatttcaatttcaacctttggaacaaagcccacatttgagtagtttatatgcagatggctgtggcttaatggcaacacattcgagttcaagttctttttctgctgtgtgctttgctctatgatattgaacaacttatataatctgctgagcctcaatttttcatctataaaaagaggataataattcttacctcaggattactgtgaagatcaaaagaggaaatttaactcaatgtctggaacaaaataaggataaaataaaaatatttttgtaagtactgtaatgtctattaaaaagtgagactgatttttacatacatatcatgtattgggttgactagtgtcccctaaaatttatgcccacctggaatcttagaatgtggccttacttggaaatagggtatttgtagatgtaatcaaattaagaggaatcatactggattagggtaactctaactggtgagatgggaaatttggtcacacagagaggagaatgccacataaagacacagacactcaggagagaattccatgtgaaaatagagacagagattggagtgatatgtctataagccaagggataccaaagattgccagcaaccaccaggcactaggagagaagcatggaacagattctcgctcagaccctccagaagggaccaaccaagctgatgccttgatttcaaactgctagtctctaacagaataaatttctgttgttttaagttacccagtttgtgaggacttgttcaagacagccagaggaaacaaatacacaaaccaatacctgtacctctttgtgtcaattagggttggctagatgttgtggtagtaacagaaggtgccctacccttcattcttaggggtttgcaatagcacagtcacacttctcactcctaccatatgtcaatcataaatcagctgccactccacaccatgtcaccttcatcagggatgctggcagatggagcagcctctgtccagaatgttgcttctatctgttctgtggcaaagggaacagagaccccaaaaattcaacggtttatgggatgagaagaggaaactgatttctctacccaaccagtaaatcataaagttgaagtagccttaagtaaaaaaggccaggcacagtgacttacacctgtaatcccaggactccggaaggtgaggcgggaggatggcttgaggtcaggcgttcaagaccagcatgggcaaaatagcaagaacatttttgaaaaaccagctaggcatggtggcatgcacctgtagtcccagctactcaggaggctgaggcaggagtgacaaagctttaatcaactcagccctgggacaagaaacaaatcaaggatattgccactatgccatttgttaaaacctctgcatcaattaagagggttcctcataaattatttcagtcggacgaagtggtatagaggaagggacatggcaaactgtgcattggctcctaaagtttctgcccataattgatccacataaattctgctcacatctctctggccagagcaagcttatgtcactgggcaagtctgatgtcatcatgtgggcatgtatgtcccacttgtaggaaggggcagtgactatctttagtaataatataattcacccaaatcttaaattagattatcctttcagtagttgctttgatatcctttcagtagttacttgacaggcgttcgtagtagtacagtggtgttgctttcatgtggaaatgtgttattttatgtaaaaatttgaccccaaatggcattccccaggttgatcatttacctagtccccagatgtagctatagatgacttttagtttatttcctgaaactaaatccacgctctaatgtagtaaaaatttcctctggtgaagatggttgaaggaaggtactacagggaactcataacaagcagctacaaatatgttgtaagaaatgacagcatcgccagaatcagtgacgacctcccagtgaaatatcactaaagggcacaatgcttggttaaagtcacaggtataaattttaatatatatgaagtataaaaatatgttctatatagtgtgtgtatacatagatatatctcctgctgcatctgcttaaaaagggaaattgacatggttttaggcatccctagcacaattcctgaagcagagagtcacgactacaaaatgataataatggctagcctgtgtggaaagcttgctatgtgccagacactaaatgatttacagggattttttcatttaacccttgttaccagggctgggaccagggtggggcaatgagatatcggagcacaaaagtgaaggagggccgggcacagtggctcacgtctgtaatcccagcactttcggaagccgagacaggtggatcacttgagtccaggagttcaagaccagcctggccaacgtggtgaaaccctgtctctaccaaaagtacaaaaaattagccaggcaccatggcacacacctgtagtcccagctactagggtggctgaggcaagataattgcttgaacccaggaggcagaggttgcagtgagccaagatcaagccactgcactccagcctgggcaacagagcgagactgcatctcaaaaaaaaaaaaaaaaaaaaaaaaaaaacaaatgaaggagacagccacctgcggggctatggaagtgcagggttgacacctgcatgcccctgccagcgagtgcctccttcggttctgcaccctaagtgcctcactcaccttaacctagtcccagacttgctggcaacaatcctgtaaggtcagtgtcgtcaactttcttctttgcagatgaggaagcagaagcttttagaggctgagtatcttgcttcatggagcaaggatttgatgccaggacattgggctctaaagccttgggccttgactgactgtaccagactccagtgttggttgtttttgtctccctttccaggtgtccaaggcagctgcagatttgatggcctactgtgaagcacatgccaaggaagaccccctcctgacccctgttccggcttcagaaaacccgtttagggagaagaagtttttctgtgccatcctttaagtctttgagaggggcctgaagagcctccgggctcctgggacattgatgtagagtttttagtgaagtgggcacctttctagtccacggcatttgaagagagcgaggagaaccattctggaaactctaggctatgcatgtttaaagatctggtcccctttatgagaatgcaagccgatccacatcctgacttaagagatctgattctgacgaactgcctggaggaggggaatatataaaaataaaattggtgtcacttcttttctgctatcccccagccccccccccaaaatcctcatgtttctgcttcatattttgaaaaataacaattaaaacagacagctgtactgaggtaagatatgtgtgaccttcttggaatgaatattgtctttagaataccctttgataagctgagctgtcccgtgtagatgcaattcggtttaatggcattgatgtatagtcactgtgcctttctttttctttcttccttctcctctacccctccttccacccctccccattagagtagtgtggagataaggctggactggtctatcagattgaactccaagaatgatcacacaaaatgtttagggagatgttccccgtggtgtatcctcatggtaacaacgacaaaaaatgccggttgtctgtgttctcttttcactattcctaacatgtgtacatgatagctttgattctgcaagtaaaagtaaatcctgtgttgtgactggtgctttcatatatttgtgacaatttttgagtaatattgcatgaaaatgtccctatgttacatccattcagaagttttgttgttttactctaaagctgggaaaggaaatgagagggaaaagaccccggagagggaagaaaatctcagtattttgaaaattgagattacttcagagccttagccacacctaaaatacctcctagttaatagtggtataaatgcctcttcaatacgttttccagaatccaaagcattttggtttatccaggacccagggcagcacagctgtcaccaagcaggagagttaaggattcaccatgagctgggaaatgcttttgccatgagtatgagcaaattccctctttccctgaatcatggacattctagattaaaagaacatttttttgtgctcttaacaagaaaaccatggccctcctttgttcaagtatcagaagaaataaacccacagctccagagaaggtgaccattctcagaactccagctattcactctccagggagaaggacctcaaatcgccactctttgggcggcaggtgcggtccccacggccggctctacgaggaagagttctggctcttttgtccactgagatggtcttggtttttcacttaacaaattttttaatggaatctttgtttttgttctccatcttgtttgttagagtctctcggcctttatttacaaattccttgcaactagagcgctccttccccaagatatggtagtgagagtaatttttcattgtagctgtagtctccatcagtaacagcaggccctggaagacttgatcacctttttctgtgtcattttcagtcaaagagggcctctcttacatcttgtttgctttcaaatccccaaatatcatctccatctcccaattaattttattgtctctttcctctctattcgctttctcctgttttttttttaaaaaaaaagcatgaaaaaggaagagaaaaagtttgatatgccaaggacagattttgaaacagacttggtaaatgttttccttagctccttcatgggcatgctggtgaaagaataaatacatccaattaaagctcatgctggggtcggggagaagaggatactgaaacatttgtgaaatgtatgaatgcacttctgtaaccagatacttctgttcttctgttcaaattgtggggtttttgttacagttaggacgcccatgaagatttaggggtgaaaaaaacagcagagtatttattaaactacagcattgtacaattagcttagtaacactatg

SEQ ID NO: 6370 - DNA, 6000 bp, Homo sapiens
cttgttcaaaagtagatgccctggttccatcattagaaatcgtgacttatcaggtctgagatgaagttcaagaatcctttttttttcttttttttttttgagacggagtttcgctctgtcgcccaggctggagtgcagtggcgcgatctcgactcactgcaaactccgcctccctggttcatgccattctcctgcctcagcctcccgtgtagctgggactacaggcgcgcgccaccatgcccggctaatttttttgtatttttagtagagacggggtttcaccgtgttagccaggatggtctcgatctcctgacctcgtgatccgcccgtctcggcctcccaaagtgctgggattacaggcgtgagccaccgcgcccggccaagaatcctttttttttaaacctcagaaatgattaccatctatttaagaaacagatccaattttgtttatttttaattttttagagacaggatctcactatgttgcccaggctggattcaaactcctggactcaagcaatcctcctgcctcagctttctgagttagctgggattgtaggtgtgtgccactgcatctggttgttcaagactctttattgctaagttttaataagtaccccaggtgttactaattctgtgccctttgagccattctctgaaagaaccaatttctaacatgtctaatcaggcatttattttctttcaggatttaacatgaagcaaaagtgacctggaatcttttctccttttattgccaaaatgcaaagaaaagagtctttagctctcagaaaaagactacatttaagagtgaaaataagaaaatgtgggagtttgaggaaaagtatcatcagctgtcaaatgtcatgaatgcgcagtcttggtcaatgggccacatgacccaaaactcattatcctccccaaagccaccaatatcaatacatgcaccaaatgcatcgacgcaatagttttctaccttggcctgtcaatgaagttattgaaactaaattgccaactcatttccattcttctgttcaatttatcacccgttttgagagctacgccaatcaattctattacacattttcctgcaactcctcacttgataatgaagtaatcaaaagaatcagggttttacctataaatattatttcacttgatactttagatgaatttcaggatccttgcatgcagtgtgcccttaataagtaattgctgaatgaatgaacaaagtattgggctgaatcacattattgtatatattcacaaagtaatagatcaaatcatatttttagtacagccagtcatgaattgattcttaaaataaacccatggtgatcattttataaaagggaagacaatttttttaatttggtaagaacacttatactttaatgtatgttttttaacctttcattttgaaataatgttataataaattacaaaagctataaaaataattcaaagagctccctttccatcttctgagggtaagttgcagatgtgatgcccctttaccacttcatatttcagtttctccttcctaaaaacaagaacactctactacataccttgagtacaacatcaggaaaataacaatgatccattttaatccattgaatccacagaatccactgattgtgccacaaaagtcatttataggttttggatcccattcaagatcacatgctgcatttagttgtctcatctctttagcatccttcaatctgaaaccatctttactatcatagtcttgacatttttaaagaatacaggccagttatttgatttttctttcaatttgcatttgtctgatgttttatcctaacttacatatttatgcataagaagtgacactacattctcagcatatcatatcaggatgctgcacaaggctgatttgtcccatcactggttttcatttatgtaaaattttaccagtcgattaagatgatacctcccaagtattacagctgcatgttaataagtatgctgtacttattaataattaatgatgtattaatgaacatttttagagatatgctttgagactatgtaaatatcctgttcctcatcaaacttttacccaccaattttagcatttattgatgattctggcctgaatcaattattaagatggtggttgccaaatggtggttttctaattctatcttttcttcttcatttattagtcgcattctactatagagttcccttctctgtttctatcagcatggactcatggactcttattttactcaaagggttaaatttgtcattaactattttactccttaaatagttcaagatttggccaacaggaaccccttcaagctgacttctgtcttcttttgacatgtctccataattctttaagtattttctcatttccttgcacaacaaattattctagtttcatccactataccaaggaactgtggttcctttcagtggaggatggtattaagaaaccaaggtctgagtgttaggtgtgttcattgctactggggtgccattgcttttaggccttctcagtcgacaaacctaggaaatatatcaccatatacacacacatatacacttatatttttctgtctatctatctataatctctttggatccaaaatcattttacaccttcatctccaacttcaaggcacatagctagatctcttgcctttctgtattggtaattcccttctccagcagtgagatgactggctccaattttcttaatgtatttacttctttgctcaattccctagcacataaaccaatctcttggccatgtcagcaaaaaatgtgtcctgtctctattacatacatatatatataaaataccccccacatacatacacatacatatgaaatcagatattttatgtataagaaaccatactacatagatatatcaggaatcccatataatacacaaaatgtatcaatatgaaaatacatatctaattcctataaatatctgatttcacatatttttttttaaagagaagtacacagtaaggctttcttctgatgagcctggagcctgctgtttatacttccacagtattattccttcatgctgtacttggccctcaaggagctgctagcctcagaaatgcagagttcccactgggtgtggtggctcaagtctgtaatcccagcactttgggtggccaaggcgggtggatcatctgaggtcaggaatttgagaccagcttggccaacatggtgaaaccccatctctactgaaaacacacaaaaaattagctggcaggcacctgtaatcccagctacttgggaggctgaggcaggagaatcgcttgaacctgggaggcggaggttgcagtgagcgaagattgcaccaccacactccagcctgggcaacaagaaggaaactacgtctcaaaaaaaaaaaaaaaaaaaaaaaaaaaaaaaaaaaaaaaagcagagctcctcaaagcggaagtttccctagttgctacctttcgctccatgtacagcctattctttaactgtgacaaacggccacagccagctccacaaccggcttgagccaagtattgagcctgaggaaagaaagattttatatttcagctttaataaacaactgggacatctgttacaattctattttcctcactaggctgggtatggtttctcttggttgcaggtttccccccaccccccgcctttctgtgtactaagcctaccataacacacatgtctgcttgtgtgttatcccattcgacgtgaaggcttcagggcagagactgcttcctttattatccatttctaatgttagaagagggtctaacacagagcaggtgctatttgtctattgaaggaaagaatgaatacatccattaatcaatgtagaatggcgggaaaagacacaatttgggaaggagactttactctttaacttctggacccatgtgaatgaggagtccaggtcatccatcgttaaaggcatttaggtattttatttcaagtatttttccccttttctggtgacatactacaattcaggactaaatctcaaatttattcttgatattgatagcattgatattgcacacaaatcccacggttaccgtccagcactagtgatcttgtcctatttccacctgcagctttttgaatctaagtacacatcgcatttcaaaactcccacgttaaagaaaggcatcagttcaagttactttctcattttctgtcttcgacttttttctgcttcccccaagaatatctgagagttacttttctcgaaagttcttttgtagtgttccagataggaatcatcctgtaatattccaaatgcagcgtgtggtgtgcatgttgaatacataaaaatgacgaggttaggaacaatatcgctgacggtcgcggtgtcccgttttaatttagagggcgccagcaacacgtcagtgagggagattcagaagccgccgggcacctcaccccgggccgggaatccctaagagaaccttgacgccgctgaagtttccggaccgggccagtttggaattgacgaaagcagcctccgcccggtcgagccagtctctcggttttctcggcggcttcttgaggatgaggcatttctaggttttctcctcctcgagcaaatcacggtctgcgccttccgcggctctgggaacaggtgagccgtgcggcggcgcccgcgggacgcgctcaggtgccggtccccgcccgccggcccctccctgcagcacgcggtccgggcccaggtgccggggcccaggtgccggcgcccaggtgcgcggggcacggggctgcagctccgctcggcatccgacagcgggcgccgctgcagcagctcgcgggccgcggagctgaacggcttcgcgagttggggcagctcctcgcgctcggccctgctcggcggcgagagctccgcctgggcgccgcgttcctacagccgccggagccgccaggcgccgagggaacggacagacctccgcgcacccttgccgaccggggcgggcagaggcgggcaagcggcgaacgcctgggagcgcggagagccaggccagcccggagcgcgccggggacaccctgtgcgccccgagtcccggcaccatgcgacccgccgcgcgtcctcgcgggcccggggcttcgctcttcgctcgctgagcccctgcgctcgccaccacggaaactcggaaagaggaggcgaggctgtggggagcggcgcggagacggactagacttcccctccgcccccaagaggctgccggtccccggttccctgggcttctccagctttatcatgaacctggcgcaaggttggctttaggaaaaattctggagccagagggagagtcaaggcaattctttggttgctaaggtaattgtagttgtgataaaaaatgggcaagaaacaaatgggggaaaaacatggtttaaaacagtatcctccctccccaccccattaatatgtgttgatttcatctcctgggtgtgggtgcttgtccatttcagatgcgtgacaggtgcccgtgtgtgtgtgtctgcagtttgggactgtggaagcacgagcttacataagtggttaggcaagctggcgtgtggacttgtgtgggatgggtgcaggtctgcatataaatcatgttcctgggtttctgggtgtgaagcgcacaccgacggggacgagagcgcagaggatggcgcttttagatacttccagtcttccgatgttgtgatcgcaggtagggcagctttgcctctaatcaggcgttcattaactttttccctgaacaagctcgcccatttgtggtttggaagaaaagaaagcgagtctccgcggtgaggtgtggagggcaggggcgggtggggaggtttgttgtttgggaactgcgctagcaaaggaagcggtggctattcgcttggagaggatgacaaatgaactggttgcgtgaggagtgaagagaccgtgtttacagtcaccagcaggctgcgtaaagaagtggcccagtgagacag

SEQ ID NO: 6371 - DNA, 6000 bp, Homo sapiens
tgtagctaaagcagacgggcctcctgggctggtgcaggaagaacagcttatgttctcgaacacattgaccacgtgctccatgcatctgacacacacggactcgtctactccacacagcaccctaggagatggggctgtttaaaataccaatccccactgtatagttgaaaaaaacgaggtgcaatgaggttaaataacgagctctagagaggaggactcaattcacagtcagcttccagagcccatcggcctaaccgccaggctggcttcccgtccgtaatgcacgtttccagctagaggctttcaggctgtgtttcccacacttagccattgacattcacgttcacagtttttgccacatccatgtcacctgtacaaccatttctttagtagtgacttacttttgaactgcaacttcatgtcaccaatttaaatggaaaatgagtatcacttatcataaaaaagatgataactgtacaaaataaaagcaatagaatgtgaacaatgctattagagcctgggtagattcggggaccagccaaggctctgaacctgctcagtctgttgaaaaaggagattacgcacatagaaaggcgttgaagtgcacggacaccacgctgagacgttcttgttggcctaatcaggaggaacgactagattattcaattcaaggttgtttaccaggccaaactacttcccttgctgggaaatgcttcccagctctaacgtgcagtcagaaaatacgggacacaagttgacatccgaaggaaaaatatcttttccttctccacttccgagttcttggttgggggccctgaaacaaaaaacagatgaacaagagaaaagtgaacaaattaatttaatgtaagtttaatgtgacatgggaaccttcataaggaaatgaagtgattaagcctgagtgcctttttgtttttttgagacagagtctcgctctatagcccaggctggagtgcagtggtgcgatacggctcactgcagcctcgatcaccccgggctcagctgatcctcccacctcagcctcccaggtagttaggaccaggactacaggtgtgtgccaccacgctcacctaattttttggtactttttgtagacacagtctcggctgtgttggccaggctggtctcccactcctgggctcaagcgatccgcctgcctcagcctcccaaagtgctggggtcacaggcatgaaccactgtgaccggcctgagtgtttccattagatgtcatgaacagtggagaatcatggggctgtggtgggaccagggggcacgagcgaagtacagagaactggagaaacagcaaggcctgtcggggctcctctcagtgtccccagtgctcggagtggacggtgcccctttcctctggctgtggagtctggtgtcctgcttcagggaacaatcacatagtccttctgcgcctgctgtttcttggattctttccacttaaaatattcaacatgcgaagctgccacattttggggtagcgtgccctgaatcattggctacaaggtcgcgggccccacatgaggcacagttggcccttgagacagtgacactatgtatttcgtggaggccactgcttcaaaggccctaaggtgtggattcctgggaaaccaaaacaggctgtctccaaggctcaagtggaattgatttctaacagcccaggcccacggtgtctgtgcgagtaaatgaagaaagtgtttttacagtaagtcttcttggatagaattctgagggagagagagaatgagtgaatcagaatgttggatgttccctctaaggcatctgtttaaaaaatcaggggaaaaacccaggagcagagtcatcacctgtccccagctctgaggatctgtgtctgtgaggcacatgagtccaccctcctagctctgtagacaaggaaactgtggtccagagagatggagatcccacagacaacggcccacctggagcaccccctccccgcctgactttatattcccaggatgcattcatcagggtctcagtaaaaaaaagagggcacattccaattgggtaataggaagaggatgttaatgaagcgtttctttacagtgctgtaggcagcatattggggttctgcgaagagcaggcagcaccctgggtgcctcagggctggtacggcaaagcctcagcaccctccctacctccttcccccctcgcgatcaggcccctgataaaagcagtgaactctgctccaggtctggccagcataaaggcccccaagagaggagccaacaacaccccatcctccctctcaccctccctcaggctcctgctggggctcccactggccaaacccaaagagaagccggaaggcaaagagctccgtggtacccatcagggctcccaagcaggggccacagaggagaagccaggaggtgacctggagcaggacacagcagctccctgacagggatcctcacccagggcacgcctctagagcagatggagaaaacaactcagtagacttcagactcccaaattctcccagttcctcaacccgcctgccctctggacttcgggagaaagttgagagggaaagccctcaactttgttttgaaaatgagagcaatgtttacagccactagcaagcaattaggatccagctgggctgatgtggccagatctggggacacccagccaggtagatgcacaacagacccataatggaggccagcgaggaaacgctggacacgtcccccatgactgagctgtgaggacctgacttatctgtgcggcggtcactgtcgtgtagaaatggaagctgtacatgcaggctgaggcttctcagctggacagttcagcccgagtgagccccaagaggacaggggaggctggtcttcattcttcccctctgaatcaccagcaaatgatagaccgtcaataatttgttaaatgctttttaaaatgaatgctttaagccgggtgcagtggctcacatctgtaatcccagcactttgggaggccgaggcgggtggattgtttgaggtcaggagttcgagaccaacctggccaacatggcaaaacctcatctctaccaaaaatacaaaaattagccaggcatggtggcaggcacctgtgatcccagctactcaggaggctgagacaggagaatcgcttgaacccgggaggcagaggttgcagtgagccaagattacgccattgtactccagcctgggtgacagagagagactccgtctcaaaaaaaaaaaaaaaaaaaaaaaaaaattacgcttcaaacacatgatctctcaccactgttgaattttctttctatgagcccaggagggcctctcagagaggaaagctcctaggtcttcctttccctctgcaaactccctgccttgaaggatcagaaggactgtgctgctcgttgcatcctttgcaagttccaaaccctgatcccagctgtgcttaggggttcctgcaaaccttttccaggtgttaattacctcccacttcatttcctgtttaccaactcagctttttgttttagtgtgtttgaattccctgaactgaccgttgtctgatctccacctcccaactgaattaggggagctgggcttctggaaacccaggtgccgggtgttgcagagtggctgaaagctgggatgtggcagatccgtggctacattcatgcacacacacacacccacatacccacacatgcacacacacacacacacctgcactcacacacttgcacatgcatagaccacagctttccacacccttcctagacaggggtcacttggtgtcctggagagagtgtgaagtctggaagggaaagaggggggattaagccccacctctagccatgggactgagacaagtcacccccacccatctgcgccttgtttcctcctctgtgaggcaagcacagagcccatgcctccctccctggatgggagtgatgtgaaacttgaagaggggtagagacaagggtcgtcaatggaagccccttgggcaaaaaggccctttcaactaggggcacagaggaggccctgggctgagaacttgacagcaccttgtattggtaaccagccggagggactggaaatactcagatgtgtctgtctcccttattaggttcaaagtccctcgagaccctgtctccatcacagtgctccagtccagacccctcctctgagctccagaccctgctggacccaacagccatccccatccccacctgcctggaattctccaaagaacctcccctttaacagttccagcctttaacagttccagtctaaacacatgacctttctcctctaaatcagccccccatctctgcctttgcaggagatggaagccatgacacctgcctcgcccctgtcctcaccccatccatgtccaatcaagcactaggcatgtcaggtttaccctctaaactcctctggaatccagtctctcagtctccatcatcccaggtcgaagctaatgggctaactggtccttgcttccactctacccccactgcagtcctgacttcctgagcagcagccagggcctaatccatattcacaccaagcgccttcctgactgagatatcctcctgcaccatcatccctccaccctgtttagttctgctcaccctcagtgttctcatcaataatccactcgccctcacaggcgcgtttgggaccccatgttctatgctctcacaggaccttttgcttgatttttcactgtactcaggtcagtttgcagttattaagtgactgagcaatgtctggcttctccagtagactgtcagctcctagccattgtatccctagcaccgctgtgtgggagcacttcacaaacgtccattgagtcagggactcagcagtctccatttctcctccctgctggagaatgcgtgtattttgcaatccccagcccctgtgccatctaaccatcttttcttctctgttcagcccaggtgtggcctcactcacatcccactctgagtccaaatgttctctccctggaagatatcaatgtttctgtctgttcgtgaggactccgtgcccaccacggcctctttcaggtgagtcaaagggattcctcagttcactagttaggggaggtgggcagacaccctggagaactccctggaaagctcaactctcatgccccggacaacagttgaaggaaccagtgatgttaagcccaaagacaaaacctctcaggtgtccaagtccctgtaggcctgttgggagcagagggaatgttctgcggaactagaggaagaggggctcagggagaagaagggcacattcctggttgtcatatgtgatctatcccagatgaacttggaagtgaagggaagagagttaaacattaaagtaaatacccagtggatcagacagcaatgtgccagattgccttggagacaaaatatctccaacacatggctgacatttggtgggagatcagaacaccctaaagagagaatttaaggggagggggaggaggacctgagccagagtagaagcagaggatagggagatctgttcttggggacagcatttgcaagaaacaaggctgaggggtccactccaacctctccaccctgctgcaggtgctgcctatgatgaagatgagcagatggccatctcagctggggccacagtgcactggacctatagtttccaattccgcactcagcaggcatctttctgatgatccgatggcttctcagagccagggatgggccaggatccatccccttggctactgtcttgctgagaaattaataagcagcatctggtgctatactttggtctctagtgagttagctcatgaaagatgacagactctccaagccaggggtatgcaggaaatgggttttctgtagctacagaaatggggttgagggttggaccaaggggactacccaggggaagtcttaccttcagaggactctggaaaggaggctgcaagttttcatgggtcaagaattcagagcccagt

SEQ ID NO: 6372 - DNA, 6000 bp, Homo sapiens
gcaaaggagcttcctaagagaagataacgcgctgagccatgcccatggcctttgcctcccatgagaaaatagtcttccctaagccctattgtgatgttccagttataaacaatggtgcttagtacatagaaggtctaaaatgatatttattgaatagatgagtggaagcagtgcactgttctccaaatgtctggactctttcatgtttgcattttaaaaatagatgctgttgttttgtagatttgtttaaaaacatcttggtattaagactgacatctattcttttataacactttacatgtggtcatgtacccacagatttaggctgttttattttatagttttcactacagtttatttcacctgattatttcatttgggtctctaaaatcacattatgaaataccttaattatttaaattaggaacagattaattatctccagtgtacaaactcaaattaatttcattataaacctgaagtttaaattgattaatcttggagtgtttaaggaataaaatgggtttttcttcatccttaaggagaaaggcatatttgatttgatgagtctctcttcatcacaccagttatgatactaggcacaagatatttgcaagaaaacttcagatggattttataaaccagccagaaacctgtgtgtctggggcttctgggggaacaatctgtgagtcattttaaaaaacaaacacactcataatcacggtgcatgttgttaccatggtaattaggcctgttgagttggcttgcttatgttcctgcaaaagcaagagggggagagaaactgagaattcagagctttgactattagcttcaatttgcctactgcaggagagagtgaaggggtttctcaagaatgcactggcacagtcattctgagagggaagtgaagaaaccctggcatcctgcctttgttattgaatataggttagccatattagtgttggatattgtggttcacaagggagaaaaggatcatttggcattctcttgggaaaaaggggaaaaatagtttctttctctgatatatgacttcatgtaagtctctaaggtcaaccttgtggagtgtcttgtgtgcctatgcacaaggttttaatgatcctctaaaaggcaccaaatgctgctgatgaacattattgcaggtttaaatgatctcagcatattattctaatctggttagaggctagttttaatgaggccattgtttcagatctgattcccaagtaagcaagatatcttttctctgttttatggactaggtacgactcctttatcttggacagtcatcttgtaatgcaggcctgtgggatacaaaggagaccagggaggttatgtgagctctgccaaatctattactactccaggggaaaataaaaccaaattcttgggctagtggaattactgtaggagaaatccagtatgattccatgtgaagaaccaatagcacccttaaattaaaggtatgagtgtacacacaaatctgtttttaagactgtttctaaattcactttaagaagcctggggccaggcacagtggctcacgcctgtaatcccagcactttggaaggctgaggtggggcggatcacgaggtcaggagatcaagaccatcctggctaacggtgaaaccccttctctactaaaaatacaaaaaattagccgggcgtggtggtgggcgcctgtactcccagctacttgggaagctgaggcaggagaatggcgtgaacccgtgaggaggaggttgcagttagccaagattgtgccactgcactccagcctgggtgacagagcgagactctgtctcaaaaaaaaaaaaaaaaaacagtctggctgggtgtatttggcttacgcctgtaatctcagcactttaggaggttgaggcagaaggattgcttgacccctgagtttgagaccagcttgggcaacgtagagacaccctgtctctacagaaaataaaaaaaattagctgggcgttgtggtgcacacctgtggtcccagctactacttgggaggctgatgcaggaggattgcttgagcccaggaaattgaggctgcagtgagccacgttcacaccactgcattctagcgtgggtgacagagcaagactctgtctcaaaaaaaaaaaagtcgggtatcctctgaaatgaataattataatgcattgactaaagttttactgcttagaatatgcctcaatcagattttaaagcagaactttttaaactatagatttcgtttttcctctcatatgtggaaagaagatacatgtttcccaaactttattctatatttaattttcttaacattagtaaacaaaacttaacttagtttttttctgatcatcaaagtaattcatactgattattgaaaaatgtggaaattattgaaaatttgaaagaaaaaataaaaatggctccatctgttaattaaattgttagttgaactgcatgtaacagtggcctgatttcacagtggctaacataagttagaagttacttctttttaatgtaacaatccggacgtggatggcccaggactggtaaggtagctgtgctccacaagatcatgcagggagccaggctccttctatcctgtttttctatcattcctatgaggtttctcttgctttcattgtctaaggtggcttgtcacaaaggctctgctataaccggcaggatggaagaagttggaaggggaggccctgacccagaagttacacataccacttttgatgctgtaccattgaattttgtcacatgactgcatacctagcagcaagggaggttggggaaagtagctattattgatatgtaggtgcttagcttagaattctattaaaaccatggaagaagacgagagcagatgttggggtatatctagcaatttctgccacttttgttattctgttgaacagaggaaatatattgtttagattttgatgtattttcttccagtctttatgtatcagaaagatactatgtataattatactagaaaatgtgttatataatacaacttatattatgtatataatacatgttagtgcatatatattagaaaaatatattaagacatagaaaatatatattagaaaaaacatatgtaaatatgtatattagaaaattgttgagttcacactatatataatattttatattttttactttaaaatttaaatgacaatgcattttacattctttttactttataataaaataaccttattttaagttactttttaaagtaacaatatttattaattttaaaataaagttaagtaaaaagagaatataaaatgcattttttcatcatttaaacatttttttcttttttccgagacagactctcactctgtcacccaggctagagtacagtagcatgattatggctcactatagcctcactctcctgggctcaagctatcctcccacctcagccttccaagtagatgggaccacaggtgtgcatcaccatgcctggctaacttttgacttttattgtagagaatatgtctcgctctgttgcccaggctggtctcaaactcctggacacaagtgttcctccctccttggcttcccaaagtgctgggattacagacatgagccactgcacctggcccgtttaaatttcttgtattcattgttttaaaattttatcatgtggagtttctgttttacttaataggttgaattattgatatttaggctatttcttaacaccttgataattcttctttgtccacattgtgggtttgttttggttaaagtcatggagtggcatcactaaaacaatgactgagaacatatttgggtcccttgataaacaggaccagacggctttccagagtagttgtgccagcttccactatcaccaataacaaatgagtgccgggcccagaacccccttgaacaggcttattttgcctgtcccacctagtctttgttacccaagggttcattctccgaaaataagttgtttttagcccttggcttttttttttctttttgctgtcattaatcatgagataatggttttctaataactttagcccatttaaaaacatatggcccctatggtagtctgggaatataattggttgggttgagattgtagcacacaggccagtctcaagtaatgtgaggcctctggagacactgatgttcgtttggccctagaaccccttgcgaatttgagttccaccctcattcatactattctagatgtgagatatctctttgttctcagacactgcaaaataggaatgggaaagtgttccttgaggctttagcaattccctttgagctgagtgctctaaagcttttcaggaataaagaagctcatctacacaggaactttctcccgtaggaaccacactcggcactggacaaacgtaggccactctgcctgatagccacagaggtcattagtggctaagggcataggtgtcttctacttctaaacagcctatagaagctgtgggtgccaaagatactcttataaccaccaacgtgtcctccaccctcctaaagggccagatacacacaaactgtatgcactcaaactctgtccctaatacctggagcaagagtgtgttggtctctgctgctttggtcatgctcggagcaaattagattaggtcaggaggaaagattgttcttattcattccatcggtatacagcctctcccaccaaggactctgcttcctctaggttcctaagtggcctttgtgttttcatgttttcttgcatgctaggagatttcacaaagaaagggactccaatttcacaaatctatttcttaaaagaaagagagttaataaaagttcatttctaggctctgaaatgtaaacctgtgagacctcctgcccttataactatattgccattaccacccacccccgtttcagaaacttcattcattctacttatccagctcttgtgtatcatgttatttttccttttaaaaaattcgtttttctctctgctttctcaacagccagatctgccagtgagcctcaggctttaggaactgaagaggtaagaattccaaaatattttcttctagaatcttgaatttaaccagaacttaaagaggaaaaaaaatgttaagtggtctatagatgaaagcatgtgatgttttattgaaagaaacagtcatagagtccttatcaatattgacatgacttcagaatttaaagaaaaaatggctgtctttaatgatagttaaaattgattttcatccagaattttttcattttcttctaaaaacctgagttggagagcctttgaggctgctgtcttaacagaatgtatcctcacggcacaaacatgattaataggtggcagacattgagggcataccctgtgcaagataaagcctcagatgaggctgattaggtcagggaaaggtaaaccctgttcttaacagatggttgtaaacattgtaagggcttttccagcagcagcagcagcaacaacaacaacaagaggtcaatctaatgctattggggtttcatcttgaagaagcttacttagcttttggaactagctatagcatttgaatcttgttctagacttgaaagataaccataatcctagacaggtgataacgtgtttgcccactccaagatacacagttttctctagtcaatgacttagattcccctcccccaccattttaaaatgtaacttcattatgaaaaatgccaagtgtgtaccaaagtagagagaataatataatgaacgcctacatccccatcacccaatttcaatggttgtcaactcgtggctgggattgtttcatttctacctctacctacttctcttctttccccattggattatgggtgcttgctgaattgttgggcttttaattgtttatttacataactgtttaggggatacagcaaatgctaaaaaaaaataaaacctactcataacctgacttgctttactggagctagtcatccatccatttacgcatt

SEQ ID NO: 6373 - DNA, 6000 bp, Homo sapiens
gtacaattagaatcttttagtctggcgttgatgtcttgaaatacattttctaaaaaattcaattttaatacatgttattttgtagagagaacaaggaagcatcttccccaggtcttcaccagaacagttcatttgtttcttctttctacagcctgtagagctgtccaagttgtgctcagcaataatggaacctatgactggcaggcagaatttcttttgcagcagccgcagggctccgcacacgcaaacggaagtgctcagcagctgggacacccactgtcccagtgccagagtagcttttcctgaggtcccaccccagtggtcacagacctactcagggctcaaaatttatttaacaagatggttggttggcctatgttaccacaaatggcctgtgtgtgaccctttttcagagtacagttatttgccagaattttttttttttttttgagacagattctcactctgttgcccaggctggagtgcagtggcacaatctcggctcactgcaacctccacctgctggattcaagcaattctcgtgcctcagcctcaccagtagctgggattacaggcacacaccaccacacccagctaatttttgtatttttagtagagatagggttttgccgtgttgtctaggctggtcccgaactcctgaccccaagtgatctgcccgcctcggtttccagaagtgctgggattacaggcgtgagccaccacgcctggcctatttgccagaattgaaggaaaattttcttctccctctggagaactctgctgttaatcttgttgccactaaggtagcaggctgagatgttgcagctaaagaccgcagaagagactaacaacccaattaagttataattagctgaactatttcaggtgtttttaatcaatgctctcctttccgtaaatcataggaaaggtcttcaggggagagggaagaaatgatgcttctatattaatgcaaatatacacttgttgaagggctggatgaaggcacaaacatctacttggttgtcttactcttggaattaatgctgacctcctctttcttgctcttctctctctcttacctcctcacagacatacccagacacctgactgccaactgctatagaaacccctcatatagaacaatgagaacacatggacacagggatgggagcatcacacactggggcctgtcgggggtgaggggagggagagcattaggacaaacacttgatgcatgtagggcttaaaacctggatgacaggttggtgggtgcagcaaaccacatggcatatgtatacctatgtaacctgcacgatctgcacacgcatcccagaacttaaagttaaaaaaaaaaaaaactcaaatattttgagtgtgtccactctgctcctgccctcaaccctactttctttcaatgcctatcccacactgttatggggcagtctttccaacatgcaaacccagtcacatcagtcctcttgactaacagttttaatggttcctcatgtttccattttgattgaattgccatggaaggtatttcctcaattaaccccagcccacctcttcagtccaccccacccacacagcctggccttttggtcccactatgccaagctattcatggctcacagaataagccatgctctgccccaactcatgcttccaagcagccagtggcctcagcctgcaaggccccctttctcctccccaccccttggtcaccaccttggtttccaccgtggctctaaagactcttctggtgactcaggcaaaggaaatgtatctcctttctgtgcatctcctggctgtgtgttctcttctcagttcgctctgctccttcctactttgttctcgtggctgtcccagatattcaaccagtttgattgaagacattcaatttgttgaggcagaaacatggagcagttttatcttgcaaatggctgctaccagctgtgtgttcctgtcactggctctcctttccctctagggacccagtccccttaacaatatttgattctctgtcataactcataagtcgtcacttgtgtttattaaaacaatctggtctggtttcccatctcatatatggttcaaactctctctccccagggtaagctggactaggctgggtagggggcagatcttatgtctgagactgtccccttctgactcatgatgtcacagtgaagaggaggaggagtttctctaagtcattgttttcttcattggcttcagtggagctgaagttgctggtgactctgctgttgttgacagccctgtgtgtgtgtgtgtgggtggagaggagtgttatataaagagttaatatggtcagatggaagccccaaaacctccacggaagaggactcagttccaagaaggtcccctgagcattggtggttccttcccgggagaacctaccatagtttccagctgactcccagctggaggcaccacaccatggccttggtatctgttcctctttacctcctgccacaatttctttttttgaggcagagtctcacactgtcacccaggctgtagtgcaatggcatgatcttggctcactgcaacctctgcctcccaggttcaagtgattctcttgcctcagcctcctgagtagctgggattacaggcgcacgccaccaggcccagctaattttttgtatttttagtagggatggggtttcaccatgttgggcaggctggtctcaaactcttgacctcgtgatccttccacctcggcctcccaaagtgctgggattacaggcgttagccaccatgcccagccctcctgccacaatttttattgaaacaacttggtgctcttgctttgatttaaaatagataaaaaacactgaatttattgtgaattgttttttttctcttggctctcttaaaaatctgtttctctatgggctaaattagtgtatcatatgggccaaatcactttttaaaaataggtaattttcaatcataaataaaggctggtgcagtggctcatgccagcactttgggagaccaaggcaggtggattgcttgagcccaggagtttgagaccaacccgagcaacacggcgaagccctatatctacaaaaaaataccaaaattagtcaggcatggtggtgcgcatctgtgtggtcccagttactcaggaggctgaggtgggaggattgactgaacccaggaggtcaaggctgcagtgagctgagatcataccactgcactccaacctgggtgacagtgagacctgtctcaataaataaataaatatccatggatctttaaactataattagatcttagaggcaatcttgcccagcatttctcaaagtatgctctgaagaactacgagagattctgtgaaggcagtactcagtggccaaatacgtttgggaaatgccattcttattctgtagaactccctctcagagagtcatcccagatgtcagaatatcaaaagccccgagaagtcccatggtaaataaacctggtcaatgttcttgaacctaagattttgcaaaatgatttgagctctgaattccccatctgcactttttaccctgcgtgccacctattgatccagtttgggacgtgctggcctgagtgatgagtcagtggtatatgctggaaataatattaagaaatggtagttacagggctggatccatcctctttgtgctctgtagtcccccgggcacagagttttgtctcgacatcactgctccagcatctataaaacatgggacactccagttcattgcagcttccacctttgacaagataggtattacaaaatgaccttgtgattcagctgccaaaaattaacagtaaagcaccagtaactctgtgaatcctactagattcagtttttaaaatgtataaaccatttgtcaaaaggcagaaaggtggatattggaaaaggaaaaacagattaattttaaactacttgactcagatataatcatgaaaaatcaaggaggtgagttatcaaccattttagtttttgtatatatttggagtaatatagaatattttttacatacaatttttttcacacacaagttctcatcatacatattactaaagatggataatacctaggttatgaaaaccatataaacctggattaatcaatttttcttatgtggttttatcaggctgttacaaatcaattttaaaaagacaggaaagcagctaaatttgttgttaattctctgaagttgttggatagaagtaaaaattcaacctcaaccccatattaaattcaagcatttggaatcttaattctaaaatttagaactataaaaagaagaacattctaaaaaaatgtgtgtgcgacctgttttttgctttgttttctacctaacttaattctgccacccagctgaatatttcaggtttccttggtggaacgcaggctgagtgctgaagggctctagtcacctgagaatggcatctgcctgcccgtcaccatgccaacacccctggctacaaaaaagggatttcccctttttccagtcttccctcccatgtgggacaggtgcatgcacccctactccaggaagggcaccattcctaattacaattgcttccttccctccacttttgtgtgagagaagaaagcttgagatgcaatcctttgtcttttcaaacatgattcttttggttttgttttgttttctcgctattcttactgacgtctttgtgtggtgcagcggctgggatcccactgcatctacatggcaaccaggaaatcagtcattcagagtttccatggtaaccagagggggggaggggtggaaaaatccattttatcacggtatgctgtgtcccttcctggaagcctacagaatttttagacagaggtcattatgaaatcaacaacaacaacaaacgcccgttggcatcaagacaggcctgtgaactggcatccccaggcaggctgcagactgggagggtgggagtgagcatgcagctgaccccaccatgaggcacagggcgtcgccttctcccctcagcacagaggagaggtgacgaatgccacttggtctctgcagcgtctgtagagggaagtctgtaagcgggagtgtcaaccccaattggcagattctctgacacttcaagtctgcaaaggaaaagcaggtaaccgacgttgtgtaagaagtgagcctcttggtttgggtgggggcacagctctacttttatggtaagagtagccctgactacggaagtgggctgaagggtgctgtcccaagaaaagcggaagtatctgttgagtcttgtttcctgtcacatcctggagctgaaggtagtcacatttcaaatttaaaaaaaagaaagtcatgtgaagttaaccagtgagattatcttttacaggcaggataattagaatcctcagtggtgtagaatcttccacctacaggcgggttgagttttatcacagacgagaggggccatggaccctcagaaggccttagctcctggatttatttagtctgacctttggagagtcaaattaccaagaggtgatcgcacttccaactaaaattgagaatgtgctccttgattttaaaaagtcttctaatggcgatattctaataggccaggacatagggatgttactctatgaatacaggtcctttttctttttttttttttttttttttttttttgtaaaatgaaaaattacctctcatcttcctttttaacagtggaagattaggcttttcctttttcctctttggaaattgagatgaacaaattcttgatttccttccctcttcactccacactgccccctccactctcttgagtccatcctagtaaatagctccaccagtcaccattcactttggagtcttcctcacccttactctccttccctcacatccaagtcagcagcaaattcttatagccctagtttcaaaatagagcctgaatccaatctctcccccttgcctttactatttgtcatcctaagccaagccaacatcatct

SEQ ID NO: 6374 - DNA, 6000 bp, Homo sapiens
ttcaaatcagctagtaaaaatatgttcaaaaaactaaagaaaaacatttttttaaaatgtaagataatgtctcatctaatagcaatatcagtaaagagatggaaattatttttgaaaaacaaaaattctggaattgaaatgtataataactataataaaaagcttacttgaggccgggcgcagtggctcacacctgtaatcccagtactttgggaggccaaggcagacggatcacgaggtcaggagatcaaggccatcctggccaacgtgatgaaaccccatctctactaaaatacaaaaaattagccaggtgtggtggcacgcgcctgtagtcctggctactcgggaggctgagacaggggaatcacttgaacctgggaggcggaggttgcagtgagtggagatcgcgcaactacactccagcctggtgacagagaagaaaaaaaaaaaaagaaagaaaaactcacttgaaagccccaaaagtgaaatttgagttggcagaagaaagaatccacaaacttgaagattatcgatagatatgatgcaatctgatgaagagagagataaaagaataaaggtaaacaccaactcagagaaatgactagaaatgactcagatatgtaaaggtaagaacaggctaagtgcagtggtgtgatcacagcccactgcggcctcaacctcttgggctcaagtgatcctctcacctcagcctcctgagtagctgggactacaggcatgtaccactatgcctggctaaattttgcttttacatagagacagggtcttactatgttgcccaggttggtcttgaactcctggactcaagcgatcctcccacctccacctcccaaagtggtaggattacaggcacaagccaccgtgcccagtctactaaattcttatatccagcaaaactatcctttaaaaataaagctgaaataaagacatgcacagatcaacaaaaactcagagaatctgttgctagtagattagccttacaaggaataccaaaagaagttcttcaggcaaaaagcaattgctacgcaatcatatttcaacacagccctgtgactccaatccctggccacagatggctagaccagtggattaataactgaaccaaagacagccatctagaggtagctcaagtttacagtctttgcaactaacagtcttaatgatgacccaggtcatgtgtagtaaaatgtatgaaatttgctttctccctgaagcccagcagggaatcttccaagatagtttcttgcttcccttaaattaaacacccatctgagtgtctccattacttgcaacctagaaggaacaaacaaatatacctgaagaatgttatatgataataaacatgtgaaactacaaaaccactctttcagattttcaaccagaaaatatcaatttctatttaaagatatttcagctactttgtcttctgagtctttgcttttaaatatattattctgtccttgaaggacaggagccatccttttgcaataggaatggaagagccccaggcctatttcttaagatttagagttcccactgtcctaatcctaatttcaagtctcactatgattatgcctgtagttcaagatgctttaacaaagcaccacagactgggtggcttataaacaacaaaaatgtatttctcacagtcctggaagctggaaatcaaagatctgaatactatcttgcatggtcagattctggtgcagaccttctttgagctgcagaccgacaactttctttatatccccatatggaggaaaagcagcaagccagctctctggcatcttcctttttttttttttttttttttttttgagatggagtctcactctgtcacccaggctggagtgcagtggcgcaatctcggctcactgcaacctccgtctcccgggttcatgccattctcctgcctcagcctcccgagtagctgggactacaggtgcttgccaccacgcccggctaattttttgtaattttagtagagacggggtttcactgtgttagccaggatggtttcgatctcctgacattgtgatccgcccacctcggcctcccaaagtgctgggattacaggcgtgagccactgcacccagcctctctggcctcttcttataagggcactaatctcattcatgaagacagcctcatgaccttattacctccccaagtccctacctctaaatgtcattactttggggattagatttgaaattttgaattttggcggaacacaatattcagtctataatactgtccatccatgccgaaagggcctggttgttctaggaaaaccaacatttcagtgctgagtgtgagttcaatgactgtcactttattgagagcaaggattgtgtggatttgtgtactcctagaacctagcaccaaactcaattcttaacaggccttaaatcaaaatgtattcagtaaaatactgaataatttttttcattgccaagtagaagataggaaaaacagaacataaaacctgaaaccaaactacatatgaaattatataatctaatcagacacaaagatggagacctcataaaatatttgagtaataattttaaaaatgtgtctactattctcttaaactctacctacataactatccagctcttaatttcaattatattttggatgtaggatttgtagttgattctttttataacttcctgacctctgtaagaatatatgatctaatttcacaatatattaacaataattattttgaagttgtttttgataactccaatatctgaagagtctatatgcctattgacatttcttgttttttctcgtgccttttggtagaatggatttgtttcctgatatgccagttagtttgattgaatgctagacactgtatatgacaaattatagaaatcatacaaacctctgaatgatcatatcttcctccctaaaacatttacttttgtcttgatgggaagttaggacaggggcagacccaaagctatgttacaatgctacagtctttgtgagtagagaaagtgtattttgagttcatttagactcctaggggcttagtcctctgagcatcccaatcgtgaaatctttaccagagctcttcctcttcagtgggcctttaagctctgcttatgaatcagaaaacatttcaggagaaaagtagtggcaaatgtcagaattgccattctgaacttgcctccgcaacaaaatacttgaaccctcctgtccttgctgcctagagatagctctctgaaaccttcaaatatatttttaaaaacatgtcctagccagcttttctaaattgtaccagtataaggtttacactacagaacactagtccatcactcacaaaagcagaaactgtttctcttcctttaatgagaattgccacaagtttgccaaatttattaatcttctctaaggaagagcaaaatacaatctaacattttatcattataggttcccacaaaataatatattctatgatacaaacacattcttcacccaagtaaagtactagaaattaaacacatttaatgtgcttgaaaaaaatcttcctaatgttgaccattgtttatattagtcatatgttatgtattaggaactaaaagaatgttttctcagtgcatatgaataagttagctttactttttacaaagataatttgtactatttgaacattttgaagagcataatagacctgttgaattttgttactgtttaaggctgagtgcaatctcatttccttatgcccttagagagaactacctgaaagcaaatatctaaaaaacaatttaatttgctacttaaaatgatatgctatcaagttgaaatcactctaaagataaggaaactaaaaagactacaggaataatgtatgaacagttaaaattggctcattataaagaataccaaccctctttcaatggtatttcaggtagacaagcattgaataactcttaattacttactcaaggaacattaccgcatttgtttagtgccacccttttttccatagcaagtcctcaaataagtattcccaaagctgtattttatcttccaaattgctttaaattttcaatagatccatagataataaaaagttatcaatacttcatattttctgaggaactgaagttatatgtcacacacatacacacatacacacacacacacacacacacacacacacacacacacacacatgcacacaaagctaagaatcacaaggccccatttaattttttttttttaagagatgaagtcttgctcttccacccagactggagtgaagtggtgtgaacatggctcactgcagcctcggcctcccagactccagtgattctcccgtctcagccccctgtaatactccattctcccactgcagataaagacatacctgagactgcgcaatttacaaaagaaagaggtttaaaggacttacagttccacatggctgggaaagcctcacaatcatggcggaaggtgacaggcacgcagacaagagaaaggagcttgtgcagggaaactctgctttacaaaaccatcagatctcatgagacttattcatgatcatgagacaagcacaggaaagacctgcccccgtgattcaaataccttccaccaggtccctcccacaacacatggggatccaagatgagatctgggtggggacagagccaaaccatatcattccgcccctggcccctccaaatctcatgtcctcacatttcaaaaccaatcatgccttcccaacagtccactcaaaagtccatactccaaagtttcatctgagacaaggcaagtctcttccgcccataagcccgtaaaagcaaaagcaagttagttacttcctagatacaatgggggtacaggcattgagtaaatacagccattccaaatgaaagaaattggccaaaacaaaggggctactggccccatgcaagtccaaaatccaacagggaagtcaaatcttaacacttcaaaatgggagcagtgtgaagaagaggcgagaacgaacccctaaccaaccaaagcccgtgcaccactgcatcccgcgtccaccacctacatcctgccgccaccatgcccaagagaaaggctgaaggggatgctaaaggagataaagccaaggtgaaggacgaatcacacagaagatccatgaggttgtcagctaaacctgctcctccaaagccagaacccaagcgtaaaaaggcccctgcaaagaagggagagaaagtacccaaagggaaaaagggaaaagctgatgctggcaaggaggggaatagccctgtagaaaatggagatgccaaaacagaccaggcacataaaactgaaggtgctggagacgccaagtgaagtgtgtgcatttttgataactgtgtaaacttctgttgactgcacagtttgaaatactattttttatcaagttttataaaactgcataattttacttttttttaagctatgttgttagcacacagaacacttcattgttgtttttgggggaaggggcatacgtcactaacagaatgtctccaaagctggactgatgtggggaaaacacctttcccttctggttttgagagacttcctcttggctcccaggaggagggattccctgacgttgacacacatggccaccttggcacaaaagccttgtgctatggaaaaacaaattcatttctatgtcctcttctccctttccatctttcagcaaagacttaactcccttaaacccagaccactactgggacctgacccctagtcattggttaccaatgtgtcaggcaatctggactttccagtgatgccactgagatggcacctgtcaaaagagcagtggttccatttcgagattgcggatcttcagataaattctgccactttcatttcacttcctgaaagtcagggtcggcttgtgaaaagttgttaaacaacatgctaaatgtgaaatgtcaaccctcactctaaactttccctgttcagagc

SEQ ID NO: 6375 - DNA, 6000 bp, Homo sapiens
ttgtagcagactttgaccatttagtatttatttatttcatttttatttttatttttatttttgagatggagtcttgctttgtcacccaggctggagtgcagtggcatgatctcggctcactgcagcctctgcctcctgggtttcagcaattctcttccccgagcctcccgggtagctgggattacaggtgtgcaccaccacgcctggttaatttttttttttttttttttttgtatttttagagacagggtttcaccatgttggccaggctggtctcgaactcctgacttcaggtgatccacccacctccgcctcccaaaatgctaggattataggcatgagccaccgcacctggccccatttactatttataaagaccctgagcattctagaatctgggtgcagtagacaagtatccagtgactttatttgtaagacgaaatgcagacaccgggagcttttggaaaacacgtggcataacacagtggaaaagagtgaaactggtgtaagacgttctcacaaacgaccttccatttccttaggctctggcctgccagctgctttcccttgctgtattcccgccacctcccacccacacaccctcacagagacccctacatgcatacacgcagaggaacacactcacacacacccctctatcaggttgaaccatatgaaattgcttttttgccgggaggagagatgtagtcttgctgtgttgcccaggctggagtgcagtggctcaatctcggctcactgcaacctctgcctccctggttcaagtaatgcttctgtttcagcctcctgagtagctgggactacaggcgcactgccacacccagctaatttctgtttttgtattttagtagagacagggttttgccacgttgcccaggctggtctcaaactccccacctcaggcaatccgcccgcctcggcctcctaaagggctaggattacaggggtaagccaccgcgcccggcctgaaattgctattcttataggtcacaacagacaaatatcagcagcttcacgtggttcagcctcatatctatgtgtatacatgcacacccacccatgtgcttacgtaaacgcgcccatacacacctacaaacatatatacacttgtgcacacattcacacgtgcaggaaaattctctggtgcccttctccatggctgtgctagtgaacaactaatctggcccctcctgtgtccctccgcaccccacccaccttgcctccttcctagacactaacctccggtgctgatccccacccctacaggagagcgaagacctggagaaacagaacgcggctctacgcaaggagatcaagcagctcacagaggaactgaagtacttcacgtcggtgctgaacagccacgagcccctgtgctcggtgctggccgccagcacgccctcgccccccgaggtggtgtacagcgcccacgcattccaccaacctcatgtcagctccccgcgcttccagccctgagcttccgatgcggggagagcagagcctcgggaggggcacacagactgtggcagagctgcgcccatcccgcagaggcccctgtccacctggagacccggagacagaggcctggacaaggagtgaacacgggaactgtcacgactggaagggcgtgaggcctcccagcagtgccgcagcgtttcgaggggcgtgtgctggaccccaccactgtgggttgcaggcccaatgcagaagagtattaagaaagatgctcaagtcccatggcacagagcaaggcgggcagggaacggttatttttctaaataaatgctttaaaagaaaccagtctgacaaggcagtttctctctttcaccctgtcccttgacactctaaattctgcgatgttgggaccttctttgttttttggactctagtaccctcaaagagctctagggactccactaacagctcctcttttccatggtttattgatgtacttgggaagctttcaattccttctctaggtgtctccttctccttctccttctccttctcctcctcctcctcctcctttctcctcctcctcctcttctcccccttctcctcctcctcctccttcttcttgacagaatttctcagatcttggctcaggctggagtgcagtggtacgatctccgctcactgcaacctccgactcccaggttcaagagaccctcttgcttcagcctccctagcagctgagactacaggcacgcaccactatgcccagctaatttttttatttttagtagagacaaggtttcaccatgttggtcaggctggtctcgaactcctggcctgaagtgatccacccgcctgggcctccaaagtgctgggattacaggcatgagtcaccatgcccagcctaggtgtcttctggattgccctcccatgctcccctcacggtgacctcccaccttccattcttcactgctttctagaccatgagcaggttgtcccctagtccgggagaaggcccagtgcaggatggcctcacctggtgaggtggtaagtcaggttgaccttctcgtctcccactcatgactccactcacccagccaactggctccatcctgacagccaagtctccggatgctgcaaccaggccctgtgccaggctgcccttcacatggaaggcggtgtcttcctaatgctctcaaggggcaacatgcagcttgggtccacagggacttctctgccagtggtgtacatgtcctgctgaagactccacctcccttagaaggcggtgatacagagcacaggacttgtcctgtccccgcagggctccgcaggctgccatttgagcactttgagggctcagggaacacagggtcatcttcagtttggcagagcctgaaaccagcatgctccacccccctgctcttcagagatccccaggccaagtgcctgctggcctgcctgacacagccttacccacaccactgcccacgagcaaagcctgcagcagggcctggccacacacaacccctgctgagccagctggagacaaaagcaacggagatcattgtgccaggcgcccacctgattgagctccttcagtagccaccctcagtctcatccatttgtcctttagagggacagcctctgcctgctgcctccccggtggcatccctcatggggtgacagaagggaggagaagtcctgcttccctgtgtcagtgccccctgaacccgctggccaaccactctggccggtttgaggccaagtttcaactctagacctcccctgtgtgtgtctctcctgcccctctcagatgatgccagtgttgggctattgtgattattaaatgccatagaagtttggatgagctgcatcccagcaggtggtggggtcacagccccttgggaggagtccaacccaacagcctctgatggcacattgcaatctttggggctctcaccagagaagctggtgcccatgggagcctaggatgtggacactgggctgagccccgtaattcagagcctgggaagacagcccagaagacgttccctgagtgctggcatttctcccagcacagaatcttgcattgtaacctttggtctcccaacgaaacgtggcaaaacaggctcccctttcagtgcagagcctccatgtggactgggcagatgtgtcatgaggaggagctttcttaatttccttcagaacctggattttggtagctaacgctctgtctagctctttcccacccctctgttaacgagaagagcaaagaagccgatcttcacttcagatgttgcagtcataaaatataattcatttttctttcataattattattttttctttttttgagacacggtctcactctgtcacccaggctggagtgcagtggtgcaatcatggctcactgcagccttgactacccacactcaagcgatcctcccacctcagcttcccaaggtgttgggattacaggcatgagccattgcacctggccttctttcacgatctaaagacgtagaactttgagtccagctttctttgctactatctctgccagggcctggcctcttgtgggcaggctttctttgaatcagagattttcatctccacccatgctctagcactgtgattttccccagaaacccccacagaaggcacatgacttctgccggcatcttctgaatgacattcagggccagaactagaaaagcagagttcacgtgcacggttcccatctctcagcaaggacttctcttcccctttcattctctactttctactgaccccaggcagttccacttctcctgtctagtcagcccggtagaggtagcaggtagctgagcctggagctggtgccaaggctgacttcatgtccatgcaggcaaattggagaggcagccatgaatagaaatttgaacatccgtagctttaaccttggatgtttcaccaaccaggttctgtcccagccttctacccatgacagggatggctccctcagtctggtgggccacttgacccacactcaaacgccttctacccaggcaggcactgtgaaagcatgggacccactggatgtagggcaattgggagtggtggagaatgtggcaaactaaggagagtgtgcagctgtctgtcgttcagttctctcccatggtgccatgtgggaatttaggcctgggcttgccatgtcttccagtttgtcaagaaaagccaaaatcagaatttctacatgaaatctctcaattctttttttcttcccttccctttcttcctccctccctccctccttccttcccttcctccctccctccttccctccctcccttccttctttctttttttctttctttcttccttccttcctttttttcctttcttattcctttcttcctttctttcctcctttctttttgctttctttctttctttctttctttctttctttctttctctctttctctcttcttttcttcttttctttctttcttttctgacaaggtctcactctgtggcccaggctggagtgcagagctgctgtcatagctcactgcagcctcgacctcctgggctcaagcaatccttccacctcagcctcccaagtagctgggactacaggggcatgccaccacacccagctatttttttatttttgtttttttcatttttctgtagcaaggggatctcattatattgcccagactgatcttgaactcttggcctcaagccatcctctcatttcagcctcccaaaatgttgggattacaggcatgagccaccacatccagcccatgtgtctaaataaaatacttaaaacattataaatcaagcttacaagttgttaacaaaacacattcttttcttcttccttgacaaggatactttcatcacaacctaaaaggccaagtttgaactcagaattcttagacacttcaaaattttatattagcacaaggtagtgagaaagaagcagtacccggactgcagcttgccgctttcttgccctcccctggttcttcctgtaccacagcagcctccagttcatgccggcggacatgccagcctggaagaccaaattccgtccacattcacccccacaggacccatcccttgggtccagagatgcacataccagtggtctggtccacactcgggaagaagtatccagggaagaggcttcagctcctggaagccagcccagggccagttactaaggggattctggtgtccttggaatgttgggcacagtctaaagggggacacagggttctaggtaggtgtctccttagttctaaggactttttgccccaacaagaggagcgtagcaggaggaatggcagtgctagtccctgcattgtcgggagttcagagcagagacgtcttttgtccaggtctgaaggtggcactgcagagacctgcccatttgcaactctgatctaggtcagcaatatctcctggaaaagcccaggctacaggaaggccctgtgtagcaagaaatggacacaagacagcgtcgtcaacatc

SEQ ID NO: 6376 - DNA, 6000 bp, Homo sapiens
gccaggtgtggtggcatctgtggtcccagctactagggaggctgaggcaggagaatcacctgagcccaggaagtcaaggctgcagtgagctgtgatggagccactgcactccagtctgagtgacagagtgagaccctatctcaaaaaataaaataaaatatctactccccttatcaccataatctttggtcttccattttctccaattactgaaattaaaacattttagggtttttccctgttttttttttgttgttgtttgtttgtttgtttttagatagggtctcgctctgccacccaggctggagtgtagtggctcaatctcagctcactgcagcctcaatctcctaggctcaagcgatcctctttcctctgcctcccaagtagctaggactacaggcacgcaccaccgcattcgcctattttttatttttatttttttagagatggggtatcttcatgttgcccaggctggtctcaaactcctgggctcaagtgatcctcccacctcagcctcccaaagtactgggattatgggcatgaaccagcacatccagcccttctctttctgttatagggatcacttttatttctcttttctaagagtgagacttccatctgtgcctcactcagtggcaggaagaacagagcagagataaaggactggcctaccaccctctattccaaagaccttggctcctagaaagggaagccaggaattccctaaaggaaagagcaaagaactgaggcccaggaagagcaaggagcacaagggagcaaagtcccaatgtaattaacgtaaattaattctttaaaaccaggtcacaccctacccaatcccacccaacccccggcaaactacccctcgtcttagttaactcactctgcacattaccagaaactttctgtgcctttgaaatgcagtaagggattgtgttgttttcacacaggtggtaaattaccacttcaggaaagaggaaaaaagaaatagggcatgtggaatatgtgaaaaaaaagaaatcagattgggacactttgggtcatagaagccaagcagatgttttccaccccatcctctggccatgtacacactgtactagttatcactttgttggaaatctaaagaaaaaaatgctttgaaatctattctattatataacacaatgaagtgtgttcccccaaattcttatattgacgctctaatcctcattgtgactatatttggagataagtcctttaaaaaggtaattaagtttaaatgaggtcataatggtggggccacaatccaataagactgttgttctcataagaagaagagaggccaggcagggtggtgctcacctgtaatcccagcatttggacaccaaagcaagaggatcacttgagcccaggagttagagaccaatgaccagcctgggcaacatagtgagaccctgtctctacaaaaaattaaaatattagctaggcatggtggcatgcacctgtcatcccagctacttgggagactgaggtggcaggactgcttgtgcccaggagttcaaggccgccacagactatgactgcaccactgcactcctgcctgggtgacagagtgagaccctgtctctaaaagcacggaaaaagaagagaaagaggaagagaaagcaaaaatgtgtgtagagaaaaggccatttatgccacagtgagaaggtggccatctgtaagctaaggagagaagcctcaggagaaagcaaacctgccaatatcttgatcttgggcttccagactccagagctgtgagaaaataaatgtttgtcgtttatgctatctatagtgttttttatgtcctagcaaattaatacacctcaatagcctaactgttctcaatctaagtgagaagatcccaccccataggtaaaaatcaggcaatacctgagacactcaatatttaccagagataatattaaaatggcttatctgtaaaatacaggtaccaaccaatcagaaccaatggcgccataaacaaccaatgccagccaccctgtagtgccccagctgaatatcctccctgcttgcaactgcagctaacaatattgttcagtacccagcaaatttatcccaagatggggcttaagttacttcattaattaattagagagccatctatcaagcagcttctatgttccaggcatttagcataaaagggggctcatcccaagcaccttctctctgccacttctgtgcttctgtccctttcaatctacctatcaaattatttgaatgtaaaatattagatcataagtcagaagacggggatttagagctccatttcaatctgtcacttagcttaaatgactccagtttacacagcctcagtttccacatctgtaaaataaagatatagtcttgccttccctgtccacatcacagtgggttctgaaataaaatgaatataactatgaatgtgctttattggccgggcacagtggctcacgcctgtaatcccagcactttgggaggccgaggcgggtgaatcacgagttcaagtgattgagaccatcctggccaacatggtgaaaccccatctctactaaaaatacaaaaattagctgggtgtggtggcacacacttgtaatcccaactactcgggaggctgaggcaggagaatcgcttgatcccgggaggtgggcagagatcacaccactgcactccagcctggcgacagagtgagactctgtctcaaaaaaaaaaatgctttattaactgtgagcaagttccaaatattatgattactttttgcatttttctgcctattgatctactcaacaacacagagctcagatcctagttatccatgcacaatactcatttttctttatgttttagaagttttctctggctgctctagctagaagtgatctcttcttttcttgaacttgaattacattgtttaattcttttattatgaagcatgtgctgtatcatgaatttctagtattgatatttttccatgtaataaaatactagtgctgattttcttttttttttttttttttttgagacacgatcttgctctgttgcccaggtttagatcatggctcattgtaaccttgaactcctgggctcaagcaatcctccacctcagcctcccaaaacaccgggattacaggcatgagccaccactcctgacctgatatgttatactgtcaatgtttacactattctgtctccctacccagagtgtaagcttttttaaggagtgtctttcacaaagtgtagatatttaaaaaatatttttaggacagtttttggaatatatgtgtaactagggcgcaaataatggatcctactccaaccccagacaatgcttgagcatctgtgtgccacaaacagcagaaaaagcagcagactggcctccctctatggagctacaacctcttccctattttgtatctggagcttccttagttctttaagtgtctgttaggggctcttatctaactggtcgaaggttactagcttccaagtagaagttggcctgagaaaaccctgtctaaaaaaatcaggacctaggtgaagtctccagcccctgtagcagccaagtgctgggacatctgcagttcctttgttattacatatttggggctggctgtactttctttgatgcacttcctttcttagtggagagtctgctagccaaactgataatggacctcctcggggtttattgtttttatcaattccttgttgcttcccatatttaaagcagtcccagtttgggctatgacttgggaaaaaatccaggtgtggttcaggcgcccataaagaccacacgagacttcaggtaggggaggaggcactgcccctttgctggaagcaaagttgagacaggcctaaagactgtcccatctgtcaaataaggtgacgaaaataaccttgtatttgattaatccaatctacaaacttgtgcgtatgttaaaggttggtggtcataaaactgagtaaaggcacggtggcttgtccctgtagtcccagctactgggaaggcttaggcaggagatcaaactcaggagtttgagtccagcataggcaagaccccatctctattgaatttttttttttttttttttagtaaaacgatgaaatcttctagtagtggagacactaatgaaaagataatttaacaatttgatcagcaatggggaaagacggggctctgtaaggacagcttccaggaaaacccagtcttgtgtcctgtcctgaaagtgactctagcgacaaaggctggagtgataatcttaactttttaatccatttccttctggtacctcattactctgactttttaaaggtacttctttgagtagaacagctaactttgtctactgttccccaccgtccattttctccccgctcagaagatcccaagcttccgcactcctttattgcacccgcccagcctcctttaaaatgcataagccacgccccccatgttctggcgctaagttcgggccaatgcagttgcgccgctaggatcacaggacgaaagaagtaaagtcaccagccaataggaaaccagctacaacgcaaagccggagaaaagtgttttagtggtgtctttgaaccaatgaggagcagagcaacagggaccgtgcagcttccagaaacacgtgaccagttgagcagacgcagcctagccctacctcctggtctggaggtagcgcgatgggcgtcgctcccaatagcttgcagaacctctagtcacgtgcaggttttgcaagcccagcagcatctggcaggtcatgtgacagttgacgtttgtgcgtcgctccccaatggaaaaggagagctgccttcacaggaccaggaattggtttatctacgcgaataatagcatgacccgggcggggatagcctatcacgtgctgctagacggaacggggcggggcaggccactggttgcggagtgagctgggcgcgcggcgcgcaggcgccctggggacccggtagcggcggtggcggtggcggcggtggcggtggctgcggcgacggcagaggcgaagggagccggatcgccgacctgagcgggaggcggcggtggcggccatggcggcagatggagagcgttccccgctgctgtctgagcccatcgacggtggcgcgggcggcaacggtttagtggggcccggcgggagtggggctgggcccgggggaggcctgaccccctccgcaccaccgtacggagccggtaaacatgccccgccccagggtaagccggggcgggtccgaggtgctccccggggtactctgaaagccggggagggggcgggaccgagggcggaggcgggtcccagtcgccaggtgcgggactgctgcacctgtgactgggcgaggcttccttccctccgtaatcgcgaccacagcctagggacggaagggggttctgagcaacctgatagaagtgccaattatgagaagccctccgagcttggtcagagggttgaagatcagaaggacttccctaccaccgtggagcatcagtgggggtgtaagtgatcccagcccttctatttgcttcctctccagcatttcccccgtttcccgaggggcatccagccgtgttgcctggggaggacccacccccctattcacccttaactagcccggacagtgggagtgcccctatgatcacctgccgagtctgccaatctctcatcaacgtggaaggcaagatgcatcagcatgtagtcaaatgtggtgtctgcaatgaagccaccgtgagttacacatatctatgaaatgggccctgtttcctggatcctctttctgatgtcttggttctagaccctgaccttccggctattagccaagtgcttttgatgatacccaggtttcagttccaggtgtctcacacagccatttccccagaagccactcaccaaagctaatgttcactttctctcacttttacacctagcctagttcctatttgcaaatctcatgatatagtctttcttttat

SEQ ID NO: 6377 - DNA, 6000 bp, Homo sapiens; identical to SEQ ID NO: 3248

SEQ ID NO: 6378 - DNA, 6000 bp, Homo sapiens; identical to SEQ ID NO: 678

SEQ ID NO: 6379 - DNA, 6000 bp, Homo sapiens
gtgccatggcccagttggctcttacctggcgacatatatcgatatcacctgaaccaattagagatctcagctgtgagtgagcttgcttggtgtttaaatgtgtgcttggctgtccccctataagtggtcttccttggcttgcattacctccccttggcttgctttaggggctgaaatggcactgacactcttgagatgggactgcagagtttccttcccctaaccatgggatcgtatcccctctgcagaactaaggatagtacatgagtgggagatgagtaggaaatgggatgagtggagttgcaagaggcatcagaggtcactgtcaatggaggggaaagcttaagtgctcagtaaatgtagggcaacaaggaaggggggggtgaggctgaggtagggaggagaaggagctgagactcaggtatttggtgccagtgtagtagagaaggtgcctggaggcgggcaggcactgaggtcctctgggtctgaccaggcagtcccagctccagcccgtcccctggcccctccccgctgccggccagagtcacacatgtgttttcctgttttccatttcagtccccgttaccctctgctttttctgctcctcagagtcaacagctgttgcagcatgagcgatacgcttggttctcctaactagcaccttcccctctcccctgactcagctggtagcccctcctccccgcacctgcccaaaggtcactggacaggtaagaggtgggagaggagggacaatgggcgagaggggaagtgcaggaggaggatggagtcctaaaaattggctgaatggagacccaagagcctcctgtttcttgatcccagccctgtccctccctgggctgaaccttctgcccagagacttcagcccttccttaatggaagccctggccacaggagtaaacaatttcttttttgtttcactttttttttttttttttaaagagactgtcttagccacagtggaatatagaaaaacaaacagagaactggggagggaggagctgagcttctagcttggagtgatggggaaatctagtcataccagagtgtatctgttttctgtttctgttgttaggggaggcagcacagactgattggagccaggaaggcaggacatggggtctctgggagagaaagtgtgttcttatagtagttccctgagcttggctgaggagccaagaccccgaattatgtactagttcctggagaaattgtgttttggtgttgtcattcgagggtgaggttagggtgaggggctccattggctgtcctgcccagcactgcatactggaggccctgctgccagtttctgaatcaaatttcttccacaagctgtaggatgagtgtgttgtcctgtaatcttcactgggtgttcagagatgaatgcatctcagacagggaaaggcaacaagggctgctgttatcttatggggtttctcatgtaaaacctggggtgggtcaggcacggtggctcacacctttaatcccagcactttgggaggctgaggtgggaggatcacgaggtcaggagttcgagaccagcctggacaacatggtgaaaccccatctctactaaaaatacaaaaattagctgggcgcggtggcgggcacctgtaatcccagctacttgggaggctgaggcaggagaacccgggaggcagaggttgcagtgagcagagattgtgccactgcactccagcctgggggacaaagcaaaactccatctcgggtaaaaaaaacccaaaaaccaaaaaaaaaaaaaaaccaaaaacctggggtagaagagcccctttgggagagcctaggggtgttgctggtcccaggctgcctgaatggtggggctgcctgaatggtggaagcattaccctaagacccagggtctcagggagaaatgtgagctgccaaagatggtgccttcttgtccagggtgctaggtagtggttgagaaaagagggggtcttcatgttctcaatgcatggcagcctcccttgcctagtgcgcacgggcagactgaagtaggttagagtccactagcacttcctggtgctaccactagggcgtgctgtttgctggagtgtgggttttacccccagcagatttctgtctcaaaattccacggataggacttcacttttcagatgctaccagtcaggaatgaaaccctgtacacttctctctccattccccctcacagttttcccttcctttgtccctccttccttcctttcttttacgtcatattaggacacatgcccaccccttggtgccagtgaatttggtcttaaaagggcaggcgtgatgatgtgtttgtgtttttttttttgtttgctttagaagtgggcaccctagcaatagcagcactgccaagaggacttgtaatcacctcttatccctgcaaagaatgagaaaggggaggggcagccaggaaggagattaacaaactttgttggagcctttcgtctaggctatagactgaaggatgacagaggctttctttctttttaatctagtctgcttacatcttcccccaggtaattcatgtagataattcctgtccaaaagcaaggtctaaggtggcatcggtggctcacgcctgtaatcccatcactttgggaggcagaagcaggtggatcagttgaggccaggagttcaagaccggcctggccaacatggcaaaacctcgtctctactagaaatacaaaaattaggctgggcacaatggctcatgcctgtaatcctagcactttgggaggccgaggtgggcggattgcctgagtttaggagtttaagaccatcctggtcaatgtggtgaaaccccgactctactaaaaacaaaaaagattagctgggcgtggtggtgtgcacctgtaatcccagctactcgggaggctgaggcaggagaattgcttgaacccagtaggtggaggttgcagtgagccgagattgcaccactgcactccagcctgggcgacagagtaagtgtctgtctcaaaataaataaaataaaataaaataaaataaaataaaaataccgaaataaaaacacaaaaattagccaggtgtaatcctagttactcaggaggctgatgcatgagaattgcttgaaccaggaggtggtggaggttgcagtgagtcaagatcgtgccactgcactccagcctgggggacagagtgagactctgtctcaaaaaaagaaaataaataaaaaaaaaaaaaaataaaaggaaggcctagagactaaggcaggccagggggatggggagatggagagatagtatacttgtgtgattaagagtatatgagctctggaggttccatgagataatgtgcttaagtccttagcagtgtgtctggcccagtaagtgctcaataagtgatagcaattattattacaggagcattttggagaaaaggagagtctcctccagaaggatttcagatcattgtgagcctgtcttgggagaagcatgatctctgggaacgctcacaccagaatcctcctcctagattaaattaaaagtttaaagagctagaatgggaggatgtatggtagagatgtctcccagagatatttagatctctattctctggttgtagaataaccaaagagggttagaacagataggagaagaaacagacagttggatttcagaatggatagggtctatttctgttggtaaaagagactcagaataccagatttaaagtaaataataaagatagcataaactatgtgatttccaaaaagtgctcagcttcctctgcctgttctgggcctgtctgtccaacagaattcagtgaaatctgatttcctcatattcttttttaattttttttttttgagatggagtcttgctgtgttgcccaggctggagtgcagtggcctaatgtgggttcactgcaagctccgcctcccgggttcatgccattctcctcattctcctgcctcagcctcccgaatagctgggactacaggtgcccgccaccacgcccggctaatttttatttttttgtgtttttagtagagacggggtttcaccgtgttagccaggatggtcttgatctcctgaccttgtgatccgcctgcctcagcctcccaaagtgctgggattacaggcgtgagccaccgcgtctggcctgatttcctcatattttttaggaaagtggagtcaacttatatttgaggaaggcgtttataggaatttatgcttatcccagagatcttggtatgttttgtcaagaatgaaaaggcacgtgggtctggtggggatgcagtcagatatttgatctcttgactgtgtttcttttgaagtagtctgaggctcagactttggggcagtggcccaggcttggaggcaaccccccagtctctctttgcatggggaagtgtgcagagttctcttagaacacccagtcacatggtgtagagactgctcttacacttcctgtaatctcagcatgggaacaagcctttgtgtcacactgtgcaaccttcctccctttcttaaatgcttggggtgagagagaagagaggctagggtggggcatggaggacacagagagagagagtgctgtgtattccttccccgctactgtcctgtcctcagctaacttgctctgggacagcttccccagggctacagatactgcactcagctgactgtcctttcttctgggcccctggtcccagagcagagctgacaaaggagattcctgagagagcaccttcttatcacagaaagtgctgagccaagagctcctagctgccccttttgcagatgtgaagggccagtgaaccttggacccagatggttgcttaatactcctttccccctccctcactccttcctttgcgggctgcctcacctcctccacccttcttgcttaaatccataggcatttgtctggccttcccttttactgctggctgggaaggaggagcatcagaccacagatcctggaaggcacttctctccctgactgctgctcacactgccgtgagaacctgcttatatccaggaccaaggagtgagtgtgcgttccaccctcttctcatctccacttaccttgctaaccctcctctttgctgctgtgcagtgtctaatcgcttcttctcccgagtgcctctcaccctaacatctctccattgcttgactagcctctcccattttcctctcagctgtctcctgttcggtgttttccagcatgtgctgcctggctgcagctgtctccctgccttggctcggggtgatatctctccagcagcaactctggggtagggagtggccatcagctgcctccaatcatccctaggttttatggtacattggatcgcccttctctcattcatacttttttgggtgattcaacgatgctgatgtgagggatcgatagcaggaggcttagaataccagagaatgggaaaggaaaagcaaggaaaagataatagcctgtcttctttcagggtgaagtgggtctacttgggctttgccagggctgaagactccagctaagggttaagggatgctctttgggcaggaggatggttgtgggtttccagcaggtttctgaagcctttagttttggcagacgtagagtccttggggaaaagagcagtgtcatgagacgctcccacagattagctgctggtagggtcagttcctaatgttgtacctcagcacaggtgatccctgaagctgaaattggagggaagacgggttttggataaggctgaaaactcggggtcaagccattatagttattttctgggagccgccacactgcccccatgcctgtcttgtattatagcaggctcagagagaaccaacatttagtgttttgtttttgattttgttttttttttgagacagagttttgctcttgttgcccaggctggagtgcaatggcccagtcttagcttaccgcaacctctgcctcccgggctcaagtgattctcctgcctcagcctcccaagcagctggg

SEQ ID NO: 6380 - DNA, 6000 bp, Homo sapiens
ctataggtcatggcatatatttccttttgtgaccagtgtgggcaggtttaagggtgttgcagcacgtgggaagggttgcagacacactgtgaccctccatcttctcccttcctccaccagtactcaacagtagaggaagctgttgccacccgcacagctctgcacggggtcaaatggccccagtccaatcccaaattcctttgtgctgactatgccgagcaagatgaggtaagaaacctagggagaggaaagagaggaggggcaggggaagccattatctgctagatttcagctgagatccttgccagacctgcagtctctgagcttctgttcttttctcttcttccctggctttggttcctttaattgtaccatggggcttcaaagtggtacctgggctccttttttttttttttttttttttgagacagagtctcgctgtctcccaggctggagtgcagtggcgcgatctcagctcactgcaagctccgccttccgggttcacgccattctcctgcctcagcctcccgaatagctgggactacaggcgcccgccaccacgcccggctaatttttttgtattttcagtagagacggggtttcaccgtgtcagccaggatggtctcggtctcctgacctcgtgatctgaccgccttggcctcccaaagtgctgggattacaggcgtgagccaccgcgcccggccatcctggctccttgagtgggagtgatatcacctctatcctaactgtccttgtccctcctctccccacagctggattatcaccgaggcctcttggtggaccgtccctctgaaactaagacagaggagcagggaataccacggcccctgcaccccccacccccacccccggtccagccaccacagcacccccgggcagagcagcgggagcaggaacgggcagtgcgggaacagtgggcagaacgggaacgggaaatggagcggcgggagcggactcgatcagagcgtgaatgggatcgggacaaagttcgagaagggccccgttcccgatcaaggtcccgtgaccgccgccgcaaggaacgtgcgaagtctaaagaaaagaagagtgagaagaaaggtaggtacttagctatggggtacgcatacccactagtaggtgggaaagggacccagatgggatgggacagagggtcagatgcatcatatctggttcacttttttccacctcagagaaagcccaggaggaaccacctgccaagctgctggatgaccttttccgaaagaccaaggcagctccctgcatctattggctcccactgactgacagccaggtgagtgctcttcttcgtgccctgctccctagtggcactgaggcttgaggtcagggtgaggggagattcatgtgactgcgagagtgagtcggcccaagtacttcctaggtttaggataaactaagcatcacaaaaaggcagttttcagttaattggtataacatagagaaaccagactcaggagggtaaagatagacacgcagatagcagctgaagtttgtggatgtctgggaagctggctgtgccgaccaggcttcttagaacttgattttaggccgtgcgtggtggctcacgcctctaatgccagcactttgggaggccgagtcgggtggatcacctcaggtcaggagttgcagaccagtctggccaacatggaaaccctgtctctactaaaaataacaaaaattagccgggtgcagtggcaagcgcccgtaatcccagctacttgggaggctgaggaggagaattgcttgaacccgggaggcggaggttgcagtgagcagagaccgtgccattgcactccagcctgggcaacaagaacaaaactctgtctcagacaattaaaaaaaaaaaaagaacttgattgtatttagctgagaaatcgtgttttataaattcatttccctgctttttaagagtttttgcatctttaacttagtttcttagtaatgggccttttgggaattttaggcttatgctactcaaaaaagagatttgttcacatctacgctgacggtagggagctagggaaataccaagggccaggcatggatggtgccagtacctgtcaatgtgtgtaaaagttgaaacttggtggctaggcatggtggctcatgcctgtaatcccagcactttgggaggctgaggtgggcggatcatctaagcctccatctaagccaggagtttgataccatcctggccaacatggtgaaaccccatctctactaaaaatacaaaacttagtggggcatggtggcagacacctgtaatcccagctactagggaggctgaggcaggagaatcacttgaacctgcgagtcggagaccacagtgagccaagatagcaccactgcactccagcctgggcgacagagtgagactgtctcaaaaaaaaaaaaaaaaaaaaactggcggggcgcggtggctcacgcctgtaatcccagcactttgggagcctgaggcgggcggatcacgaggtcaggagatcaagaccatcctggctaacaacggtgaagccccgtctctactgaaaatacaaaaaaattagccgggcgtggtcgcgggcgcctgtggtcccagctgctcagcaggctgaggcaggagaatggtgtgaacccgggaggtggagcttgcagtgagccgagatcgtgccactgcactcccagcctgggcgacggagcgagactccgtctcagaaaaaaaaaaaaaaaggctgaaactaggagggagagaggtgctctaagaaagacaggatgcagttgttgagcccccaaccccttcctgtttaactgaaaagctgaccctgagctaggaggcagggtccaggcacaaatggaggctgtgaccaggactgagctgcctattctctgcctttcctacctggctacagatcgttcagaaagaggcagagcgggccgaacgggccaaggagcgggagaagcggcgaaaggagcaagaagaagaagagcaaaaggagcgggagaaggaagccgagcgggaacggaaccgacagctggagcgagagaaacgtcgggagcacagtcgggagagggacagggagagagagagagaaagggagcgggacaggggggaccgagatcgggatagggaaagggaccgagaacgaggcagggaaagggatcgcagggacaccaagcgccacagcagaagccggagtcggagcacacctgtgcgggaccggggtgggcgccgctagctgggaaaacactagagctgcaggtaccagccactcggccccagggggttatggccacagagggataggcacagtctccaccaccctggagccaagggtctttcacatcacctatccctacatacataccaaatggaaaagtggccatccttttccccccaaacacacccccttaacctatctcttgggacttagcccgaccctccctctcatttcccattaagtctgagaggcaagagctaggttaggcaaggaggtggttggccagagatggggaacagccaggtgccccagtcctctgatttttcctccatcctgcttaccacctccctgggtacttacagccttctcttgggaacagccggggccaggactgggtcacctatgagctgaatcagcatctcctcctgagtcccagggcccctgcagttcccagtctcttctgtcctgcagcccttgcctctttcccacaggttccactttatatccaccttttccttttgttcaatttttatttttattttttttattattaaatgatgtggtctatggaaaaaaaaataaaaatctgacttagttttaaactgtgtgagtggctttctttgggcaggttaagaagccactgtggatatctgagcgtggacatctgaggatatctggagtaggagttgctctcattccatgtgttcctttaggctgactgcttcctgcttattgaacttcccacgtcttttatcccctgccttggccctgaccaacccaaagctgtggaccttcctcattcgggaaggcatggagcaacctgtgtccgtggcggcaccccagcagggctaggagggtgggtcctcttctggttcctggtcctgtgcacggttaaattaggggtttggtcacctgcctgccaccttggtgcctcccacaactaccaccagggggcggcagctcctcgctctgttggcccctgtaaccgagcttcccaagaagggttccactgcccgcctccgacctcccgccgatgtcgtgcctctgttcccgacccgctccctgggcccgggcctcggactctctggacccttctgccgtccttaagtgtcccccagctgacctgctaccgtgctttgcatgggctctcaaaacgccgccgccttgcagctgggattccatccacaccagtcccaaaagccagccgggaaccgggagcccggagccgggtctctccgcagtgggctccgaattccccacctcaccgcgcgctcgcccgttttccgctgcgggcggggactggcagcttcgcgctcccgggtgcacccgccccgccagctcttcggaaatggcctggcgccgtggcctggacgtcctcccgcccgagtgccctgccgggcgctgcgggcccggtccgggaggggcgccgcatctgtatgcgccccgcagcccaggagcgccgagggggcggacgcgcggcgccgcctccgcccccgcccccgccgcgcgggcccggctggccggggagggtcggaggctgggctctcctctcccgcgcggcgcggagccgcctcgctcctccgcaggcggagtcttcttcccccgccccctccgtctcgctcccttgttctcgccggggccgctcagacctgcagcggagccgcggcgcccgctccaatcggctcggggctgtgcccccgggacccggcgacgggggcgggcgggggcgcttcccgccggcctgggcccctcggcagtgccaggtaagggcgcctgccccggagcaggggtcgggaatccgcggaggggtaggagggggcccgcagcctgcgggggtcttcggaggggtgcgctccgtggctgggagcccgctgccggctcccttctcccgcgctctgcctctttcccttctcccctcgcacctctctccctctttcttctctcgatttctcttcacccttccttctctgcctgtttgccttccttatcccttccctctgtctccccaacccttccctctccctcttgtcctttttccatctcctctccctctttgcctttttctttctctacctttctcccctttcctgcctttctcttttctctttcttgctctcctttccctccctctcctctccccttcctgctatcctgtttcccactcctctatccccttccttctcgcctcctcatcccgccttctctctggtccccagccttcctccggtttcccccttccctcgggagcaaagggactgtcaggtgtgtgtctgctctgagggaggaggggcagaagccacagctacctgaggggtcctcccccccgcccctaggagaaaggagagcagtgggaagggtctcctctctagctcccttcccgtggcccctccctgcctccacccctcctgtctgctccttctcccagaattaagttcccgaggcctggcttgacacccccgaagctgaggtctgcccctgcctgcccggaactgcccccggtgacccgtttccaagcctggcccctaggactcctctctgccttcagacacccaggctgctgccctggtctctctcattctgtctcttgccactgttctgtttctgtctctcatccagtcatttctctgccggacagtccctgagtcagtctagccgtcagtcattatctgtctctagcctctgggtggacctctctccccggtcacctccccctgtcccccaccctgtatcctcttccttcagctctggctcccaactcctgtctcacgag

SEQ ID NO: 6381 - DNA, 6000 bp, Homo sapiens
ctacttgagaggctgaggcaggaggatcacttgaacccagaagttcaaggttgcagtgagctgtgatcacaccactgcactccaacctgggtgacagagtgagagtgagaccctatctctaaaaaaaaaaaaaaaaaccctaatctttgtcaaacataatgaaaaccaattaagaaggggaagtttccatatttaagtattcaaagctggagtcacttaaatcctgagaaagaagactgttaaggccccatgacagattggacccagcaaaagaatcaagaaaatgcggagatctggcctgccacaggcagtgcctctttatttctttcccactagtgctgggctggctccatggaatcccaccaagtgcagcagacagaggagtaatctgttggaatttttgtctctggtgtcagagcaaggattcatcattatctccagaagagctgaattaattaaccatcataacaaagcagggtcagctgcatccaaattctcaggactgcataaaccctagaagacacaacttcctttgaacttatgaatatgcccaaaaggcaaacagagcatacactaaaaagggcttaatcactgaccgagtctcctcatttcatcttcctttctttctgacctattttggccttttctttttttaattttttcttcttttctcattaattttcatctgcttttcattttctaatgaagtaaaggcatctaaaactactggctcaggaaggccccatctaatcgaccataggcagtgatccctgggactctgggaagaaagttggctttaatttaaagcagggtttccttctgctttaaactaaagcacatagatatggggcacatagttacgagaagaaggatggagtgagcgcatggactgtgagttgactccagggagagatttgggtcctttgttggtaacctcagacttcccagctctgttacaaaaagcaagaataaagtgctgtctattggatctagaaaaaaaaatcaggaatggagtgcatgagctttgtgctctattcctttgcattagcagacacgtctaacttgtctctgaaagggaatattaacccgggtgtggtggcgcacatctgtagtcccagctactcgggaggctgaggcgggaggatcacttgagcccaggagtttgaggctgctgtgagctgtgattgtgccactacactccagcctgggtgacagagtgagaccttgtctctaaaaaaggggggagtaggggaatattagaacatgactgcgtgggggttgtgtgtgtttgtgttttaactatcacaagcagcatgtcccaagccataaccttttctgtccagtaggtgtcagctacgcacagcctttctctttctaaatccatatttgtaagaaaacggcctttcatccataattttccctagttaaagggatcaatttcttctgatctgaagcacgcaaaacagctgaaacagtggctccgatattggaaacagaattgtactacgtacttgggatatggccacactgaggactgtgcgaagggggtgacaaatgttgggggggcccaggtgaagtcctgtgggtctcactgagcagataagtgttaggatcaaggtgagtctctaaaaggcacagttaagacaccaaagcaaaaacacagagtttccctcaggtgaaagaaattgaggctttgaccagtagctatagcatcctgaaaaagtgctcagtgtaaactatcaatctcccatttgccctcaaatagactgtcttgttttttacctcaggtaaaatatttctttaagcctcaggtttctaatttttaaaatctttaagataactgcctcgtctgcccaagatactacatgaggaggaaaaaaattgagatattgttcagaaaaccatttgtgggctataaagcactatttaaacgtagagaatagaataaaaatataaaggcaaatgcagaatagagtaatcccagcactttgggaggccgaggcgggtggatcacaaggttaggagttcaagacgagcctaaccaacagggtgaaaccccgtctctactaaaaacacaaaaattagccaggcatggtggcaggtgcctgtaatcccagctacttaggaggctgaggcaggagaatcacttgaacctaggagccagaggttgcagtgagccgagagccgagatcgcaccactgcagtccggccagagcagcagagcgagactccttctcaaaaaaaaaaaaaatgctcaaaatttaataaacattagtttgtaattttttacagatttttgtcaacatattacaccaaggcttttctttctctcttgtgttcaatgttagtcacctggaattttgacacacttaagagtttatgtcacaaaaagattccaacctacagagaggcacttaatataaataatgctccctttgaaagtggggagattcctttcctagctttgtttgtttgtttgttttggtttggtttttttaaagacagggtctcactttgccacccaggctggagtgcagtggtgcgatcttggctcattgcagcctcaacctccatggctcacacgatcctcccacctcagcctcctgagtagctgggattacaggcgtgagccaccacacccagctaatttttgtattttttgtagagatggggtttcaccacattgcccagtctggtcttgaactcctgagttcaagcactccacctgcttcggcctcccaaagtgctggaattacaggcatgagccaccgtgcccagcccctttcctagatattacatcgcaccagtaatcaatggtaataagccacttataaattccaagtgctaaagaaatagaaatactaatcttcagcaactcttcctttccaacgtgtgcacctagtaccgctgtattccaagaacgtatttgatcccataacccccttagcttcttagttcataatttgagagggctaaagcttaccatatcgttatcagtttgcactggttttagcaagagacctcaaattcatcacattcatgttttatcccacattaagtctgcatcatataaattagaactaccaaatattactgaaagaactcacgtttaagaagcagaaacattatttgttttatatggtgatgttgaaatcggagcagaagtcttcaaatctgaatgtatacaaatgaatctatcaaatttttcctcagtgctttctaaggttgtcaggaaaggctagaggcaaattcgacattttttcatttcccatgactcattccctcccatggagtttcgtgctatatattccctgccttgtctggttttttttgttgttgtttgttgttttttttttgctgagtctttcaatttgctgtgtcttgaactagcaaaaggaggagaggaagttcctcccaacctttgaaacctcttaatacttgctgagtgatcaagggggcagatgactgctgattggactttaccccatttgaaaaagcttttgctatgatagctcaacaaacctcattttaaggaattaagtatttattttccttaaaacccaaaatcttttggaacattttccagaaagtgaggccaaatttttgtagttaggggtcagtttgggggaacttaattttttaggcccactttaaaattaaataattttgcataatatatttaataaggctaaaaataactttattttagacttatagtgttgtccactatattgcttcatgctgttttttcgaaataatttacaattataaatagacattgttgctctcaccttaaggcagcagtttctgagtgaaattcttcaagaaagtggaggcatcatttcgatatggtaataagctagttattctaacatcaacaagtatgtttcatgatcagcgatatactgataattccccatgtgtgcttttcaaatagtttataaatgcaaaaatattagaagttgcaggatcagggtttgagtcattttttttcatgtttcagccagtcctaaataagagctgtgaacaacaaggctacctggtgattttgttttttatctttttgtatgtgcatgtggtttttctggctttttgttttgttttgtttttgagacagggtcttgctctacctcccaggctggagtgcagtggcgtcatcatagctcactgcagccttgacctcctgagctcaagcaatcctccagcctcagcctcctgagtagctaagactacaggcctgcaccactgcacccggctaattttaaaatttttagtagacggggtctcgctctgttgcacaggctggtctcagactcctgggctcacgtgatcctcccctgtcagcctcccaaagcgctgggattacaggcgtgagccaccgcgcctggcgattttgtttcctctgtactcttcgtagctcacaattacgctaaaagaacctttttcccattgttaattccttccatttccctcccccacccgtcgattccccctatttttaggaaactcgaagatgatgtcctttcaacgttctctcctgtattctcaaatacaggatccagtcctaaatattttttaatacattggctagtttatttctgatggcattaaaagtatcggcacaactgttccctgatttataaagctcacagatgctgtatgacctgtaacattatactagctaatgagctctcccggaacagttgacgtggaaggagtttacttccacttggttgcaaggagaaagatggagaaagcgagagacgattgcaaaaagaaataacttagtccattttctcagtgctgtttgggggctttgtgctaatacttaaattgcagaggagggaggagacgggactgaggatggaggggagcagaggaggcaggggcggagcctcggcgggcgaataaaacccctcgctaaagagaagcacgttagtgtgtggagaagccactctcccgaaaccagagggatggggccggctgtgcagtagaacggggatcgaaaagaggaaaacaagggcacgaagaccagcgagaaagaagaggacacctgggaaaggcggaagcagaagacggggaagggaaaagaaacccaaagcaggtggaaaccagatctagagcaacaccgtcaggttcacagtttgtttttctagaagagaagaaagtacctgaggattgctcttttttcctaccgttaatgaaaactacttttgtcttcatcataaaagaaaaaactaaggggaggtaaaggcagtctcctgttttattagggggagaggtgaagggaaatccaggctcactttctgaataagccactgcctggtgcacagagcagaaccatcctggtttctgaagacacatccctttcagcagaattccagccggagtcgctggcacagttctatttttatatttaaatgtatgtctcccctggcctttttttttttttttttttttagcaacacttttcttgtttgtaaacgcgagtgaccagaaagtgtgaatgcggagtaggaatatttttcgtgttctcttttatctgcttgccttttttagagagtagcagtggttcctatttcggaaaaggacgttctaattcaaagctctctcccaatatatttacacgaatacgcatttagaaagggaggcagcttttgaggttgcaatcctactgagaaggatggaagaaggagccaggcaccgaaacaacaccgaaaagaaacacccaggtgggggcgagtcggacgccagccccgaggctggttccggagggggcggagtagccctgaagaaagagatcggattggtcagtgcctgtggtatcatcgtaggtgagttccattccttcccgcggacccctcctctcccctctggtggtcctcctgtgagatcttaacccttcgaaagcattattgttcttcctattccttagaaaaggattgtcagtcacctgagctgtaactcacctccactggtcaagtttgagaggcataggaa

SEQ ID NO: 6382 - DNA, 6000 bp, Homo sapiens
ccagatctatctgatatcaagtgtgggcacttcactgctgctctctctagaatctaaactttccgatgggcagaggtaagagctaaaaggatcgcccttgggaagaaagagaggaaggagaaaagaagtgagggaggaaatggcactcatgagaatgttctctctgaccactcctcttgcccttcaggaggccctgtccccaggggagccactggttgtgtccaccggagatctgcagctcctgtacttctatgctgggcaatgccagagccactactcagccctgcaggcagccgtggcagccctgatgtccagtacccaggctaatcagcccccgcgccttttcgtgccccacagcaagagggtggtggtggctgctcatcgcctggtgtttgttggggacaccctgggccggctggcagcctctgcccctctgagagcacaggtcagggctgcaggtacagcactgggccaggcattgcgggccactgtgctggctgtcaagggagctgccctgggctacccatccagccctgccatccaagagatggtgcagtgtgtaacagaactggcagggcaggccctgcaattcactaccctgctcactagcctggctccatgaaggtcctttggcacagctctgctcctcccctgcctgccaaagcccccctttaggccttgggtggctggaaggctttgttaagggactaggagaaatgggggtatctttcccctttcctgccctttctgctcatctcaacctctcacagaggtgtcttctccccctaacctacagctttttgtacaagccattttgtgtaaattatttatatttaatattattccctgctttgtcaggagcaggtactaggctctggggcagtgaggaactagatccttctctcctcagcctagggtggaggtcactgcactaccacccacctctggaagactggctgtgaaaagtcaggtggcagaaacctggggccacatagagcctctctcttttcctgtttcttggctctagaagatcagcactgcactgttagctgagagtgcgggcaagacataaactgtccagagtttgaaggttctcggaaagaccggagggcttctccccacagaaggcggagagagctggggctcagacatgggtgtgcaccttaataaaccctgctgtctgcctccctgactctgcttcttgggagcatggtgagcagccctggtgctcagcagccatacctatgggacacacactacgaaaaggatgcctttagggtttgggggagattttactcctttcttcaacaactattcactggacaagttctctgctcccatgacgcgccaggcacagttctgcaagtatattgtgaatgtattgttctagtgggatacacaaataagtcagttaaaatacataaataaaaacataaacctgccatagattcgacatttgctggtgatggacgtcggcaggatgatttgaagaaactaactagatgaggggagagggcagtgaaggagactttagacaggatggttgggaggtgagatctgaactgaaacccagaggaggagagtctgaggactagtgttcccagaaggcagatgccgatgactgacctgagggccttcctccaagacttcattgtcatatgatgtcattagagaggtgtcaatgtggagagaagctgaccacataagggccttgaaatgtgccatcctggagaggccaccccaactaaaggcccagcctcagctttgcaccacaggatagccctggccaactggagactgctgctggccagtctaggcaccctcttccttaggtgacaccaagagggtataggccttttcacttggcttcccaggtagatcatctcaggatgacctgctcatcatccttctggacaaaccattttctggaggatccgcggttgcagatgaatgcaatgtgttgaaaggtcagtcttcaggactttggtgaaattgataagaccgtggcttagatagatcacgctagccatttaccacaagggaaaacatccaagctacaaatcaattgcttcagttctgctttcccaagatattaccatggcatgatgactggattgggggcataatcatagtctgttggcacccctgcacatttgcctcctcccctttaggttcctttctcatctcactctcaaagaaaaatgcactgtcagattctggggccaacaaaattcacccccatgtgttgaagtctatcgtccatcatcttccaaacagaatttcaagagattagcctggaattagaggtttcaattcaagtctctgatctgccatgtagttgtgcatccatgggtaaatcatgccagtccctctgaagtcctggtttcatcttcaatattagcatgatcataatggtcttacagggttattgtgaggacctaacaagaaaatgcatgtgaacagccccacaatgtataaattaagtgattattattccaggacagacacaaggatgcagacgataaatccccaaggaatattggctatacagcaccatagtaaaacctgaagagatgctgaaatgagttgggagaggggaagtggtaggaggctgcttgatgcattagcaaagaaatgtttcggagggatgcagtgactcgcacctgtaatcccagcacttcgggaggctgaggccggagtacggcttgaactcaggagtatgaggccagcctgggccacacagtgagaccctgtctcaacaaaacatcaaaaaattagccaagtgtggtggcacatgcatgtagtcccagctattcaggaggctgaggtaggaggattgcttgagctggggaggtggagactgcagtgagctgtgatcaagccactgcactccatcctgggtaagacagtgagaccctgtctgaagaaaagagtttcccatacgtggaaaatttctgaacagagacaagttaaaagtgtggttcagtggagagaagggggaaagatttcccggctgacaatgatagaacactgctttctagcccttacctaggattagagaataaagtacctatcaggtaacaaatctcttagagatgtgtgtctctacctttaatgtataatacctatgcctggagatctggataaaatacagattatgattcaagggtctgggtgaggcttggattctgcatttctaacaagctcccaggaatgctgctggtccatgaaccacactttgagtagcaattctagaggttagggaagactcctgtgtagcaaagatgtttaggctgagagctgaaggatgagaaaaatgtgactaagaagctttttaggtgcaggaaccagcttgttcaaaggcctcgtggcgctgggaaaactagaagaaggtctgtggctggagtgcagagagtttggggaaagaagtgagatggaactacagacagcatgtgaccaggcatgtagaaccatgtatgaggtatctagatttttaatattcactttgacagtgaggagacaccactgaaggctggttagcaggaaagatacatgatcagatctgtattttgaaaagatcattctatctgactataaatgacatatgggtgataaggaggtataaacaaagcggacgctgaacaccagttaggaattagggagctaaagtggtctttgcaacaggtagcttgactaataatggtagagatggagagatgtgggatgtctgagaatatataggaagtaaaatgggcagaattttgtaaagaattcaacatggataaggaagagaaagctctaaaggctgttgcctgagcatttggccacaatgcgatgttgagggtgccattcgctgcagaaaaaagcagtggaagccaaccaagttatgggggaaaagcaaaaatttcgtcttgaacatattgagtttgaggtccctgtgagtcatccaaggtgaaggtcaaataagaggtggcttcataggtctggagctcagaacagaggtggaagctggagatgtcagtctgggcgtcaggtttgtattgtttgtatgggtggtgattgaagctgtgggcataggtaagatcccaaagtggagacagtgtgagatgagaggagggcctaggactaagtctgtgaggattccagacactgaaccatggtgtctaaatgatacagacgggaatggccctagaagccagcaccacagcctcatcactaccaatacagacccctcctgcagttgcgtcaccccgctggacttcaatcattgcctcaagaaccgggaggataatggcctgcccatgctcagcaccaatgccatgagctggaagacgatttctgcaatggagaaaaggggagcaagagagactcagcagcaaaggaagagagtgtttagaggaagaggggtcaacagtgccaaatgctgttgagaaatggagattcaaacaggatgggagtgatgaaacccaagaaagtggtctccttgtagaggactgaagctagggctgatacagggccaagacagtcttccatatgcataagttgtactgtaatagccagtttacatgtctgtctccctggagtaaaggtctccaaagtggaacttgtccaccctgttatccttaaagtctagtgcaagtcctggaacgtagtggacacttaaattttactgattagtgaatgggtgaatgaatgaatgaatgaatgatggcaaatgattggaagcagaggaagaatctctggcatctgcctggactagctactatccttcagctttttttcttttttaccgcaatggcccgcagacccaggaaagagacgacagagccccccttccctccctcccctgggccctggccccccttcctctctctgacgaagagtctggaccgaaggttctgctgacgtgggaaggggaggagagtctagaggaaggggaggggaaagcagcgcagagatcgcagagaccaaggaggcgcccgcggctgcagagctgcagagcgggatctcttcgagctgtctgtgtccgggcagccggcgcgcaactgagccagaggacagcgcatcctttcggcgcgggccggcagggcccctgcggtcggcaagctggctccccgggtggccaccgggacccccgagcccaatggcgggggcggcggcaaaatcgacaacactgtagagatcacccccacctccaacggagtaagtgcccgagccccaggtggcgacgccatcctctcccagcacccccgcccccgcggagcgtctggcattttcctcctgcgcatccctcgcccctgactgccttcctagccctccctcccacctgccccctgcccttgctctgcggtttcctccgcttcacccttctcctgccaccccctgccccccaacagcaggtcgggaccctcggagatgcggtgcccacggagcagctgcagggtgagcgggagcgcgagcgggagggggagggagacgcgggcggcgacggactgggcagcagcctgtcgctggccgtgcccccaggccccctcagctttgaggcgctgctcgcccaggtgggggcgctgggcggcggccagcagctgcagctcggcctctgctgcctgccggtgctcttcgtggctctgggcatggcctcggaccccatcttcacgctggcgcccccgctgcattgccactacggggccttcccccctaatgcctctggctgggagcagcctcccaatgccagcggcgtcagcgtcgccagcgctgccctagcagccagcgccgccagccgtgtcgccaccagtaccgacccctcgtgcagcggcttcgccccgccggacttcaaccattgcctcaaggattgggactataatggccttcctgtgctcaccaccaacgccatcggccaggtgaggcggccaggcgggccgcgggtctgggggcgggcagagagcggcgagggcggggcctcacgcccgctgcacccttctcacatccccagtgggatct

SEQ ID NO: 6383 - DNA, 6000 bp, Homo sapiens
gggagacggtggctctgaacgagggggcggggcaggggcgaagctgcttggaggggaggatcaaggtacaggaccctgtgctagaccccacagagaggcctgtgactccaggggggtgagaggggttagtaacaacaggaggtgctaactgcaaagaaggtggtagtatagctcataagcaccaagcaggactgcaggggatgtgctaaaagagtgaggtctcgactgtcactgggaagggggcaggataggaatggaattacacagttccaggagggcctggcccttgcaactggaagaagtgttactacaggacgtagcagtagaagggtgtgagaggagcaggagggtgtgatggtggcaaacacagcccaggtcagggggaggaaaccaaacgggagctgccctggcctgccaggaagggaagcagctggcagagtgtggcgaagggtgacgactccagaggagaggaggatgtgatgtagaggggacaggggctagggggctggagcatctgagcagggactaacttgaagtgggggaagttctgctaaatccctgtctctggacccgacagggcagcagacgccctcctaaaggcagtggcagccagcagtgtcgctgagaaggccgtggaggcagctcgaatggccaaactgatagcccaggacctgcagcccatgctagaggccccaggtgaggcatggacagctggggggagggcagtgaggcccctagggagctagagaggctcaggtgtggggaaacagatgagaagccctgcaagggaagtggggatgggaaaaaacaaggaatgagggtgcaaggaacacagggtgggggccagacctggtagtctggggagtgggacttgggaatgtatgcagtaggataatggggggtttggggtctggcggtgagaggctatgagcctgggaattccaaagtcctgggaagtgcccagtcaggaataaagctgcagccactccagcccaaggccagttaggcccctctgattctcagctatccctacccaggccgcagacccaggcaggactcagaaggttccgacacggagcccctggatgaggacagccctggggtatatgagaacggactgaccccctcagagggatcccctgaactgcccagcagtcctgcctcctcccgccaaccctggcgaccccctgcctgccggagcccactgcctcctggaggggaccagggtcccttctccagccccaaagcttggcctgaggagtgggggggggcaggcgcacaggcagaggaactagctggctatgaggctgaggatgaggctgggatgcaagggccagggcccagagacggttccccactcctcggaggctgcagcgacagttcaggaagtcttcgagaggaggagggggaggatgaagagcccctgcccccgctgagggccccagcaggcacggagcctgagcccatcgccatgctggtcctgaggggctcgtcctcgaggggtcctgatgctgggtgcctgacagaagagctcggggagcccgctgcaaccgagaggcctgcccagccggtgagatcctctgtccctgctgtgtgccctcttctcccaaagccttgcctcccaccctttccagaactgtctgatcaccgggggggctttttatctcactcggcttcctctgcctggccagtcttggaccacatcccacctcaaaaaaatagagggcgttcgagctggaaggaaccttacacacctgcaagcccaactccctcatttgacagatgggggaactgaggcccagagcacttaaagtaacttgcccaggccgggcgcggtggctcacgcctgtaatcccaacactttgggaggccgaagtgggcggatcacgaggtcaggagatcgagaccatcctggctaatacagtgaaaccccgtctctactaaaaatacaaaaaaaatttagccgggcgtggtggcgggcgcctgtagtcccagctacttgggaggctgaggcaggagaatggcgtgaacccgggaggcggagcctgcagtgagctgagatcgcgccactgcactctagcctgggtgacagagcgagactctgtctcaaaaaaaaaaaaaaaaaaaaaagtaacttgcccagggttgtaaactaataattaatgggagagccagaacatttttcccccgttctccttccatatcatttccagctctcagtttcctactccacccccacccccacctccgcactttctctctttggtgcccagaaataaaaaaggaaaagattgttccctccctaccctgactctccctccctctcccgggaagaagttgaaatagagaagaaggcagaaaaccgggagaggcggagtttgcccagaaccctctactctgattgggctctaggccttctgtttcctagcaaccacatcctcaccccttcatccctctgccttactgcagtactggctgctgctgccaatgtctgctactaaggccaggcacctcctgcctgggacacatgatatgctgatgggaggggactagagggaggaggtggaagggctgtccctgcattgaaggtgtcagaggaaaggtggggccctgcctgggagaagagggggttttgcaatccaaaacaaatgttggcgatccccctgctccaggctgtgcagggaggtgcctgagacccttcagctctgccacctcagtcagggcaggaaggtgggccctgtcctcggggactgagtctgcttccccctctgtctctctagggagctgccaaccccctggtggtgggagccgtggccctcctggacctcagcctggcattcctgttctcccagctcctcacctgaggctacttcctggcctggttctggctttggttgcgtgcctcttcacccctttgacctgccttttttctcttctcctcttcctggctgtgttttctcctatctttctttctcttcttcctttcttttctgtgctcctttgtttttttctctcgctttttctttccctgtcttctttcagattatctcatttcttctggatctgtctctgtattcctcactcccttccccatcccaaccccttctttctctagattgtttacatatgaagggcttttctctctcagagttgctgtcttctctgagacacacaaatctaagtcagaccattgctccacgccctcccaccttttctttagacctcaacttcgctgcgggtgggggtttggtgtcctaaggagactcctggaagctgaatggagaggaggaagaaaatgaagaaggagtgattgaatgtcgggcaaggcactggctgagctgctgtggctccctagcctaaggggcctgctgtccctctgaggcctagtgaaaaagctgcaggaggtgcatcctccacctctaatcttggaggctattatcttacctccaagcactgagctgggttactgcccaattccatccttccctgaaggagagaagggaagtgaaaagtagagtaactccccagcatttccctctttttctcctcatcggccagcccctcctccagccccctctggtggcatgccatgccaagagcaacgtgtaaaggaacagagaatatccaatgcagtcaagtccaccctgcccagactttgccactgacttctcccacccttctgtctcccccataatagtttatttggttggtctggactcacttgtggcctttgattaaattcctaaggggcctgaagaagacatttctactgcagagggttagaggcacttgagcaaggcccccacatcccaactctgggagttgtggtgggaggaggcacttctgggggataggaccagacaagataacaggagctcacatggaagcagaagctgtgacaagtttagtagtcccaaaatgggttatatcccttccccctttacatcagaatcttgtgaaatgggaaaacaacagaaggaggggatcaaagatagctgatctcacatgcttcccaggcagggcagaggtgggagtcaaacccgggtgacaggtgggtggagagccctgtttgaggttgtggctgatccctctctggtattagtttttcccctgggagcaggaagccctaggaagaggggactgcagggtccccaggggatctttcctccctcccctgcatgaggcagaggcaagctgcctgccaaccccctccctcaaggaatggccttgcccaggaatgcccaccacacataccctcttctttttttctagtcaaactcttgtttattccttggcttgcctccctccttcctcccctctcaacctttacttctgatttctatttcatggaatttgggattgaagttaaactacaacagtgccgccaacaccaagtcttgcaggaaaaaaatacaaagaaatttaacaaaaaaaatatattaataaaaaagttcaaaaaaggggggggattgtcatctcctttggggtgcgatggcttcaaatccaaactgaggctctccgggtggtaaggatgtgcgaggaggcctcttgaagaactccaggcctatcatgctgtctctccgctaaagcctgaggcccgaggtcagaggattcaggaaggctctgcagtcggcccaggagggcggggtcccgtggtggaggcggggagagggaaggaccgcacggagcaccaacccctgctcggccccgtaccaggaagcgctggggggcagaggagcggagttgaggcagaagccaggtgaggctggagtcctggggtaggcaggctgtcgctgccgctgccgctgcctgagatggaaatcgggggaggaagctcgcggaagaaacagcggagggtcgtggaaaaaaaagcaatggctgagctagggatggggtaccaggtagggggaggaaacggtagagagaaataggtggggctcccgcgcatgctcaataggaaggggcgccggtggggtgcggacgcatgcgtagtgggcttctcgggcggtggggtgggcgcggaatttggagacccacttcgggaaaggtaaaatgcgggcgcaattttagggtacctgtgggacccgggctcttagggtcttgacacaggacgggcctgggccgaaagcccaggcacgcccgaccagagagtgtttctccactcccggactctgccagtcaggatggtggtgccttcgctgaagcttcaggacctcatcgaagagattcgcggggccaagactcaggcccaggagcgggaggtgatccaaaaggagtgtgcccacatccgggcctccttccgcgacggggacccagtgcacaggcaccggcagctggccaaactgctctacgtccacatgttgggctaccccgcccactttggacaggtactggccaggaatacctccctcctgagcttgatgaaggctagtggggcagagtcccagactctctcacctgtttatgccctggttttttaaattctacaatttcagagtcttcacagcctgcactgcaaacctctttccccattgctacccctactggtcatcagctggcctgaacccttcattctctggccagcctcctttagggcaggcatctcctcctctccgctcccatcctcctcaactcctagttcctcctacccactaacgcctgaatttcctaagcttctcctcttgttgaagggagagtgatgagatatgatgccccacaggttaatctggttttaaagaggaagatggaacagggatgtgagtgtctatggtttcacccctgcctcttcctggtctgcccccttcactatagatggagtgcctgaaactgatcgcctcctccagattcacagacaagagggtgggctacctgggggccatgcttctattggatgagaggcacgatgcccacctgctcattaccaacagcatcaagaagtgagagggttctggcaatcacttggaatcagggagatgggagagtagggaccttggaaatccc

SEQ ID NO: 6384 - DNA, 6000 bp, Homo sapiens
tttggacacctagctccaggcctccagcctggactgctcacagtgacagttttgctgtgaggatggaatgaggtcatacagattgcgcgccaagcacagtacctggctcctagcacagagctgctccttcaaacattacttcccgtttctctgacacctgaatgttggtaaattgtggcaaaacaaaccagtgcactctctgaaaaaaaaaagtgcccctgccctgaaggagggaactgtagagcctgtagggacagaaaagaaaggggctggaaggctggctcactcagggagacatgggggcgctgggactgtgcatcccacattctgggagtacttctgtcagagatttcttcgggacttcattggaccctacacttaatttgcagctcagaatacagtatagcttccaacaaggcatcacaccctgtcacctcttctccctaagaaacaaggcacgggtgttccaggaccataggttggtttttcttttcttgttttcccttttgcttggagaaaaggggaattttaggggtggagtgggacaaggctctgtgtggagaaggaaaggttgacaccctaggctgaatatctagaggtgagcaacacagcttggcctgccccagaactcccttctggattcatcttaaatgcctctttctttagagcaccagcctcaggtggattccatccctattctctactcccaccccacaaacttgatgtggcactaaccacactagagtttcttgttggttgcctgcctttactacaaggtgtgtccagaatttgtgggttcttggtctcactgacttcaagaaagaattcgcggaccctcccgtggagtgttacagtttttttttttttttttttttttgagacggagtcttgctctgtcgcccaggctggcgtgcagtggcacaatctcggctcactgcaagctccgcctcccaggttcacaccattctcctgcctcagcctcccgagtagctgggactacaggcgcctgccaccaagcccggctaattttttgtatttttagtagagacggcgatgagtgttacagttcttaaaggcggcgcgtccagagtttgttccttctgatgttcggatgtgttcggagtctcttccttctggttggttcgtggtctcgctggcttcagaaatgaagctgcagaccttcacggtgactgttacagctcataaaggcagtgtggacccaaacagccaacagcagcaggatttattgcaaagagcgaaagaacaaagcttccaccctctggaaggggaccctacccgattgccacggcaggctggggcagcctgcttttaatctcttatctggcctcacccacatcctgctgattggtccattttacagagagccgactggtctgttttacagagagctgattagtcctttttgacagggagctgactggtgcatttacaatccctgagctagacacaaaagttctccaagtcctcactagattagctagatacagagtgctgattggtgcatttacaaaccttgagctagatacagagtgccaattggtgtattcacaatcccttagctagacatacaggttctccaagtccccaccagatcagctagacacagagcgcagattggtgcatttacaaaccttgagctagacacagggtgctgactggtgcatttacaaactttgagctagacacagagtgctgattggtgtgttcacagaccttgagctagatacagagtgccgattggtgtatttacaatcccttagcaagacataaaggttctccaagcctccactagactcaggagcccagctggcttcacccagtggatcccccaccaggccgcaggtggagctgcctgccagtcctgcccctgcgcccgcactcctcagcccgcactcctcagcgcttgggtggtggatgggacagggctccgctgagcagggggcagagctccttggggaggcacaggagcccacggccgggggagggggggaggagggagtgggggtaggggggtgaggggggttagggtaggggggtgaggggggtggggtaggggggtgaggtgggggggtagggtgaggggagtggggtggggggatggggtgagaggagtggggtgagggggggtggggtggtgtgaggggggctcaggcatggccggctgcaggtcccgagccctgccctgcagggacgcagctaaggcccgacgagaaatccagcacagcgccagtaagccgaaactgttgggggaccaggcgcaccctctgcagctgctggcctgagtgctaagcccctcactgcccagcgccggcggggccagctggccgctctgagtgcagggccgccaagcccacactcacccagttcccgcccgtgcctctccctccacacgtcccggcaagctgagggagccggctccaacctcagccatcccaggaaggggctcccacagtgcagctgcgggctgaagggctcctcaagcctggccagagtgggcgccaaggttgaggaggtgccaagagcaagcgagggctgcgagggctgcgagggctgccagcactctgtcacctctcaacagtagtaaactccatgagggcaggcctcacagtgttcaccactgtgtctctagcacctggctatgtgggtggtacacagtaaactatgtagatacttgatgaatagagaaatgagtgaatgaataaatgaataaactctccatcaacagtcatgccccaagtggacccacagctgacctgttctatgctaagcacttagaagatgtggtccctttcctggaggcttaaattttacatttctccaacctcatgtaaattgtgggaagacacgatgcaagagaaatccctatttattccaaacctcatgctctttattttaccagagtactcaaaatggaggccctgagcctaagggagggtccccaagttcatggaatcctggcaggaattacagggctcaaatggtctgaagtctagtgttctactgctagctctgccagttctgttgtcattcacctctggtgaatgacttcccctctgggccttagttctcttctctgtaaaatgggaatgcagtgggggaggagtggtggaccaagctgtgtatgaaaataggggcaatttagtgcatttgactatgtactctgttgtgtgtaattggacacagtgtcctccttcctaaaaaggcttagaggcagggatagaactagatgcagagtctaagtaaactaaggggagagggaagacagtgtgtgcctacttctgtctgtaaacagcaaggtcaggatgtgctggccctctggtgagaggacagacaggacagaggggtggtgggctagagggggccttgccataataagggccctctcaaacatgtctatatgtctttgcctctagatttgcaaaagaaaagattctaaagccctgggatcttcatgccatcaccaagcatgatgccctcctccccattcagaagcaatacacccccttctccttcagagggacaacccagagagaaatgggtggtggggatggaggatggggaggcctggagaagcattgatggggccagggttcctagcagggtcccatttcaggcatcttcagaaagtgcaagagcgtgagcctcctggtccccctccagtgctttcttccggaggatagtggactcagtggacacccgcatccatgccccaaagctttttggcttcagtccaagcagctgacaggttcatccttctccctagggccccacaaacaccacttccggccctcctgcctctatctgggctcttcctgcctggatctctatacccacgcctgcccttccctctgcagagctttctccctcccttcaggagccttatttcgctctctcagtctccatatctatttctttcccccttcttccctcctcccctgcttttctcctccttgccatccctcccgagccccagtatgggtctcccctccttcccctctctcaggctgcatctcccccctccttagtgctcacccctgcacctctttctttgtattcttctcaccctctcccagcctcgccagcatctctcctcccccgcccggcttcggcctccccctgcctccccatcttcagctcagtctcctccccctcgctcctcttccctcccctccgcctcgccccactcccagcccgcatgccaggatttctctcctccctgggggtctcagtgcatctccttctcctctctgcctgcctcctccctcaccgaagggttagcggacacccatccttttctgcttggggaccccaccaccacccgcaacactgccgctgtctcttcttcaccgtatccttctctacccaccctcttctctcttctcttctccctgcccctttaaatctgcctggcccagcctcccccgtgatgctgggatggagcaaacattgatttgtgctgggatggaatcggaattttgatttatttttcctctcccaaccataagaagaaaaaaataataaaaacaccccctcttgagagccccctccccctttgcatccagctcccagctcttcttccctatctccatccaaggcagattttttcccctacactattctcatcttcccccacccttgccactacctcgcccccccacccagcctgctcctccagctggggagagaggggactctccggactcccccacctttcctctctgggttggagcagtctctccggaaggggagggggcttggcttgtccgggcgaggtgggagtggaggtatcctgccatggatgctgtgccggggaggcagcctgagccccagcccacatggtgagtagcctgccccctcccttctgcctgtctgcccgtccccaccctggcctttcccctgcagagcctcccctgggccccatcccccgaaaaaccccccgaaaaaccccccgaaaaaccgtctgcctaccttggtccgatctccccgctacatattctaccccccacccccatccctttgccagagacgccgaagaaccggggcagaggggtcctgacagcagccagggaaacgggtgccctacgattctgcccagccccctctcaggacccccaaactgccatccacactcgacacttcggggttctaggttggagaattgggactcccgcttggggttggggccccaagtcctgggaggggcccgctccacaaagacagaaatgggggaagcccccattcccccaaagcttgggggctgctggaagatgctgccaaaggaggggggtggattggggggcggcgctgatgccccagagccaccgggccagggagcggcgggcaaagaggaggggcctctctcgccacttgcccccctccctctttctccgcagccactcaggatgagggtccggccctgcctgccctcgctggggcccccccgcccggccccggtctaactgcccccgccccgaggcctcgcccggctccaaggcccccagcaggctctccagtcccaggatgcgctgagccgccggggggctgaggccgcgccaactacatgcatgtcccccgggggcaagttcgactttgacgacgggggctgctacgtggggggctgggaggcggggcgggcacatggctacggcgtgtgcacgggccccggcgcccagggcgagtacagcggctgctgggcacacggcttcgagtcactgggcgtcttcacggggcccggcggacacagctaccagggccactggcagcagggcaagcgcgaagggctgggcgtggagcgcaagagccgctggacgtaccgcggcgagtggctgggcgggctgaaggggcgcagcggcgtgtgggaaagcgtgtccggcctgcgctacgccgggctctggaaggacggtttccaggacggctacggcactgagacctactccgacggaggtgcggggcccggcccaccagtgtctgtctgctcgt

SEQ ID NO: 6385 - DNA, 6000 bp, Homo sapiens
gaaataccaggccgggcgtggtggctcatgcctgtaatcccagcattttgggaggctgaagcgggcagatcaggaggtcaggagatcgagaccagcctggccaacatagtgaaacccgtctctactaaagacacaaaaattagctgggcgtggtggtgcatgcctgtaatcccaggtactcgggaggctgaggcaggagaatcacttgaaccacggagtcggaggtttcagtgagccgagatcgcaccactgcactccagcctggtgacagagcaacactctgtctcaaaaaaaaaaaagaaagaaatacctgaggccgtgtacagtggctcatgcctgtaatcctgacagtttgggaagccaaggcaggtggattacctgagcccaggagttcaagaccagcttgggcaacatagcaaaaacccatttctacgaaaaataccaatattagctaggtgtggtggcatgtgcctatagtctcagctactcagaaggatcacttgagcctgggaggtgaaggctgcagtgaaccaagatggcaccactgcactccagcctgggtgacaaagtgagaccctgtctcaaaaacaaaaacaaacaaaaacatgagactgggtagtttgtaaagaaaagaggtttaggccgggtgcagtggctcacgcctgtaatcccaacactctgggaggccaaattaggcaggcggatcacaaggtcaagagatcaagaccatcctggccaacatggtgaaaccacatctctactaaaaatacaaaaattagctgggcatggtggtgtgtggctgtagtcccagctactctggaggctgaggcaggagaatcacttgaacctgggagggggaggttgcagtgagccaagatcacaccactgcactctagcctggcgacagagcaagactccgtctcaaaaaaaaaaaaaaaaaaaaagaaaagaaaagaaaagaggtttaattggctcaccgttctgcaggctgtataggaagcatggtgctggctcagcttctggggaggcctcaggaagcttataatcaaaacggaaggtgaaggggaagcagggacatcacgtggtgagaatgggagtgagagagagagagttgtggtggaggtgccacacgcttttaaacaaccagatcttgtgagaactcatagggtaaatactacaccaaaccatgaggggtccgcccccatgatccaaaaacctcccaccaggacccacctacagcattggggattacatttcaacatgagatttgggcagggataactatccaaactatatcagtgggggacagaggggcagagaaaagaacaagggaagaatccaaattctcatatcttccatcctccaaaacagaatacttcaagaacagattatgccacaggcatgcaataaattcccatttattgacagtctgaccttgctggcaggatggttccaaagttctgttggaagccagctctatatcctcaatctagcaagatgagcagttttccagggcacaccatggtaagggggcccacccaatcctgcccatctgatcccacaggctggcccccggataggtaacttggtggcaactctagtctctcatcatgtacagggggtaaaccagttcatgcgaagatcatgtattaagctgcctaacatatacaaaaacactgctaggtcctgaggaaacagagatgaataaattacagtcttcctctgaggagtttgaaattagcaagggagacagacacataagaagtaaaataacactacagtgagatatgctataaacaaacctgggaggagatgtaagggaaggctttatagagaaggtgacatttgcactgttcaaaaaaaaaggataaggccaggtgcagtggctcatgcctgtaatcccagcactttgggaggtcaaggcgggcggatcacgaagtcaggagttcgagaccagcctggccaatatggtgaaaccccatctctactaaaaaatacaaaaattagccgggcatggtggtgcgcacctgtagtcccagctactcgggaggctggggcaggagaatcgcttgaactcggaggtggaggttgcagtgaactgagatcacaccactacactccagcctggttgacagtgagactgtctcaaaaaaaaaaaaaaaaaaaaaaaaaggccaggcacggtggctcacacttgtaatcccagcactttgggaggccaaggcgggcagatcatgaggttgggagatcgagaccatcctggctaacactgtgaaaccccgtctctactgaaaatacaaaaacaaaaattagccgggcgtggtggcaggcacctgtagtcccagctactcgggaggctgaggcgggagaatggcgtgaacctgggaggcggagcttgcagtgagcagagatcacgccactgcactccggcctgggcaacagagcgagactctgtctcaaaaaaaaaaaaaaaaaagataagtagggaataggagattgggtggtttaggcaggaggaacaatatgaggcttgccggcttgagagaatatgatattcagtatttctatttgaatacagaatagggttccagaaggggaatgtaccttgagaagtaattaggatccaggtctgagcagtctcatatgccaggctattttgactctaccttgtatgctcatataatctgggtatacatcaaaatcagtgcttatttttttgagacagagtttggttcttgttgcccaggctggagtgcaatggtgcagtctcagctcactgcaacctccgcctcctgggttcaagcgattaccctgcctcagcctcccaagtggctggggttatagccatgagccaccatgcccggctaattttttttgtatttttagtagagacggggtttcaccatgttggacaggctggtcttgaactcccgacctcaggtaatccacctcggcctcccaaagtgctgggattacaggagtgagccactacgcccggcctcagtgcttgctttttttaaaaaaaaaaaaatgctgatgaccaggcaccccctcccctgagaatcctgattttaaaaaagaaactttccagtagcagtgtgaaaaatgacccagggggaaggtgactaggagactagcaaggtggctctcatggtagtttaggtgagagaagatggagcctgaaccaaagaggtggaggcaagcatctggaagatattcaggaaataagtggagagggcttggtgacactgatatctgagcgggaagatagagagaaagaggcccaagtttctggctttagagaccaggtggttgtcagttagagattatttctaagccactctcagttcttgttcttttttctttttctttttctttttttttttttttttgagatggagtcccgctctgttgcccaggctggagtgcaatggcctgatctcggttcactgcaacctccgcttcccaggttcaagctattctcctgcctcagcctcacaagtggctggggttacaggcgcccgccaccaggcccagctaatttttttgtatttttagtagagacagggtttcgccatgttaggctggtctcgaactcccgacctcgggtgatctgcccgccttggcctcccaaagtgctggtattacaggcgtgagcccaccgcgcccgacctcagttctttttctaattagaaaattcactgattgtctaacaaaactccaccatctgcttctttgaacctcacctatatctgcagggaaagaactgggtcagaaagggcagtaattgtagaagcaggtaaattaagggcttttcaggccagaagtcacttgtgatttttccactgtgcttcttcccctggggagagagaagcttaagtccacttccttacacgttgctcccaggtggcaaaacagaagtcactgctcaaaggtccgattttcaaggggaactccctagacggcagatcccctttaaaacagctgagacaaacacaagggtaaactttttcaaaataatctgccatacaaagtgaagagaagcccaaagacatacacagtgataaataagaacaaaaacatagactaacggacctcgagatactttaccgtcaattaacaataaccatgttaggctgcccaactcacagagtcaaaggacagacctctctccttgcgcgcctctgcgccaaaccgggtttcggcttgcttatcgtgggctctgaacggtcactgtgcggccagggaagtctccagcacagcctcgggaagacattcctattacatatttatcactttggcgctggccattcgtgacaggtgggagacgagtgaggtgagattcagatgttgggacccttgcatgggacagatgcccaaagcttcgccccttccccggtttgggggccacgaaccgcctctcagggctcagcctcagcagcaggtggttcagccggaaagtgcttcgaacccagacgccgcctgcgctccatctccccggccctcgctagtcccgtcccgcggggacagctctcgggcctcggccagcgcgagcctcctggccaagagctctcaaaccccaaatctttccaggagcaagcgagcggcctagcagccactcctctcccgaaggggtgtcagggtcctcgctgccaggcctcagccccctccccgggaagccgtcgcgaaggagtccccaggggccgcagcagcgaaggccctctgcgttccaggcaaggagctttccgccaggctgaggtcgccgccggtgagggcggaagtggtaagactgacgtgtcctgggccgcgctgccgatcgccgggaggacccccgcctcgccgaagacgggcggggcaagccgagcctcacggggtccccggagctgggccgggcctccagatggagaaggcgcaacggggagttcttgagtaagccagagcggtgtccagcgcggtgtagccgcagccgccgctgtcaggcgcagcaacgggcaaccccgtagaagtcggtcggcaggtcctctccaacccgccgctaccgcgccgctgtgggagagaccccagcaggagcccaaaggcagctacgggggcgcgaaggccgctggcgccgcctcggccagcccttcccgcgcggtgaggaccccggggctgtggcgggaagggacccgaggtgcgagaccgagcggcgttgccatggaaacgggccagggcgcgtagtagaggccccgggccagacgggctgcgggtggggtgaaccccaggttgggaggatgagagagcagaggtggagcggggtctttgggatagagagacgtggggtagggtgaggcggggagggggccaatgggagcaagtggagccaggggacctcagttcgaggcacctgacctggggtttctgtaacctccctggtttctataacctcaggattcccccaaacaggttccactgccttaaggatgacagtcgtagggaaccctcgaagttggagctgccagtggttgccaatcctgatactgttgctgggcacaggccatgggccaggggtggaaggcgtgacacactacaaggccggcgaccctgttattctgtatgtcaacaaagtgggaccctaccataaccctcaggaaacttaccactactatcagcttccagtctgctgccctgagaagatacgtcacaaaagccttagcctgggtgaagtgctggatggggaccgaatggctgagtctttgtatgagatccgctttcgggaaaacgtggagaagagaattctgtgccacatgcagctcagttctgcacaggtcagcctctccacattggctatcacgtagccctccttcccagagactaacagtgccttacatttatggttcagggtacctttatggaaattgtctgatttgattctaactacaatacaacccagtgtggcaggcaggttaggtgatgctattctaattcagttgactaagatacatacttgctcagaagttactt

SEQ ID NO: 6386 - DNA, 6000 bp, Homo sapiens
agctgcaggagctggagcctgagaataaatgtgaggccccattccgtgagagtctgctcccagagcccgctgaggaaacccctttccagtgtggccctgagaggacagcaggaaggcctcaggaggatgggagcagaggaggttccaagagaaaccctccttttccctgccctctcctcagggtgcctgcttaccatcatcctgctgatgcgggcactggaccccctgctgtatgagaaggagaccctgcagtacttccagaccctcaaggcaagttctgtctgcagaacagaccagggggaggcccagcaggcaggaggcaggcagctgacatgcataccctgcccacctcatccactccaggccgtggaccccatgcgggcaacgtatctggatgacctgcgcagcaagttcttgctggagaatagcgtgctcaagatggagtatgccgaggtgcgtgtgctgcacctggctcacaaggtatgggctgccatgcatgccttcccctggccctcatcccgctggcctccccacgtccctgactttgcccccagtctcaggtgcctttgtggacttccaatcaagatagagttcatccctgcctcccagcttgctcctcttccaggcctttctgtcactcagcccattcttcttcttgccactcactttcaaatcccgagtcaccaggacctccttgtgctgtttcttccccaggctggtcacagcttcatcttccttcagagtgaccgctagcccactcctcccacacattccagcacatctcaccctggagcaacctccaatacctgaaggccaaatactttccagagattcctgagaagttgtccaggctccactttcctagtccttcccaacacattagttttatcacatcaccacagcccacctccattcctgccaaactcatctctgcctcatcaggaccagtccccatgggggaccagtctttgtttacccagcaccctccactggcccctgtacctccgaactccaggcctcctcctcctcacccaccccactggttaccccactcgcagcactgtctgtcccacgtcatgtactgctgtgggctgtaaggtcagcttcccacatgctcccatcctcttcttggctggggtccccaagggcctgtggggcacagagggcatgtgcctaataaatgctggccgaggaccctctcccaggtctcctgggaagcccatcacctccttcctcccttcaccccccaggatctgacagtgctctgccatctggaacagctgctcttggtcacccatcttgacttgtcacacaatcgcctccgaaccctgccacctgcactggctgccctgcgctgccttgaggtaaagtacccatgtctccgtccctgtcacgggtggttcttttcctcttcctctccctcagaagtctgcccatcctacaaggagatgtgcaggaccctccaccccgaacaggtaactgcgtgccttccacctccatcacgcagcctgaccctgtgagcccctctgtgctctgtggacccgtcaccctgagctcctcagttgctgaaccatccctggctgacagcgcctgtcctgcctccctgccctccctgcccccaggtgctgcaggccagtgataatgccatagagtccctggacggcgtcaccaacctaccccggctgcaggagctgctactgtgcaacaaccgtatccttccttctgggtgcctttcagacagtgggtaaagtgaggtgccaccctgggaagggacagacagcaggcagggtatgtgccaccctcttgcagggcaggagagagggggctctgtagtgtgagttgaagggggagagcctggggctgtcgggctatcactgacctgcactggtggagttgtgcggagtggacttcctcaagtcagagttcacaaatgggcagcccgcagctgttcttcaggtctatgtagttttttgaaaatcaggaactttcatactttaaaaaacatctagagttctaattcctctcttaaaaattggaagttagagcaaccttacactggtattttcactcagcagcccttggtcattgctgaatagtaaatgtctctttggaccaggctagatttccaccttatcataccctgcaccactcccctgatactacaccagcttgcgtggggtgttgcggctcattctttcctggctgaccctgtgggtaggcatttgcagtccctgcctagagcctgactccctccagggagcatatgagatgcccatcaaacagacttccaggcagcagtccccagctcttgagggtacacaggagcaaataaattgggaggaacctgccaagctttccttgactctcctgaacaaggcctccagcagcctgcagtgctccagcctcttgcctcctgccccaggctggtcctcctcaacctgcagggtaacccgctgtgccaagcggtgggcatcttggagcaactggctgaactgctgccttcagttagcagcgtcctcacctaagaggccctgccccctacccttgccctttaacttattgggactgaataaagaatggagaggccctctcaggctaccaagctgttgtcgctgctatcactacaccaccaccttcatcacttttattttttgaaaagaaagggaagagacatggggtgttgccagctccttctttctgcgccatcctattgtttcctctcagagagagccaaggcttcagtgtttggggcagaattcagggtgaaggctgagcttttgtttaccttctggtttggggtgggggctgggactgggtctagattccaagcaggaatagggcttgggctcaggttctggctctggtaagctacagagcagctgtgagtttctccagctggaagcatcatacaattttttcccatgacccctgcaccttccacatgttccccctgccctggcccccattcaccatagctggggaggctcaagggctccacgttcccaggaatgggccagggtgtccttgctccgtcctgcctgaacaacactatcggtccccatgagtagcattctacggttgaagtacctttgagaatacttgataccatttgatcctcacagagtctcagggatgagatttttaggcccagtgtactgatgaggaaactgctgttgagacttgcccaaggttcttggccggagcgcttcagcactgaaaccaaagttgtctctacccttggtctaggattctagactcatgttcttgcttctgtattgctaaggaatggttgggcagcggcctggcctcagctccttgaggtcctgagctgagtgtctgctcccatggtgtccccccacacataccatgtacacaccttgtcctgacctagagagtcctgagtggtggtggggggaggggactggctcaggggttagggcactgactcaaacctggctgggtggggagagaaagattgattaaagctagggagagagtgtgacaaaggcatcctactggttctctgggatctgcctgggcccacatgtgctcacacacgtccggacagccagggccctgccccttcccgtatctgcagtgatgcacaaatccgcagcccctgcacaaagccctctggctgacctgcctggaagtttatatccactggtgtgtctactgagggtgttggaggtggggcacctgcccccacccccgggcaggttctggtgcttggagctggacaagaaaaggcagtgtgggtgtggagggctccctgccagttcctggggcctctctgtccccactccccacggcacctccctgcctgatgcatcaccaaacagcccctcctggattctgtttccttgtgtcttcttgtcggcctgtttttactgtcttctgctaggcggcccatgggcagagctgggacactagtgggaaggaaggaaagaaggaagaaggccctggctgacgggcctgaggacaagacccaaggagagcctccctgaagatgcctagcctcctcctctctaccttgggatcgccttggtgccatcctcagtgtttccccagtgacggggtggagtaaggatgcacacagcacaggtgcctgagccggttggtctggattcccaggaagaattccaggttggagaaaagggaatcctctagtccaactgagcagagactcctctcagtgagagaaaggtactctgtacccctggaagggggactcagttcccacccaagcctgagtggaaaggcctaaacatcccctaacccccgaggctacagcgggggtgggggacgtgaaatgagattgctcctactctgatctccctaatcccaaacttgagggcagctcactcatgcctggggctgtagagcagctgagaaagaagggacagacttgggggtggagggagtcagaatatctggtagagccagcaggtcaggggttagctggtggagccagtctgagggcctggctgctgatgtcaccagtctgcaacctgggatcccaggacctccctgggcaggatgagttccaggaccaggcccctgggccaatttcatagggctgagcctggcttgggctgcacagaactcggcagcaggagcctgtgagagcagaggtaggcagcctaagcttgggaccagaaggtcggccagacagggctgtgggtggaagggcctgcctgccccactgcccttgcagcttcttcatccgggagaaggggctcctcacatgcccagtctggtaggaatcagcctggtgccaggggccatcacagcggtggctcccaccaaagcccagcctaagcccccagacctcacccctgctccctccctagcatcttctccccatttcccgcccagaggcctggcctcttctctccgccccctacagcagtttggcccctccctcccacataagtcacttaccaggtctgtccctgcggcatccagtctgtgggtcctgtcccatccatcctgacctgttccatctcagccccaggactcagtactgcggttgccaacactgctgccaggtgaggggctcccacgggtactgtggtgccgagtccaggcggcccacactatcagaggccgtgcctggatccagcaaggtggggtgtgggccagctgtgtacctgtcagccccagctaggctgttcccaacaccaagactctgctttccctgtgcacaggctccgggcacctgccatgccctacccctcctggcagccccaagtggggtcttccctgacttgggaatgccaaggaccacaggccccggggtcacttgtctgtcttgtgaggaaccttgagttgggggatttctgctaagaaatgagttctagaagctgtcagtgttgtgcacctctagactgcagagctagcaggtggacggaccaggcccagggatgctggagcactctgatgtgtgtgcagctgggtcttgaggctgggacaagtgtccatgcagggaactatgtggatttcctgggatggatcgttgagtgggtttcttcattgggcagtttttcggatgttgtttggtgggggtgaggggaaggcttttctctgcagcatgagaagcttctctgggtgagtctgaatggtcttcgcggaaggtctctggatgtgtctggagaatctctgggccaaggtgggattgtttcggtcatcgggtgggactgaatcagctgtctggatggagggtttctgggtcaactggctgggactacctgggttaaggagccaccctgcctcttcctaacaggcatgatggatgggccacgttccgatgtgggccgttggggtggcaaccccttgcagccccctaccacgccatctccagagccagagccagagccagacggacgctctcgcagaggaggaggccgttccttctgggctcgctgctgtggctgctgttcatgccgaaatgcggcagatgacgactggggacctgaaccctctgactccaggggtcga

SEQ ID NO: 6387 - DNA, 6000 bp, Homo sapiens
agttgttcagtcaactcggaaaaagggtaacaacccggaaagtagactcaccgtcttggtctagagactgacccctgcacagacagaccccttcccctctctgcgaaaggaccaagccccagaagtcactccatctcctacggctcgcaatttccagaggccccctggcaccttccagcctgatgtcgtgcgtcaagttatggtgagtagggagtggcatgtcgatcgcagcctccgacattcacacccagagagccccacagactcgctcagagaacgtctttgagtccggggacggtgggggccggcgagggaggctggggattgcagtgagaacgccgagtcacaggggcgcggggagcagcgctgaggcacggcacggccggctagtgggcgacacccctctctcaggcccagcggtgcccccgcccccttggtgtccatcgaggaactggagaaccaggagctcgtcggcaaaggcgggttcggcacagtgttccgggcgcaacataggaagtggggctacgatgtggcggtcaagatcgtaaactcgtgagtgaccccggttgaccccagccgcaatctggccaaaaaggtggagccactgtgctctggggcctgaatggcgaagggagggattttcccacgaccccggtgcgactccagctctctcctggagtgtaggaaggcgatatccagggaggtcaaggccatggcaagtctggataacgaattcgtgctgcgcctagaaggggttatcgagaaggtgaactgggaccaagatcccaagccggctctggtgactaaattcatggagaacggctccttgtcggggctgctgcagtcccagtgccctcggccctggccgctcctttgccgcctgctgaaagaagtggtgcttgggatgttttacctgcacgaccagaacccggtgctcctgcaccgggacctcaagccatccaacgtcctgctggacccagagctgcacgtcaaggtcagctggtctacacccctctcagcctcaagacaaggccccagagctgctccagccaggcccgccggacactagacctccagagccctgtctattgaataggcgtagcctctctctctggacacagggctgccaggggacaaagcccagccaggagttttagctcctgcctaccaggtgatagaggccctgagccacacgagtcatttccaccagctgccccaccagcccctccaaagagtcatggctgacccagccctggagactcagaccttgacctagccctaccacaaggcacctagatctaccatccaagggaacctcttcccttgacctccacactccctttacaaagctgaacctgcaccttctgggggcaggggggttcctggaggctctctggcccccttgtcttccctacctcccacttctttccttcctttgcagctggcagattttggcctgtccacatttcagggaggctcacagtcagggacagggtccggggagccagggggcaccctgggctacttggccccagaactgtttgttaacgtaaaccggaaggcctccacagccagtgacgtctacaggtaaggatcccggcccaaacacacagccaggattcctacacttctctgggccctcccaggggatgatgtataggaaaggagtcttgccagtgattggaccgatcctcagctttgtgtctcctgcagcttcgggatcctaatgtgggcagtgcttgctggaagagaagttgagtgtaagactctaggaggattctgggatccttaaccccaggtgcccttctcttgaaagccccaaggcttccccttcccgctcacctacttagactgccctcctccctcctcgtgcccccacattacactccctgcctctttccatgatgaagcagataattcccttttaccctgaatgccttctcttctcaccctcctcccctactccagtgccaaccgaaccatcactcgtgtacgaagcagtgtgcaacaggcagaaccggccttcattggctgagctgccccaagccgggcctgagactcccggcttagaaggactgaaggagctaatgcagctctgctggagcagtgagcccaaggacagaccctccttccagggtgagctggccagttagctggatctaggataagcttgggtctgtcagcagggggcttttctcaggaaaagaagatttgctcacctgcactccactctgctgtccctctagaatgcctaccaaaaactgatgaagtcttccagatggtggagaacaatatgaatgctgctgtctccacggtgagtgccaacatcacccctccccaggagctggtcagggatggcacagcgtggctacctggccatccaatgactcaccactgaccactgctttttatgccttgacctttgtacccaccgtccccagcccacccctgagttcccagacaacagattatggaccgagagactactcccttgggtttactctggctcatccaagtcatacccagcaaactcctcccatccctgcaggtaaaggatttcctgtctcagctcaggagcagcaataggagattttctatcccagagtcaggccaaggagggacagaaatggatggctttaggagaaccatagaaaaccagcactctcgtaatgatgtcatggtttctgagtggctaaacaaactgaatctagaggagcctcccagctctgttcctaaaaaatgcccgagccttaccaagaggagcagggcacaagaggagcaggttccacaagcctggacagcaggcacatcttcagattcgatggcccaacctccccagactccagagacctcaactttcagaaaccagatgcccagccctacctcaactggaacaccaagtcctggaccccgagggaatcaggtgagacattgacaggattaggggatgcactaagagtcctataaatgctgtccccttgccagcgaaaacttggggctgagaggagtgcagtgggagtgccaggctccagggcagaactggatgctctgtgctgtttgcagggggctgagagacaaggcatgaactggtcctgcaggaccccggagccaaatccagtaacaggtacccattctctacctctttcttttccctgttcaattcttccaccagactcctcctccagacctatatctagattcagggtactttgtggaggggaggggagaagatgatctaactcaaccttctcatttcataaatgggaaaaccgacaccccctgagaaaggagccctctgaggtcacacaacaaagcttggatttgtccctgaatcttctaactttccacaacaccagctctgtgagccccctaagttccattgtttcagcagtccagaggacctcccagcaaaaaagatcagggtctcaaatgtcaattgccactctctagagcttctgctaacacaattctggagaggagctctgaggggaggagcacagggcacaccttgacacagccactgacaagtagagacttcatactccccacccacccccaacttggcctttctgacagctaaaccctcctgccaccatcactatttctcttaaagggcgaccgctcgttaacatatacaactgctctggggtgcaagttggagacaacaactacttgactatgcaacagacaactgccttgcccacatggggcttggcaccttcgggcaaggggaggggcttgcagcaccccccaccagtaggttcgcaagaaggccctaaagatcctgaagcctggagcaggccacagggttggtataatcatagcgggaaataaagcaccttccaagcttgcctccaagagttacgagttaaggaagagtgccaccccttgaggcccctgacttccttctagggcagtctggcctgcccacaaactgactttgtgacctgtcccccaggagtcaataaacatgatggaatgctagtcagtctgagctcagccaggggcagggagggactgggatgggggtgggagctgccagtgagggatagggaggcaccacagctctgctatggcaggaagtggggatgctgggggctgggagtgggcaatggcctggcacacaaggtcagggcacagccggctacaacaggaaggaatcctagaggcctggttccccagaccactctctaatctcagggcagtgcttcctctaaagcctaggatggcgaccccaccctaaccctaaactctggggatagaggctgtggtcccttttcttccgggctctcaagactcacttgcagggctctggcgagggatgagttgatgtgaaagatcacagacctggccccgcacggtgcccccaggctcttagagatcatgacgccacatacctgcctccaccacacactcaggttgcttcctggacattgcttcccttttgattcccagttgctgttcgggagtggaaagctatggctcctaaagctatacacaggcgcaacccctcccacggagcatgaacagttcaaacccggtggtagtggttgccagccaagcggagaggtcaagagaatgagcgcccccaactctgacctagatccccaccaggacccacattcttccctacattctcgccaggcttcagccccccgccctcggtctccccactaccaaacgttcacctccatttggacacatcccattgggtccaccccagcccaccccttcgcatctctcccagggtccacattgcccttccctgaaggggctgaagcggggaggcgatggtgttaggagagacaaaaccaagtgcgggaggagaccaggggagtccggctttggcacaggaaggggccgggctgtcccgtcggggaagtgggagggggccgcggcgccgggagggaagcgcctgtcgcccgggactctgagccagagcgcagcggcgagcgtgactccgccatcaggtccccggctccctccccggacctagcccactccgctgcgccagcgccgcgggcagtgagttcggggatcaggggaacccggggctccctcgcaccaaccccaaatcctgccctcctggcgatgaggcttttctagggcacctctacaatccgggtttgagggaggaggaggaaaggactgagggatcccctcatcgccagctgggagcgggctgggaggccgcagggagggcctgaaaaaggagacgggattgccacgaggttgggggcgcggggtggtagcggctttgagcgggtgagaaaagctcaggtggggcccgccgggccgaaggaggtaacccggcgcccggccctagccagccccggggctcggggctggggagatcatggcccgcctcttcagcccccggccgccccccagcgaagacctcttctacgagacctactacagcctgagccagcagtacccgctgctgctgctgctgctggggatcgtgctctgtgcgctcgcggcgctgctcgcagtggcctgggccagcggcagggtgagccgagcctctgctgcgggagggtctctacctggggagcattttcggggttggggtttgtggggtcttcttttcgatgtgttttcgttgctgggagcagagaaagaaaggaccattgagcctggctaggaactgcagtgaccctgggcaagtcactctacccttctgggtctgctcagggagaaagctgagtcctggatgcttctcgtttctgtccgggttctgacagactttatgaacatccgtggtctacgggttctacaataaatccatcaccggattttccagttttccaaaggggaaattctaggaggcccctggggaattcatttcctgcctttctctccctcttaggggatgtagagcagttgtacccacagactcccagaaggcaccctccaccgggctctcactgagtcccaaagtaaacccatgtccagtttctgtttggggaggaagaaggtcttcaatccaattctaga

SEQ ID NO: 6388 - DNA, 6000 bp, Homo sapiens
cgataaaggtgagaaggaagaaatgagaaccacagtttgccacatatctcagaaatgttccatcttatagtgaatgatagtgggccaaagctcaccaaatttgatatcagcagtcaatatttatcttgactcttaaaagcagagcagagaaggaactatatgtttagtaaattagagataaaatgtggaccatgtcacctcagtcaaaaaagaaggtggactccagttatagacagctagaacccttaaaggataaaaccacagaccaagggtaattgtataggaaacagaatagggtcccaaatataagctccataagcccatctgaattccgaaggtctcccagatcccatcataccgatgttaccagaagcgacacatttcattcccaatttacaaatggcacatacatacagtaggcgcagacctctccctagtctggaggtgctcactgctactggcaagacagccattgtgaaagtcaaaatgaaatcctaaactttaaaagaatccatatttttaaagtaaaagggtgagaagaaattacaaaatgtataaaaatggggaactgaaccaaatgttcctgctcctcaatatattatttctgcccctcactaccaggattctttctctagtcatttttcaaactccaaaattttcttatggaaatgttcatttgcaactacaagatactcttaaaattgcatatgtctttggaacggcagatagtcttgcacacgactgtgaattcatttaatcaagttattttacttagttccaacttgcagcatactaaatgaatgctgattgttaagaataaagagcaaagacaagctgattgagatagaaaaaggccagacagaatgaggacaataggtacaggaaaaaggatttcaggagaatattggagaagtaaggtgcaaaaagagcagaaaggaaaataattattattttcacctatttcaaggcccagaaaggccggtgctatacccctcaaaagaggaagagaaatttatttctttttcttgaccctgttgaacagaataggctcagttcctaggaccagatgtgaatctggtaccattacaaaccacaaacattaaataggttttttggaactagcttagtgacatagctcttgcaggaaaatgtgatattctaaaaaacttaaaggaagtcctcttacagctctagaacaaggactaactttgaggaatataatgaagatggaacatttgaaatttccaatattttagaaactatgaccaacaaaaatggcagtttcatatggttcaacccaaaagttaataagctgatgacttcctaaatgtcttatctgaaattacatcatcagaatgaagaatttgaaaagctacttgctacaccatgtagcagaaaaaaaaattttaaatatagactttactagtcttgaagacatactgtgattgatgatgcataagagatgctgttcaaaatagtcacattataatacccaattccagatcaagccctctgtgtccatgtcaatttattccatttgttatttagacagcacttccttcaacagccgtagggaacctaagacatctatatccatgggtgttttaggttgaggtcgacagtgggcattatgggtttcagggcaactttaggtgaactcagttttcccttgtatcacttaatgtgattaatgttcacatggagggttttgccacgtgatctggcatccttacaatcatgagcttacttatgaaacagggaagatcgcttttaggttttccttttctttcccagaatagcaatttaaaagcctctaacttaacatctagatgaaccataaggtctttttcagttctatcattttgtgattagattttatggaaaagaaaatgactatgcttgctctcacgtgcatagggtatttctataactatatgcaagaaacaggcaacattagtctttcttgagaagggaaacttgcttttccttgtactgagcttttgtgcactgaactttttttaaataccatgtattatttgctaacaagaattaaaaatacaatttaaaatgtaagcaaagcatttcacttgttaaagtacagaacctctccctgcataaatgtttagttcctgttcttcttgttcttctttatgaccttaccattattgtgattaaaaaaaaaaaaaaatcctaggcactgtgggaggtgaaacagatgcagaagactttgacgatggaaattgctatttattctgcaaatatttgtaactacttgttatgtgacagatcctgggctaggtacttcctcctttacatgacttctggaaggcttcttgtttaaacatccacggtcttttttgtttttgtttttgtttttgttttctttgagaggtctgcatgcttaaaatgcttcccatagataagcagtggtttgttctccatgaatgcagcaacaaattaggttacctgcagggagaatcacctcccacactaaggtaggtcccaggtgtttgaggcagacactaccgtgatgaccggtacatgagttagagaacactttgtacagagggagagagtcctcttgactagatctgcaatattgagaacaaaaagaggcaagtgaagataaaaaaggaaggtagtagagggagatgactggcaatagaagctagtacagtagtatcttacttcacaaaattattgagttacccaaaagctgattccaaagttttgtaaatatcatcccaacacattagaaaggcttgctaaattaaagaagcttgctacttagagcttttgtcaagcaaaaaggcccttatttcaattcaaattttacatagatgacttgtaggtaagaactctcaacattttcaaagcccttagacatacatttctttggattctcacaaaaacgccatgagaattgttttcccttccacagatgaggaaagtgaagcttagaggttgagccacttgcccatggaagcctggtagggaaatggctgaggttaagaccaggaccccggcacactactcattggcactaaggtagccccatgacatgtctctacagagataggcagagcaaaagaaacttactttttcaggcaattttctctgattttcataaaactgtagctaccaaatggggatacctagggtatcagttttatgatatcctaggtatccccgtttctcccattcttcccctccaaaccatcttcctgggtctgctgccctgtccatcttcacagaattcagttcggattgtctcctcccccagcatctctgctatctccacgtagtctacaaactaagtgcaggagccacagactgacagtcaggacttctgcctgagcccccatccacagctcaaaccctctttcctatttcactatgctaatgcttaccccttgcactccaaacaagcaggtctgtgtaccaccatctaacaccccaacagggccaggctagggtgaggtgagtcacagcacttaaaggttcaccaaagaattcagtaatcaaggttaatattttaatggaatatttaaaaaaatcaaaattaatatcaaaaatgcatgatgaaaaataacaaaattttaaataaagacagggtaagtttaggggtttttcctattgcttcaggctcaaaagtgccttccggggcactgttatcggccctgcagtgactccccacacagatacttttactaatgatgtttcccaaaagttagttcttacaaccgctttctacattagtaacgtctttcttcttgaacgctccagcatttaagtgtagcgctctactgtcaggaaaacccatttcccctagtaactagtagtacttcgaagatattctgaatcatcttggatcctttccagcactttcccaaaccacagtgagcactcagcaccacttcgctaaaagagtgcagaatcacaatgctcaaatcactgtctggggggttcagcagggaggggacgcagatatgttttgtttagtccagggtgttttgagaaaattgaatttgttatcaagattttacaaatcaggatattgtacatgaatatactccgtcatttctggaaaaatcagaaaatctagcaacactaggtctaattcttgcccgatagcaagggaccctgagagcagataagcggccctgccttcggagctctctccagttcgccttcccccagttacagtgcctgtcaggccccattagatctttgagtttgctatcgtaagaataaaggaaggagcgcacaggataaaaacccatcggctgggtctattcgttttttcctagagaaaaaaaaaaatgtttcctggttgtcctttcgaatatagtctcacagagaagctcacagaagcagcccacctttctagcccacaaacttcccacaagccgtgaaagtcgcaccggctcttgcacccagatcggtttctcccgggtctttggctcagggcccccgcccctacattggcctttcccttcctctgccacctccgcgctccgaggcctggggcgggtcgcgggtcccggcccccagcccccagcccctagccgctgctctttgccccgggccagggcgctcgggctcgcccacggcggcactgagcatgctcagaggcggccgcgcgggcaggtttgcttcgcaggcgctcgcactcggcggcgggcgggcgcgcggctgcagctggagctccagcgcccggagttggagttgccgggagtttccccccaacccctcccttttcgcgcgcggcagcaggagccggcgcgggagccgcgagcggcggcgagccagcacccgggccggctaagccttgtccggagcccggagccccgcgcggggcagccccccggggaggagcctcgtgctctgggacgcgtgccgcgcactggcacggcaggggcgcgagccaggctgcacggtaggaccggggcgaggggagccaggcggtcagggcggaggccaagcccgggagatgcggttgcagccgccacggctgttggggcgcctggcgctccgtccgaggcgggtggctgtgaggccaggggagtaggcaggctcccagagagattcttccaagttggcgggtggcgggagagggggccgcgcgccccggcgcagctgctttgtgcgcgcagagagggactcgtgtccctggttctctccaaccctgggacccgttgtgcgggcagtattgggcaagccgcagaacggagcgatttcctccgagaaagttgaggatggagcctttttttccgcaccgtccccgcgatggcatgggccccgagaatgctgccccgaggctcccagtgtgggggagctcggggtcgctgcgcctctagcttgagcgcagaaatccgcgaatcactccgatcttcgcgaactctggcatcttctaggaaaatcattactgccaaaactgaggcgagcttttctggcgggcacggcaccctgcccccagggcgctggccctgggcgatgccccctttccgatctcaggcttggtcaagggcgccaggttccgaattcgcgcttgccgtgcacgccggcatcgagcctcaccaacaccgccgggcaacgtggctggagtaggtgggtggcttgattttccctccaacctttcctcaggtttacaacaccccgccacctcaccaccccaccccgttcatcttcacagaggacaggacctgcaggtggagaatttggaaagacatcttgttctttaggagaaagtccccggggtgtatctgcccttggttctggccccaggatttcataacgaaccttctccccttcctattacgcttccctagggactgggtgggagagaataggatcggtaggtccgcaggaacttccatctcattccaccctctcctaagattgccttccgggcgaccccaggaccctggaactggcattgtgcggattgtaaggctgtggaggatgccgacgaatttttcctggctccacttttttcac

SEQ ID NO: 6389 - DNA, 6000 bp, Homo sapiens
ttattttattttttgcatacccaactcagacctaattatgccagtagctttgacccagggctctgctttgaacaggttggaagccctgggctgacatgctttcctatgccccttctcctctctgggcagagcgcctgaggttgggcagtgttcatgggctatttgttgcttccatcacctgcctcacctgctacctcagggctgagctttgctaacgcacaaaatgacttcttactaacatgtatttgaaagactgaaagtgagtcaaggtcctggtttgctgattagacagcaatcagtggttgccccatagtcctggaaaccacttggggcctgctggtgtctgtcctgatgctgctgtaagtcagatgttgaggtcagcctggcccactttgccatcagcactatgttgctaaggtaccaatgttctgccttcccattctgccctggtatttccatcttccaggcacatccctgcaacagaacccttcttgccaaccctctctctcttgcccccgacttcactttcctgtataaacaaagactcctctactgtcaccctctttgggaacactctacctctttcttttcccctgaggatatgacctaagtcctcctaccagagagctgggggtgggactgggggtggggcgggattggctttcttcttgctctccagtactgcctcctaaccaaaaccatgtgccactgggctttgcccccttcatccacctgtctcctgagttttcctctatgctcactgaagactttgacatttgctttacagacttttcctctcgacacttagttctgccatcatcctggacaactttatctttcctgtggtctttactatcccctccactccactttagctgcctatcccatggtcacaacctgtgcctggtcattgtctaagactggcctatttctgtactcctaagcttcagaagcacagccgtggccctcctcctccaacatagactctttcccatgcacctactcctacagtttccaacctcacacagctctggactactccattttatcttttcatcatttacttccctccgtgacctaattctcctagtcattatttcaattattctctctccatcaaccttcttgcttgtttctccattgtatccatccagcaaaccctgccttggaggaagtctcctaattcaacttctctagttctatatatactcggtacttgtgtattgttggtaaaaactgtatggtttttctgcctgacaatccttaggcagctttaggaaacttctcccatctccctttttctttttcataccctccactcttcaacatcttgctcactctcaacaagaggcctttattttttcactaagaaaactgatgttgtaaggtagggagttccttaacttacttgtctgtgtttatgtccatctggctcccatctttccatcctcctcctcttggggaaagagctaccagttcctgtttattaaggctttggatctggtcccccagcccaccatctttatccatatctttactctaagcccataaacttgcttactcctttcccatctgaaaatgaaaccaaactgaaacccttgccaccattctatctccttcccttcacaggcaagcttcctgcaaaactaagcctgaattaactgtcctcattgttttacttcctgttctctcctcagccttctataatccggcttctgtcctatcatcattccacaatgaaatgctgagtcatcaatctagccccatgtggacaaaacaaattggcgcttcccttccttattttgcttatcctccctgagccatttgttctgctggctatcccttcctccattagcttctcctgtatgtctctcctcattgctgtcaaatctcaggtagctccttccctgtattggcttcctttggactctcattggccaaatgccagaatctctgggtttattctgtaccctgctcttcccattctatgtgctttccttgggtgacctcatctgctcttctggcttcaatgaccagggacatattgaaaattcatatgcctctagttccattcaggcttcacttctgagttccaaaccatgtgctcaattgtcccctggacacctccatttaagtgtccctcaggtacctcagacatagcttcatcctaacaaaatcaatatcttttcagccaaacgtcttccttcggtttctttgtattgtcatcatccaggatctcagcctcttttcctcatttctagtcagtcaccaactttagtgagatgaggtggtagagctggtctccgagagacacgcagtggattgggagctactaacagtgaggacaaccacctggcagacatggtgctagggagtggacccagtaaaggaagggtggctacgggtgatgcttccaatcttggatgaattttatgtagcatcaccagatgctgagggtagttggagttctcgaggaaaaaggaatgagcttgcctgtgcctgaacaggaacagggacagaaagaagtccaaaacagttaagtttgaaagtaggagggcacgtgtacctgcatctctgaggggtaaggaggtttcaagtatttgtgggttctacctttgtaatgtcttcccaacctgttttttccctcggtagcctccaggctactacccacacccaagtcttgttccgaaagcattttttttttttaaacggagtcttgctcttgttgcccaggctggagtgcaatggtgtgatctcagctcactacgacctccgcctcccgggttcaagcgattctcctgcctcagcctcccaaatagttgggattacaggcacccaccatcacgcccggctaattttttatatttttagtagagacggggtttcaccatgttggccaggctggtctggaactcctgacctcatgtgatccacccgccttggactcccaaagtgctgggattataggtgtgagccaccacacccagccctgaaagaaaatcttatttaagttgttggctccagtaacttttggacatcaagttaaaaatttcttagcttctcaaacaaggtccttcagaatatggtccctgtttgctgtctaggcccatctcttgctactgcatatacattctttttgctccagccacatggaagttcttccagtcttctaaaaacatcacaacttcatccttagaatgtctgtctcaccctctcttccccaagctcattcattcttccatttctgcttgtccttcaacactcagttcaagcaccatttctcagaagactttcacaagcccaatctgattttgtctgggctatcttggtatcctaaaggatacgatccacaaaaatatcatttaccacacctcactgtaatccattaacttgcctctcttccccagcagactgggtactttatgaaggcaggtctcagtctatctggcttgctatcccaatgtctggcacttgatattacttactgttttctttcttttcttctcttctcttctgttttctcctctctttctctgtctcctttctttcctttcttttgctctgccacctaagatggagtgcagtggcaccatcctggctcactgcaacctcgacctcccgtgctcgagcaatcctcccgcctcaacctcctgagtagctgggactacaggtgcacgccaccacccctggctaactttttgttatgtatttacttattttttttggtagagacggggtttcaccatgttgctcaggctggtctcgaccttctggactcaagtgatccgccagcctcagcctcccaaagtgcttggattacaggcatgagctacggcgcttggccggcacttggtacttttaatgaatagttattaaccatgaaacttttaaagtttaagcagtagtatgtttaacctggaagacttttaacatttaaacagcaggccatttaattgtggcagttcacatgctacaccagtgcatggagctccttgtggccagtgcaatgttgctggcccatctggcagtgggaaaatctgggcatccaggagtgcatctctagggaagtatcaccagccctcacaccaatctcaagctgcctgtcttctgcagaacccactagatcagcgcgcttctggccttgacccacttggtggttacctacagccactaagaggtgggcagatagatgtttttggtaagtggtctctgggttagggagtgcatgggttatgtccgtctaggggtgtgtgtgtgtgtgtgtgtgtgtgtgtgtgtgtgtgtgtgtgtgtgcatgggtgggggaagggaggaaggaggccgaatgtgcatcccttctacaaggacgcctttccagacctccttattaggtggcgttcgcctcctcaccctctctcagccccttatctcctcttacacggatcacgacttgattaatgcttgtctcccagctaggccgccagctgcacaaggtaaggaaccgaaggcattccggttctccctggcaatcctccttctcagaaggatgcctgaggcataacaagtgttccagaaatatttcttccgcaagcgctctgggccagtctggacggaccgagcgcccgctgggctgcgggggccccgggaccccggccggcactgacgccccgcccaccaccggccggcccgggcggggtggggcgcggctgggcgctctcgcggggaccgttctccggctagcgtgggcgatgcccgggcggggaaacgggaggggacgacgcgacgcgaggtagcggcctggccaatgagcgcgggtcgggcggggctgggggccggcggccggggcgcgcgcgggtctgggcgtgccgcgggtgacggcggggccgggcgggccaatgggcgctgggtggcgggcgggcgggcctggcggccgggggctttaggacgtgagcgggcggccggccggacagactgacgtgtgagctgcatcgcgggaggcgcatggcggggatggcgctggcgcgggcctggaagcagatgtcctggttctactaccagtacctgctggtcacggcgctctacatgctggagccctgggagcggacggtgttcagtatcctgtcccggccgcgcgcgcgggggccgggctgggggcgcgggccgcggggccgcatttccccaggccccgggcctggggtggaggctggagcggcggccccgccggtcctgtgcgcggaagccgggggtgcagggggaggtctgggggccgagggcggcgctcgcggggttaagtggggggtgggggagacgagaactcttgagatccggggtcacctgtgagtcgctggacccaagggggaagcgtcttgattcctggaggaaatctccgaaggtgatgtgtaaccctgtgtgtcgcctgcacttcggccgcaactgcctttggttcagtcccctgttcctgtaggaggcggggatcatgtaacagtggagcacatcgctcccggcttggacgcctttgacctttaagtgttcctgatttagttggctttgggtctaccaagaattctagtcagttaactagcttttaagccaggttctgaatttgtaggcatgacactccagtagtttttgaaagcagtttaagttattgtatctttttggtcttcaagttggggagttttaaaagtgtatttattgcttctgtgcaccgtccgtagaagtcggcccgaaaagtggtgcaatttgtggttagttgtcggtagggtttgaaactgtgttttggtggatagttaataaattcttgttaatgactattgagtggttactataagcaaagcatttgtgcaaagcacgttgtctgtatcttaactcatctaactttgagaacttcagttaataactcagggttgtgaagataggctccctgaaagtctgatgtttcttgtctctgcttgtccatattgacatcctttgatgatattcttgcagattaaatactgataatgaatgagatgtaacttt

SEQ ID NO: 6390 - DNA, 6000 bp, Homo sapiens
actattcgatggatagtgatgccattttcagaaataggaaatatgtggggaaaaaagggtttggggttcagcaatcaaaagttctgttaaaattaagctatctctttttcttttcttttttttttttaagagacagggtctctctgttgcccaggctagagtgcagtggcgctatcacagtcatagttcactgcagccttgaactcctttcctcaagggatccttccgccgcatggggtggggagccattgcgtagggcaaactatcttttttttgatactcaagtaaagatataacataaataactggatacataattctggagattcagggacgttggttatttccatggctggaaataagaactggggagtcatcagtgtataaaaattacttttaactaaggccctggatgagtttacctgagaagagaatatggataaacaaaagaagagagtatatacccaacatctggagcactccaatagatattaggtatagtaggaggaaaacggaaaaaacaagatcagaccacacagaagtaagaaatacaggaaagtgtggtatcatagaagccaagaggagaaaggttttttttgtttttgttttttttgtttttttgttttgagacagagtttcgctcttgttgtcaaggctggattgcaatggcacaatttgggctcactgcaacctccgcctcccaggttcaagtgattctcctgcctcagcctcctgagtagctgggattacacgcacacgccaccacacctggctaattttgtatttttagtagggacggggtttctccatgttggtcaggctggtctggaactcctgacctcaggtgatctgcctgtctcggcctcccaaagtgctgggattacagtcgtgagccactgtgcccagccctttaattttgacacaatcagaaaagaaagtttttaaacaaagggtggtcaggtgttttttttttttttttcccaaatgttggaaagttaaataaaatgatatcagagaagtgacctctggaacacttggcgatgtctggagacatttttggtgatcataatcgggagggagttgttactggcatctattggactgaggtcagggacgctgctaaatatccaacaatgcacagaacagcctccttcaacaaaaaattacctgtcaacagttctttggtctgacttagaaaattcatgctagccggggctcacacccataatcccaacattttagaaggccaaggtgggaggatggcttgagttcaggattcatgattagcctaggcaacttggcgaaatgccctcactattagacattttttgttttaaataacaacaggctgggcctgcgatcccagcattttgggaggctgaggctggtggataacttgaggccaggagtttgagaccagcttgaccaacatggtgaaactccttctctactaaaaacacaaaaattagccaggtgtggtgtgtgcacctgtaatcccatatactcagggggttgaggagaatcgcttgaacccgggaggcggaggttaaagtgagctgagatagtgccattgcactctagcctgggcaacaggacaagactccatttcacaaaacggcagcaacaacaacgacaataaaaaacccccataaatagtagcttaataatatagcctaatcatagaaggtctaataataaacatagcctggccaggcctggtgtggcttacacctgtaatcccagcactttgggaggcatagatgggaaaattgcttgagtccagcagttccagaccagcctgggcaacatagaaagaccttgtctctaaaaaagattgttttaaaaattaaaacaaaacaaaaaaccatagcctaacaaatagagggctcctaaattatacttacgttcaaattaataccttagccgaatactcagtgttattttgggggagttacttaatctcagtgccagagtttcctcctttgtaaaacaggaatgagataatggattacaaaatgcttaattagcccagtttctgggagaaggtaaagtcaatgaatgttgttactacaattgactagataggttgaatatggcctgaaggttgcagattgctctttactttcctagaacctcccctattctccccaaacaatccaattatcttttaatatgttatttctaatctgatatgaaacaagaaatcagatatccacccttttaaaaactggttctaaaattagttctaaatggatttctgcatgttgatggcttagaggctttcttaactcctagattcccagttatgttcctgaagggtttttttagccacttgacaaacgatagggaagtcaataatcatgtaattatcaaccaagatcagctaaataaatcaataatttaaagaatataatcttcatactttagcagttttgccccattaggatatcacatcactattccaaataataatagaacaacaatgtaatagaggctagggaatctgaaataggtcaagtaaatattaccattgcttcccagtactaaatcttccagcattccaatattggccatgagcaaatttagctgcagataagaattacattccattatcagagcgtttagcacagtgagtacttattggctctgtattgactcttgttaactcccaagctctagaatgttctcatgcctaggccccatatcctctagtattctagaggtataggactggattatatgtgatatcaagtcttgcttttttcactcaaagatatctcttctagtctggagaggttaaaaagaggaagtaactttttaacaaggataactgggagttttccaactgaatccacagagctttttagaggctgggtcttagacacaaacttgctcccacctaccatggataagatcttcagaggggaagacactcatggaaataattatgtcaaaagattgtctttaaatcttgacctaaaagtattattgcatttcctggataacgtagggaaggcaaaaatttacttacaaggtggtaggatctcctccattagattgtaagtgccacagggaagggatttgtagtgatattgtcagtacctaggcaagtgctaacacttagtgagctctcagtgtagaatctgtttcagtgtgtgcactagggtttaatagttgtgaccaaatttttaaaaactaaaaaaaaatggaattaatttgtgggggtatttgtgtcacagaatgtagtttttttagcctgtggttaatatttaaatctacaatccaatgctatcaaaagaaggagtcctgtgatggaatcccagctatactattacgcctagtgtgatcttggaaaactcagcttctgctttgaaaaatgaggaaaacattttctatgagctctgaaattctgtttctatacctagtatataacaggttctcaatatttgttgaataagtgattctatattgcactcaagattccctatttaattagtaaaaagtctgaaagatattgctcaaaagcctttatcaagttagcaaaatttctgaaaactatttcttggtaaacattttcaaacttagcagttttaatcaaatatttaatgaaatgaaaaactttatttttgtatatctgatcacataagcagcaagtctccccaattcctcaagcactttaaataattttgccatatatcactgatcaacttttaatgactcagcctaagaaataaaaaatcaagtatgaaaccaaattattgtactttgtacatttgattagaaaccacataaattgaaccatactaaattgctgatattcaacggtttttgacctccaaaaatggcaatttttacatggctcacactaaatatatttagcaataaataatgtgttttaagaaatattacaatagggcttctaaagcctcccaattctctcttttactcttatcatctcctgtctgttaggggtgtggcaggtatttttggaaaatttcacaatcttatatctctcctacataacacaggcaacttgtagttttaaaagagtataaattagtagttttgttttggtaactatcctaaggggctagtaagaataatcaaacattttattgagagaatatactgttaagttccttaatgttcctcaattgtttaagtcagtggttcacaacctttaaagttcatgacaatcaacagagaactcgtttctgggccctatccccagagattctgattccgtttaggtcggggtgggacccacgaatttgacttcctaacacattcacaaattatgctgatgctgtgggtactaaaaccacttttaagaaccactgacctgggtatagaagaaactatttgtaaccaggctttttcttcttttggtccttaggtaaataaaactcaagttgatgaggtatgattttaccttaaatcaaaaccatttttggtaaagtactaccttagctctattgtaaggtaagtgtaaattagatttgctttgacttagttgctacagaccacaattataggacaactaactgaggaatttattcacttgtcccttcttttgaacctcactgtgctctggcttgccaggaggtgcaagtgtcgtccccgctttgtacttggcgctccaggcctgggtcacttcacttgagttatcagaggcaaccgtctagtttgacaaactaccggaggctcctgatagagaagggcgtgggcgccaatctaggagacaaagcctgagccgctgcggtgagccaacccaaacccatccgcgggtcttctttccagagacattttcggagccgagggcgcctctgcgagagcgctgcgaacaggttccgacgcgccggagatcgcgcgacgaatctgcgcctcgaaccctcgctttccagcagtcgccggattgctgctccacagggagccaacgcgcttgaggaccagcccagccggggctctctggatcagtaggctgtgcaggctgcgagctcgttgacgcatctcagcccactcccttgtcctcccgcctggcgaagatgtccgccaagcctgaagtcagcttagtgcgcgaggcttctcggcagatcgtggccggtggttctgcaggtaaggacagcccgccctgccccgccggaggctagtcgctttccccaccgcgtgtcctgaaaccgttgcccagacaggtctccttactgaagttctgccctcttcctcaaaattcagcgctcccggagcagtgcttgagcccctagaggcgcgagagcagaggaggccgggagttgattgcgagtagtgggtgccccaagtaaagttgcctcggcgtccgcgccggccgctctcgggttcccggcattgtccgttcctagcctgtaaagcaagtggcagagccccaagggcagcgactttgaggcggtctttttgccttgctacctattttacttgaaaatgatccagttcggtctgacttagttttatcaattgtagagtctttcttcaagctcgctcaggtcttacataaatcctgcattcctcatcaaagtacttacaggactccacaggacttcttattgcatactgtgcttgcttggggatattcgtgccttaaataaggatattaaaattaaatgcatatgtaacacacataaacacctttgatataatgggctcacgttaatttatagagttatgctgtggggaaaaaataaacctttagaaaaaaatgttgtaattaatcttagaaatacttttaaatgtagctggagaaagttactaaccacgacatgtgttatgtgcaagtattttaaagctattttaaaatataaattatgatttggtttaaaattttatcttacagtcatgcatttttattataaatatataattaaaataattgccataattggctcataaccagaaaacattttataaatctagccattctttcaataaattatagtaactctaataaatcctgttaaggcaatgactaga

SEQ ID NO: 6391 - DNA, 6000 bp, Homo sapiens
ttctagctgcctttaagattttttttcagtgaccatggtgaatctgatgaccatgtgccttggggatggtcatcttgtatagtttccagatggggttctctgtatttcatgagttagtatgtaaacctctctagtgagattagggaaattttcatgtactatatcctcagatatatttttcaagttgcttattctctctccttctctttcagagatgccaatgtgtcatagattttgtctctttacataatcccatatttctcagaggttttcttaactttttcaattttttctttatttttatctgattcaaaaaaccaatcttcaaactctgagattctttcctcaacttgttctattctgccagtagttccaattgtattatgaaatccttatagtgaatttttcagctataaaagttcagtttgtttctttcctaaaatggctatcttgtctttccactcttgaattattttactggattgcttggattccttggactaggtttcaacttttttctgaatcccaatgagctttttgccatccagattctgaattctacgtctgtcatttcagtcatttcggactggttaaaaaccattgctggatagctagtggacttctttggaggtaaggggacactctggctttttgaattgctgaagtttttgtgctgattctttcttgtctgggaaggttggatgttactttagctatgatgtaagttgactgtagtcatttctgtatgttttcagagggctaaggctctttacagggactttatttgtggctgaattcttgcccttggtttcagtgggtggtatattagcaaaatatttttggaattgtagtttgggctgtgattcaggagatagcacttaagagtaatggttggtagataggcacttaggtgtgcagctcttttgtatttcctcacatttgcagcagtgctctgcagtgcagggtgtgctgggagagaggtgactccactactaggacttttcctgggccttaggggcgctccctctgatcactgacaccatgcctacatttcttttgttaggtgttctgagccacagggattcatctagcagaggccatggcagagacatggaccatacctttttcagactgtccctgcaaagggaggtatgtcctgctcctttgccagcccaagaaatcacacatcttacccttcttagtgctctgagaatgtgggcttctcccctacttgagtgctggccagtgatcttggttcagcaccgcagaactatgtgctgtagtcctggggagccaggaccggctcatggctccatcctccggacccttgggcttaggttctaggtgcgctagggtatctgaaatgctcccaggccacgaggaatgcactcaggtggagcaaaatgcccaggctgggtaaagaaaatgtggcacatataaagcatggaatacttgcagtcataaaaaaggatgagttcatgtcctttgcagggacatggatgaagttggaaaccatcattctcagcaaactaacacaagaacagaaaaccaaacaccgcatgttctcactcataagtgggagctgaacaatgaaaacacatggacacagggaggggaacatcacacaccagggcctgtcagggggtggggggctaggggagggatagcattaggagaaatacctaatgtagatgacaggttgatgggtgcagcaaaccaccctggcacgtgtatacctatgtaacaaacctgtatgttctgcacatgtactccagaacttgaagtataataataaaataaagaaaatatactgaaaatatattttaaacataattaacattttgattttatttttacttttcattttgaaactcaaccactcagaattaaattaattttaattcctgcttcatgtccattcacttatttatccagatatagccattttgatttatttgttcattactaattatttatttttaataatggaataaagattccattatttgggtagtgacacaaagccactgcacaaaacaaaagctaggactctatcaacagcccatatcaagcctgctagttcccctaacattccatccttctctttcctctcacccaaaaggcgcatcactaagaatcttatgtttattgtttcttttgtctcattttattgtaactatttttctaaagaatacacaaacatatatctagtactgttcttttaattgtataaaaatgtcagactctgtatcgtttttggaacttctgtccattaacattgtattgctaaaataaattcatattgttacttgccactatattgtactaatttttactcctatataatattaaattagtgaatatactacagtttatttttatactgtttttggatattttgattgattcaacgttttgttaatatgaatagtgtcactataaacattttttacatatcttctgttgtacatgtgcaaaaatttctcttagttttataccttatcatggaagtgctagagtttgcaaatattcaattttagtgaaaaaaagtgtcaaatttttccaaagtggttgctctaatctgtaacatgtaaaagagccaatagattcacatttggtattataagatttttaggcatttggaatccagtgggggtaaaatggttctatattattatcttaataaatattattaaaaaatagaaactttcctccatttctaatttggtcagataaactgtctatttcaaactaattacaaaactatttacgtcctactttgagctaattttttctaactcttgtgtcattccatgatatggtcatggtcatggtcagtactctcatatagtcgttatggccaatgtgttctctgctataatcccactcccctagacagaatgtcagggagtgagatcatgtatttacttaagctttccagctattcattctttcttactgtagacacctcatctcatcccaaacgatttttaaagctatctaagaaatttccattgactacttaagtttgaaaaagattttattaaaaatattgcactacatggacacatttacaaacacagtcataagattgcaatggtctatagagagctggcccaagtgactaagtattttttaaaaaccattcaatttgatttctggattttcatgtttctttcttataagacactaagttacctaatttaaacgcaaagccacgtttaaggtgattctcagacatctgaaggaaggactaaggaatgttctttaaattgggaaatagggcaggagagaaatcctagtgcaaagctccatactcagcaaaagcaaggtaagtatgatgatgactcataggcttactgttgtttgttaagatacatggaatttccaggaggaaagaagaatgagagttatggtaaaaataagatggaagcatacagatgtgatcctgaaaccttccctcccacccctcatcaacctgaatgcagtaaaacaaagtgagcttatatgcattatccatggaatggcaactttcattctgattaaagatatttaaaagcatcagacatctctaagagggcttagctgaaactctctatgtatttctgatggcaacgtatttggccattatgaaccaagatagaatgtacgttttctaaactgatactgaattgtctaagttgctaacaagaaatcctttcataacagtacagtttttaacctttacttctttattcatctttaattccttgccacttcccactgagttgaaatgtttatattaaaacaaaacacccactggaattctaaagaaattggctcacccatctttcaaattacaagatattttttgacagtatacaatattcattataatggaataaacattttaatttcttaaggaactctaattttccttaaaggagatgtttacaacttactattataaatgctgccactcaatcataggagaaaatgatactaaaatagttcaaggctaaaatcacacatagggcagttgttctcgaatatttataaggccacgaactcatttatgtataacctataaacttgaagaatttttgaaccaatacagtggcaaggaaagctaacaacctaactgttaagatctatggtcattatttttcatttagtcctagaaatacatttcctttctgtaatgaatcaatatggtctaactcaaagagaaacacgtggaagtgaaaaataaatttctaaagcaagtgctgatggaagaagcagaatttcccatttaaaatacccaaacaactccaaattctttagtagttaggactcctgaaatctcttgacataatagagaagcaaagacccatagagagatatgcggttaaatagtgctgcctctggtggcaaaagcagttgctaagttgtttcacaacatatttttcccccacaggcacaggccccccaaacactggagccgtctacgaattattctgacgctaactccacagctccggacagaaacacaatagacgggcgtggtcttataatcataagccagttcctttctcaagtccttcctgcctatgttcgcttacgtgttatgggttctgcggtcctgatgaaactccctgaacggagaaaaaccacacacttcatcccagtggcgaatttctcctcttgctctaagcagggtgtttgaccttctagtcgactgcgtcccctgtacccggcgccagctgtgttcctgaccccagaataactcagggctgcaccgggcctggcagcgctccgcacacatttcctgtcgcggcctaagggaaactgttggccgctgggcccgcggggggattcttggcagttggggggtccgtcgggagcgagggcggaggggaagggagggggaaccgggttggggaagccagctgtagagggcggtgaccgcgctccagacacagctctgcgtcctcgagcgggacagatccaagttgggagcagctctgcgtgcggggcctcagagaatgaggccggcgttcgccctgtgcctcctctggcaggcgctctggcccgggccgggcggcggcgaacaccccactgccgaccgtgctggctgctcggcctcgggggcctgctacagcctgcaccacgctaccatgaagcggcaggcggccgaggaggcctgcatcctgcgaggtggggcgctcagcaccgtgcgtgcgggcgccgagctgcgcgctgtgctcgcgctcctgcgggcaggcccagggcccggagggggctccaaagacctgctgttctgggtcgcactggagcgcaggcgttcccactgcaccctggagaacgagcctttgcggggtttctcctggctgtcctccgaccccggcggtctcgaaagcgacacgctgcagtgggtggaggagccccaacgctcctgcaccgcgcggagatgcgcggtactccaggccaccggtggggtcgagcccgcaggctggaaggagatgcgatgccacctgcgcgccaacggctacctgtgcaagtaccagtttgaggtcttgtgtcctgcgccgcgccccggggccgcctctaacttgagctatcgcgcgcccttccagctgcacagcgccgctctggacttcagtccacctgggaccgaggtgagtgcgctctgccggggacagctcccgatctcagttacttgcatcgcggacgaaatcggcgctcgctgggacaaactctcgggcgatgtgttgtgtccctgccccgggaggtacctccgtgctggcaaatgcgcagagctccctaactgcctagacgacttgggaggctttgcctgcgaatgtgctacgggcttcgagctggggaaggacggccgctcttgtgtgaccagtggggaaggacagccgacccttggggggaccggggtgcccaccaggcgcccgccggccactgcaaccagccccgtgccgcagagaacatggccaatcagggtcgacgagaagctgggagagacaccac

SEQ ID NO: 6392 - DNA, 6000 bp, Homo sapiens
acacacacacacacacacacacacatatacagagagagagagagagagagagacagagcacaatacaattattttcttcaattctaagtattcctccagctactgcagctaaacttttctctttatagacaggctttttatgaaaaagtttatactcctgactttattttctcatctctgaattcagtcggccttctccacctaaaacttcactcttgtcttcttcctgggacctttctcaattctgattttgcttgaccttttcctagcacttgatgttattgaacatttccttatattttggcttttataacattgcacttttcccattatataccaatatgtcaggtcatttcatgtcagtcatttttgtggaatttgtccatttttacatattggacatcgtaatgatgtccttcacactttcttctgctgcttcctacacttacattggattatcaaaattcccatgactaatttccactgtatgctgatgattcccaaatctttatctccattccatatctctatcctgtgtttcatgttgcagtgctccaaacatttcaaacttaacatgttgaaatctgaacaaacaattttccaaaacccatatttcctcttgtcttctctagcacagtgaatgacaatagcaaccacctggaagttcgagacagataccttagagtcatcttgtctattagactagttaccaattctttccattcctttatgcccgttattactcactggcaaataaaatgccacgtttttaaaattctaccatcaaaacatgttacatttatcacctttatccattctcattgccatgttttctgcctttttctaaagtacataccactctcaaatacgggcattattgcctcagtctcctcaaggtacccattcttaatccattcttaacacgttcttccctattgaaaccgttacgtgtgattgcttttagaatgacttttaaaaataaaatctggccatgtcgcttgcctgcttaaaattcattgttcataaatcaaagttcaggctttttaatgtggctgcagacctctgtttagttggtcccctacttacgtctgatcatttctcaatccttgttttatatactttagaagcagccatgcaagagtttcacttccttaaacacagtggttgtgtttgtggtgcactcccccgtcccagttgtccttccattagtctcatctttccattttcagataggtaccaagtttttttcagcctttcttaaaaagacacactgaaccgttcccactctgtatacttcaccatctaaaatcttactgctttgtaattgcctgcttttctatctttatctgccatgaattatattgttcatggattatatgctttgcaagggcagaaatcttatcaattttatctattattgtattcccagtacttggaatgctggcaggcacaataaatggtaaataaatgtttcttgagtgaattaacaaaaataggatgtgtgccataagaaaactataattaagaatatttactccagttggagggaatattaatatctaatatgtaaagtattctcataaacatgttatgcaatactaagaacaactctctgagtaggaaggactattgttttatgcatgaaagaaccaaaacagaaagtttgggatttgtccaaggtcagaaagaaagggatttttaaaaatgcaattaggataacctctaacctctgcttcagttttgctttttctgtcccacactggctaaaattttaaagtgctgaagtataaaatttgcatattttttaatcagacacaagattatatgatgcctagcagattacaactaacaataaaacaagaataatagttaccgcttattggatgtttgctatgttacttactagctgtccgttaactgttgttagcttgactatttgttttgtttttaaatttttaatttttagttttcaaattgacataatcattgtacatatttttggggcacatagtggtttcaatacatataatagtgatcagatcaggataattagcatatccgtcaccttatacattcattatttctttgtgttgggaacattcaatatcatccttctagctattagaaaatatataatatattattgttaactatagtcattttacggtggaacagatcactagaatgcattcctcctatctagttataattttgcatccttgaagaaatctctctgcattcctcccttccctcttcccttcccaacctttagtgtcctctgttctactttttacttctatgagatcaacttttttagctaaaaaacttgactatttgaaaagagctacttttgactccactcacttagatactatccccaaatgtatttgtgtttataatgaaaacagtaaacacatgctacacttctgtgaatatgaaatgtctagtatttcagttagctaatttatgactattctttaagcttcattgtaattcatcttcagtcttacagtggagaaatcctcatgctgtggaaattgtcagatttctgtggttttattgtttaaccaagtagctttttttgagagttggaagtaggggtgggggtatggatataaattttcaaattgtacaggcactagatagttgagagttgtcacccagaaattgctaaaagtaggaatttaaaaacatctttgagttcatttttttcttcatcttttattctcttgatacttcacttgcaaatggatatgaaaacttgtttggggagatatttatttgcataaagaatattggtgcagtcctttaactttcattattttataaaaccagattgtaattcttaccttcctatttatagcatgtgtgggaagtatattttattataaaggggacaggctgaagaccatctttgtttccggttggggcatttccagattggataaaatcgaaggagagccatctgttgaacatttagtattcagaactgtagaactactcctggcatctgagtttgccaagtcctagctaaaaatatatattaaatggggtttgcttcctttttttattggttttgaactcttctggcagaggttgtatattccctaaggagagaaatgtgagaaaaaaaatgtagacatttatttttcattttcattcacaaaacatttggttgaaatattaacatcaaatatgcccagacatttctactttcatttctatgtctctcctgtaagtttttttagaagttgttattaaataatgattaccaattcattgattttgtgtatgtcataaacacacacacacacactctcatacacacacagagacacccctgtctgtagtcacatattaagttgcaattttatgataatgtaataaaattgttaaattatactatttcgccagctcttgggaaagtatttttttttgcatgtaactcatcatcatttacatgcgaaaaaagaaacaaacaaaatatttttatataggttaataaatattaatattctatccacagatattaattaatgaatgtcttctctcatggagccaagggaccagtataccaaaatcaaaacaaacaaacaaacaaaaacaaagaaaataacaacagagatttgttatatttctgtttatttagaacctacccaaataccaaactctatttacagcttattgttattagccatcatacatcttgtaaaaaatttgagaagctcacattctttaataataatcattctgggacagcaaactagtgtttaagggaagaatcaactattttaataattggctctggtttgcctggcaaaatattacatcaaaactgtttgtttgtgaattatggaagggaggttttaatacaaaggaatgtcagtaggccccaccctggccagtctttaacaacaggatgagaggcaaaacatttgtcctgacaatacagcattgtgaaaaatatttgacttatgcacatgccaaaactaaagattctttcctctttaggaaataaataaataaatctcttcaccctcaaaagaaatgtttttgataaatgccaagaataaagaaggcagaaggaaattgtaaagaaaatgagggaaacaactgagtagttgagagtgattgtgtggtaaacagtgatcagctgtttgcactcagaggggcaagaatgacagttcagttatttctagatgcgcggaggtatacactcttttccaagagtcaggataaatcagtgagccttaaagtagtagattccgttgttgaattgaatagtgaatagctttgttggttttcagggacatatggctattttattctgaattaatgcatattaccttaactgttttctttttttaatgcattttaaaatgatagagctcatataattgtgaatgtttgaatacagaagaaaaaaaaggcctagagcactagggaaagctttaagaaatcaattaacagagcaatatgaaattataattaactaaatgaaaactttttaaggagataaataactttcctttgtatctttatgtcattttatttagataattaatgaaaatggcatctttgttcctttgggtcttcctttttgttagagaaaatatttttactctgtggcagttaattatgctatatcaactgaagataaagctaaaaagaagccatcgtgaaaaccattaagggaaaaatgacaaaatgaatggaaaaatggaatggctgcctatacatgagactgataagtgaaatgtagtgacatgatacaaagaacacaaacatatatttatgtttggttcaaagttaggcttttcacaccactttctgtcctcctttgagctgtgggagtattcagttcataatagactcacagcgtctcattactacttagaacttagttaacattgccttcctgatgtaatacaatgcccggaattcgataatcgttcctgaaaaaaacaaacaaacaaaaaaaatcaccattccttttaatagcttgagcctgtaccagaatgataagtggaaattagtcctcaaagtaacctcagctgtttcattattgtgtgcctcgagcatctggttattcaaggtgaggcttccatgttcaagtatgaatcccttgggatctgccgcaggactcacggtagtgctgcctgcttctcccactctgtggctgactcccctgaggtagcattctgccaggcaaagctgcctttccttcctcctactactgtgacttcagaaggtatggttttccctaatttatcccaagtatgaaatgagttcctttcctcttttttcccccacacggaacctagcctttaagtgtttaaggaagttttctttgtttaatagaagtacaacatggagaagaatttgctgctacttttgtaagtgttttatctgcctaaatctaggacaatttatctcctctaagaatatcctcaattgagcacccattctccagactgtaggcctacctgaaaaacatttctccgtttttccgggtcaacatcttcacaagactacgcattatttctatgctgtgctggaattcttcttagtaaaatatatagctgcattttctactcctatcacagaaaactagctactgcttccacagatataagaaaacaatattctgaaaggagtatattttcctagttctaggtttttaagtggaaggtagtaaagaatataagaacgtgggttgtgaaataagagatactaacgtttgaatctcagttccaccattcactagctatgaacctctgttttctcatctgtagagtgggaataattattgttcatttcatatagaaattgtagaagatatatatacacacatatttatatatgttatataaatatatatacacacatatttatatatataacatattttatatatatatatatatatatatataaacattttgtgctggacataaattttcagtaactgttagcaagtttaaataaataaaatcccga

SEQ ID NO: 6393 - DNA, 6000 bp, Homo sapiens
ttccaccaatcttagggcatctgccagggctgaggaagcaacccatcattcccgggcttattgcaccctttacctgaacaatatggggtttctaaaaccaaaaaaaaaaaaaaaaaaaaaaaaaaaagaggggatggctgttgggagaggttccaatagtgtctgccacaccaaccctctctctacttaaaaatgtcacagcagaattgcatctgcagtgattcatatcaaaagcttgaacagtcttttcatattgcacattttaatttaaatactttctcacttcatggttctccttaggcctaacctactttcaattaagcctgagtctgtgaagacatactaacttgttcgagtctattttctctacatgctagcacacacaccctggaatttaatggatagtaaaattatgcaaagaatcactgtgtgcaacaagaactgggacatttcctgccaagcccacctccaatacaaacatgtacacacacccatcggtgctatacatagaacttgctcttaaataccaacatccatttgccacactgtggagcaaatatgcttccattctcatgattaaaataacaggaagtatcatcattcttgaagtcttggtatttataacaacaatataaccacaaaaaatatgtaactgtggagactcttgataaggtctattggcaaggcatctggtagcatccttggcttgatgaaaagccctgtatctaaataatcttacttttcaagcaatgctgtgatgtaccctgaggatccaatccaagaagggtaaaaactgctacagacgtcctctataacccccagcctgaaaggggcctttgcctcttcagccagtctggcaggtcatggaaattctactcttgcaaagagagctgtggatacaagcaaagtatttcttcagtatttactttgactggtgaaagagccacggcagatttttttctttttccccaagacacaaaatgacattttaaagaagaaaccactcttggtgccatagcgtcttttaaaaataatatcagaataaaagctcaaaggcatgttctcttaagcacagctgtccaaagcctcctatttcagggagaattcagccactttatgcagacaggaaaacaaaactgttcgttttagcatcttctctattggaactatttttttgtactcagattgcatcagattcaaaactagtgacatcctcttatgctctgtttccccaaccagatcatgagctctttaaggtcaggggccacattttgtactcctttatttcttgcagagttgtgtttgtcatggtgtactttcaggaaattgttgttgaatggatgaatgaatgaaagaatgacaaaaatgggagagcagtggtaggtgagttgctaggcagcctggtaaagaggattacaagagtcaggtcagattagcaggaaaggtggtgtaggggaaagaatgttgcattctgagccagcagacatgggtcctagtcccaggctggcttgcttgtcttcactcattcaacaaacatttcttacacttcaagtgagccaggcaggcattgcggcagacactgaagaaggcaaaatccctgccctccaggtgtggtggtggtggtggtggtggtggtggtaagggaagcatgtggagatcaggattatgggagagatgtgtgataggaggtatgatcacggcaagcacagggcacatggaagcaaggagaaagggcttctaaatcagactgtggattccaggaaagcttcgtccacctgaaaggaaaagacagaggcacaaaatataacaaaacatttacttgagccaaagtgaggacagttgcccggaagacttagacccaagtaaccctggatatgagcttcatgccgcctttattacaagcaggttttttacaggcagaaaagggggacagggagtaggccgatatgaaattgtttgtaaggaattcacattggtttacagaaacaacattgctcactgattggctatgcactgttaagctataggctatgagtgatagtgtccagtgtgacattattaggttaatgtatagttacttgtggcaatagcaagcagtttcaaggatgaatacatagctcaaaagggggcagtagtgttactggaaagagttcctgatccagaccctaagagagggctcctggatctggtgcaagaaagaatttggagtgagtctacaaagtaaagtgaaagtgactttattagataagtaaagaaacaaaagaataggcagagcagtggcgtcggctgcttgactgattatacttatggttatttattgattataagctaaatggggtggattattaatgagatttttgcaaaagatgtggggaattcttttctcttcccagattcctgaaggaggagggttttgattcaagccttaaagatgagaaggtgttggcttgaaattgaccaagaaattgaccttttactgtaggtaaaaggacttacctgtgaggatgttgtattggagaattaaagtctcagcttcaggtgagacttcagggtggctgtgacgggagataaagttagagacataaactagagctactttccaaagggccttgctgcaatataatttagtggttaggagtggaggtttagagatcagacagaattgggttcaaatctcagctttggtacttaccagccatgtgataataactgatttttttaaaatcccatctgagctttagtttccttaacacaacgactacctgttatcagttgtctattgctgcataacaaattatcccaaaatgtaatagcttaaagcaacacacagcttcttcagcttctgaagctgaagctgtaattctcagttttggttggtctggaatcccaccaaaactataattataatctaaccaaaactataattctcagttttggtgggtctggaatctgcacctggcttagctgggtcctctgcttcagggtctcttgcaaggctgcaatcaaatgtcagccagcgctgagataccatctcaagacccaactggggaaggatccgtttccaagctcactgacatggttgttggcagaattcagttccttgctgactgttggccagaggctgccctcctcagttccttgctatgtgggcctccccgacataacagcttgcttcatcaaaatcaatgagagggaaagtcaactaacaaggaagaagccacaatcttatttagccttcttctcatcactcttgccacactatgtttgttagaaatcacaaggccagtccacactcccagggcagagattatacaggggaatgaacaccaggaaatggggatcattggagaccatctcagtgtttgcttgccccaaagctcatagcttagtaccactaaataaatgttagttattattattatgctgaatcgagagataaagtaaaactacagagggccagtagttttatatcagggagtaacttcagatgatgttgggcaagtcaagtcatctgtctttgaactttcatttcatcctcagtaaaataaaaatacctgaccccagaaagaatgagaaaatatatgtgcaagcataaatatatttttggaacatcaaatatacaactctccactctgaggaagcaaactgctttgggccagttttccattttgtgtctgctctatgagtctcacagtctgatgtcttcacgttttttagcgtttggtccagtgggcccataggaataaacacctacaaagagcagtgtgtctctggagagtcctttaaggcatttccaaggatttgctttttggtttttttctttctttcgttctttttaaatatctttgcttttaaggacctcatggggggcctgggagagaaaacagactgtctgggaaattttaagctcttgataataaaaatggtaataaaatctcctccagctcctgaggcttcgcagaggggatgtttatggtggatggggttccccttctcctgcgcagctggtttcgaggttgtgcggtttccagtcctgcggagcagctcaggttaccgcctccgtggccgcgggggagggcatctccgacggccgcagcaatgggcaagagatcagggtcttcccatccccgcgactcgcccctttctgcctggtaaccaagcgggatgcctcatcctactccccaaacggagcggatcacacacagtagtatttcatggtctttcctgctgcggttttcccgggggaaggtacttccagagggtggccaagtcttccctagcggccggccttcgggagggggacagaacttaggagtcagccctctgccttcgtacaaaggctcgcttctcctcagggcgtctctgggtggagcgaagcggccgaggggaccacgacaatgtccctttgcttttcggaccgatggccaggcctccagagccaggagcgcccgggaccccagggcagggagcaaagctcataccgcaaccccgccacccgcccgcgccctgccagcctgttggggccacagcgcgcaggccagcagccgcactcgccgctgcggggttccctttgcgctgagctcatctcctgcaacgccgctgccccaaaccttgcgggccatttggtcccgggggtggggctccttgggggccgcggggcagcccggatgagaggatgacccgggagctccctgggggcggagtggaaggggcagctccaggcagccctggccaggagcttttaccccgccagccccgctgctccagcggccgctgccttagaaaagttaacgagaaccagatgtggtggccactgccgaactttctcagagccggtgattggtccccagccgagggcctcagccaattagcttgctgggtgggcctggagtcccgccccgcccaggcgcccgcggagatccaggttcgaggctggcgcggcgcggagagtgggctggaggccggggcgggacgcgttgtgcagcgggtaagcgcacggccgagcgagcatggagggggaccgggtggccgggcggccggtgctgtcgtcgttaccagtgctactgctgctgccgttgctaatgttgcgggccgcggcgctgcacccagacgagctcttcccacacggggagtcgtggggggaccagctcctgcaggaaggcgacgacgaaagctcagccgtggtgaagctggcgaatcccctgcacttctacgaagcccgattcagcaacctctacgtaagttcagccccctcctggcacttttcccgcagcttcttccctggggtcggtctcacggaaaccctgcctccagaggggaggaaacagaccccactcctggagccccccagcacccttgcggtggtacccggccagagagcgatgccgctgcctgccccgctgctgtaggggagcaagaatgacctggaggggagagcaagaattgttcgcagccacgtacgcgtcccaggcagaaaaggtggcgttgctagggcggccagcgggctttgcagttaggaccgcgagaaggctgtgcccgtctgcggagctggggtgttccctcttcagacctggaggcttcctctccgaggacatggggctccggggttgtgaggggagtgagaagataggtgaacgagttttagggcccctggacctactgcagcgcggagctgggacagtcgcaaaagttgcgcttgtttccctgaatccagactccctggccagtggggaaggagagagaggctttttgcctaagtcagttcccttccctccctgcgcgaaagggtagcgtccttgggcttgagcgactgtcacctttttgtccctctcctctcccaggtgggcaccaacggcatcatctccactcaggacttccccagggaaacgcagtatgtggactatgatttccccaccgacttcccggccatcgccccttttctggcggacatcgacacgagccacggcagaggccgagtcctgtaccgagaggacacctccc

SEQ ID NO: 6394 - DNA, 6000 bp, Homo sapiens
aaagagtttgagttttatggaaaataatttctatcatgagaacactgacatttttaagctcccccaggttacaggtcattgcattagggtaaaatgttaagctgattcatattcagattgcttccttctaaaatcataggctttattaatttcctcttttcttattgtgtttctcatttttgatggcctaatcttcatttattagtactgtggccagtgaaagattttcatttattccacgaacatgtacaaagacaagatccttgttaaggatctctgggagtctcagggacatttgaaacacaatccctgctcaagaagtttaaagatgttacaattcagtgaagaaatatgaagtagaaaatatcataaaagattatatactaatgctgaaatgaacatgggagtgcagatatttctttgacatacaaattttatttttatttttaagacagagtctcgctctgtcacccaggctggagtacaatggcatgatctcagctcactgcaacctccgcctcccaggttctagaaattctctcacctcagcctcccgtgtagctgagactacaggcacacaccaccatgcctggctaattttttgtatttttagtgtagacggggtttcaccatgttggtccggctggtcttgaactcctgacctcaaatgatctgcccgcctcagcttcccaaagtgctgggtcaggcgtgagccaccatgcccagtctgacacgccaattttaatacctttgtatatacacccagaagtgggattgctggatcatatggtaattctatttttagttgtgtgtgtgttttttttttgtctgctttgttttgtgagatggagtctcgctctgttgcccaggctggagtgcagtggcgcgatctcggttcactgtaacctctgtcttccaggtgcaagcaattctcctgccttagcctccagagtagctgggactacaggcacgtgctgccacgcccagctaatttttgtatttttagtagggacggggtttcaccgtgttagccaggatggtctccatctcctggcctcatgatctgcctgcctcggcctcccaaagtgctgggattacaggtgtgagccaccgtgcccggcctatttttagttttttgaggaacctccatactatttttcaaaatggctgtactaatttacattcccaccaacagtgtacaagtgtttccatttttccacatcctttccagcacctgttatcattcatcattttggcaatagccattctaacaggtgtaaggtgacatctcattgtgtctttaatttgcatttccctgatgattagagatattaagcatttttttcctatacctgttggctatttgtatgtctttttttgaaaaataactgttcagaacctttgctgctttttaaaaatcagactattttcataacattgatttgtttcttatactcccatgttcatttctgcattatttacaatagccaagatataggaacaacctaagtgttcatcgacagatgaatggataaagagaatcttgtatatatatgcctactatacagccataaagaaggaaattattcccagtactttgggaggccgaggcgggcggatcacgaggtcaggagatcgagaccatcctggctaacatggtgaaatcccgtgtctactaaaaatacaaaaaaattagccgggagtggtggcgggcgcgcctgtagtcccagctacttgggaggctgaggcaggagaatggcgtgaacccgggaggcggagcttgcagtgagcgagatcgtgccactgcactccaggctgggtgacagagcgagactccgtctcaaaaaaaaaaaaaaaaaggaaattctgtaatttgtgacaatatggattaacctagaggccatgataccaagtgaaataagccaggcacaagaaaacaattaccacataatctcacttacatgtggaatctaaaaaagtttatctcatagaaacagtagaaaggtagtcaccagaggccggtgggcagggaggatggggaaaggggagatgttggtcaaagtgcaaagtttcagttagactgcaggaataagttttagtgatctaatgcactgcatggtgaccacagttaataagaattgcaaaattgctaaaagaataattttttaatgttctcatcaatgaaaaatgaaaagttggtgaggcaatgtatctgttaataagctttatttaatctttctacaatgtatgcatagatcaaaacatcccattgtatcctataaatatacacaattattatttgtcaattaaatattttttaaaaagtacatactaagttccatggatgtctctccaagtgtaggaactggaccttatacatctttgtatcccaaatgtcaagctcagcttgtcacagagtaagtttactgaattgaaatcattgagagactggaactgggttaggaggaaaccaggaagacgacttaagacagggagaacatgacctgggtctggccctaaaaaggataactggggcctgtatataggaatatgaaaaagagcttttggccaggtgcggtggctcacgcctgtaatctcagcactttgggagtccaaggcaggcgaatcacgaggtcaggaggttgagaccatcctggctaacatggtgaaaccctgtctctactaaaaatgcaaacaacttagctgggcgtagtggcacgcgcctgtagtcccagctgctcaggaggctgaggcaggagaatcacttgaacccaggagctggatttgcagtgagccaagattgcgccactgcactccagcctggcgacagagtgagaatctatctcaaaaaaaaaaaaaaaaagaaaaagaaaaaaaaaaaaaaaagctttcaggttaggagggagattgtattaatatgtacatgtgacatgttgtagatactagaattagagcttctcaggtccatcaggatctcagatgggttgttgacttttactacatgtctacttggcagtgataggcagagctctagggtttgcagtaaaatacatgagtttaagtcatttgaactatttcaacttttaatgtgcatgcaagatgtcggaaagctgccagtttcacctagaaactaccttcttaggcttggtgaagtggctcacacctgtaatcccagcactttgggaggcagaggcaggcagatcacttaaggtcaggagttcgagaccagcctggccaacatggtgaaaccacatgtctactaaaaatacaaaagttagctgggtatggtggcgcaggcctgtaatcccagctactcgggtagctgaggcgtaagaatcacttaaacccgggaagcggaggttgcagtgacccgagattgcgccactgcactccagcctgggtgaggaagtgagagtgtctcaaaaaaaagtcttcttaaaacaacaaacaaacaaacaaacaaaaaacaaaaagtaaggccaggtgcggtggctcatgtctgcaattctagcactttgggaggctgagatgggtgggtcacctgagctcagagctagagaccagcctggccaacatggcaaaaccccttctctactgaaaatacaaaaattagccgagtgtgtggtggcttacgcctgtaatcccagctactggggaagctcaggcaggagaatctcttgaacctgggaggcagagattgcagtaagccaagatgacgccactgcactccagcctgggcgacagagcgagactccgcctcgaaaaaaaaaaaaaaagtaatcccagcactttgggaggctgaggcgggagaatcgctcttgaggagtttgagaccagcctgggcaacatggtgaaacctcgtttctactaaaaataaaattagccaggcgtggtggcgcacgcctgtagttcatgctactcaggaggcttaggtgggaggatcgcttgagcccaggagttcgaggttgcagtgagctgcgatcgcatcattgcaggccagcctgggtgacccagggagaccctgtctggaaaaaaaaaaagcggatagactagtcccaactctgaatgttaaaagaccaggactgggtatcagaggacctccaatccttgctcaccttacctcacttctctaggcctgtttcttcctatgatatgagcgggtggcttccaccctcgctgtctaatacagtgggcactagccagccacatttgactatgaaatgggtctagttcgcatcgaatacacactggatttcaaagacaaaaaaagtcaaatatcttatgaataaatttaatgttggttatattttgaaataatattttgcacattcggggttaaataaaaatattttaaaaataaaatgtacctgttatttttactcttttgctgtggctactaaaaatataaatgacatatgctgccctggtctagatgctctctaatatccctttcagctttaagactccgccgggaacacggtggacacgtaattcgtacgatttgattgtctcgcattgagatacggaaggattggccgggagtgagcgggctggggctgggcggggcggcgcggggcgggcaccccccgccccccaaccccgcaggaaaacacaggcccctccggctttcgctctcgctctgggaactggaaggacccccgactcccgcgcagggtctggggttgtgcgcgtcgggttgcgtctccaggccgggggcgtcagggagccgggggcggggacgggcgcgggcgcagcggaccgggcggggccgagccgggaagctggtcggtgcgtcagcctcacgcggcgggaaggaaccggtccgaggccccgggctgccggcgcgggcgccgcggcacgtccacaggctgggtcgcgaggtggcgatcgctgagaggcaggagggccgaggcgggcctgggaggcggcccggaggtggggcgccgctggggccggcccgcacgggcttcatctgagggcgcacggcccgcgaccgagcgtgcggactggcctcccaagcgtggggcgacaagctgccggagctgcaatgggccgcggctggggattcttgtttggcctcctgggcgccgtgtggctgctcagctcgggccacggagaggagcagcccccggagacagcggcacagaggtgcttctgccaggtgagcgatgtgcgcgttggtgctgagggtcccggcgccctccgcggcgtgcactgtcccgcacgccctggcgggtgagcggctgggggtgcgtccttgcatctcttcccaccgggaatgagactccggtgctgctgcccggtggccgggactgagtctggcttggcgtggaccgggcctccacggcagcctggacgtcgccgcgccctccggtgcctcggaccaggagaggggttgggtgcacgcggttgagtgggtttatgcatctttgttggtcttatctgcccggggagagtgtgcacagtgtataatgccctgccagtatttgctattttcacagaacctggatctttctcacttctctcttgaccaggaacttgtgtacccagtacctgtgctgcgtgcatttcgccagcctttctggctaagacgtttgtgggctgatctcagatttcgatgttaggcggaagaatggctgcttgcggtttttctgtgtgtaagcccaactacctgatgtctttgggactgcagttgccctctggtttctggtcctgtgtgctctttttctcgaatgtaatgagattctcttatcgtgacacccgttaagctggtacgaattgggaggaaggtccttattcttcagtgcacaagtttaattacaagcggattatgatcatttccttctgtaagagatgtggtttcttgagcaaaaaattgagagaaacttacagttttccattatcttcagtatctagtatttcaatgtgattactcttgtcaaagccactttttggttgactctgttgataaaaattacgttttatacaaaattaagggtt

SEQ ID NO: 6395 - DNA, 6000 bp, Homo sapiens
agatgctttgtatttgcgggctttgttttccagggctccaagcagctgacttgtgtctagctgtccagattgggaacatggctagtgggggcagtgatggtaaattgatggaaagaatttgaacaaaggaatttgagggaaggaggaggggaaagaaggagggagagagagagaacaagcatataaattaatccttctttgaaatattatccagccccattcatacatgcaagtcaaagcaggaacttaattcagtatttactgcaaaagtactcccatgggctaaaagaattaacgcaaattccaaagaatactaggaattgtttgaacacagagagtatagatttctcactgtctataatggtcctccaaaatgtcaagtaaactcattattttcctcactaccttgtctatggttggttgatccaactagctctttatcctctttcaaaagggtgtattctctcacagattatagctgcttaatattgtctaaagtactgctgcccagtagaactttctatgttggaggtatcctatatctatgctgtctaatatagtggccacatgaggctattgaatactggaaatatgagcgctggaaatatggctagcgtagctgaggaactgaattttaaattttgtttttattttttaattaaaaattttttttggagacaaggtttcattctgtcacccaggctggggtgcagtggcgcaaccatggctcactgcagcctccaaccccatggcctcaagcaatccttgtgcctcagcttcctgaagtgttggaattgcaggtgtgttctaccttgcccagcttaatttaaatttaaatagtcacatgattagtggctcctgtattagacagcacaagcctaaagtttacctgtgtgctctggtaatatgtgaagggggcttcatcctactgcagcttatataactgtgtgaatcagtcagcactccacctggcatagaacaggtgctcaacaaacctttgttgaaatacctaaaatgctacccttgaagaaagttggtggggaacctgggttttatgtaaccgctgtaggggttgaggcaggcaaaatttctcttacaaatttcctttctcctcaggtgaaataggggtagccccttctaattaagggtgggtgcctgggagacagtttcattctatgagataaggtgctagcctagtcagcagagaaggaaaacacacatttcaagtgaagccggagaaaaacttgttgccaaaaggtaggatttcttggtatctggtgatgaaacatcatttcccaagttgtagatgggattcatctggaaaaagggggttcgatttcatggtttggcttgagtagttccctgcaaactctctctcccgagcccagaaagctgcatctgcctttcattagattgtgagttctcttgcataaatattgcctgatgctgcgttctgccgtgcccgtggccttaagtactgaattaaatatcatttgcctccttcttcgctttcaccagggcatccagttaatcaagttcagctgagcttgtctcccaactactatcaagcatgtttacccctttccttcccaccttccactgctctagttcagatccatagcaacttttgcttggaccattgccgtgggacccgatttccaatctaacactcctctaatcagggtcattgtgcacagttgggcagtttgtgcactgcacataggtgcacgaccagggttggtggggctgaagtatagcttgtgttcctacactctggggtgggcctctgtccatctgcagaaagtaactttacaaaaaatgttattggattttattattttaaaaaagaaatagagatgagattgtgcctggaattggtgggttcttggtctgacttcaagaatgaagccacggaccctcgtggtgagtgttacagctcttaagatggcgcgtctggcgtttgttccttctgatgttcggaagcgttcggagttttttccctcctggtggttcgtggtctcgctggctcagaagtgaagctacagaccttcgcagcgttacagctgttaaggcggtgcgtctggaattgttcgtttctccctgtgggctcgtggtcttgctgggttcaggaatgaagctgcagacctttgtggtgagtgtgacagctcataaaatcagtgtggaaccaaagagagagcagtagcaagatttattgcaaggagcgaaaaaacaaatctcccacaccatggaactggacttcagcgggttgtccccgctggctccggcagcctgcttttattctcttatctggccccacccatgtcctgctgattggtagagccgagtggtctgttttgacagggcgctgattggtgcgtttacaatccctgagctagacacaaaggttttccatgtccccaccagattacttagatacagagcatccacacaaaggttctctaaggccccaccagagtagctagatacagagtgtccattggtgcactcacaaaccctgagctagatacagggtgctgattggtgtgtttacaaaccttgagctagatacagagtgctgattggtgtatttacaatccccgagctagacataaaggttctccaaggcctcaccagagaagctagatacagagtgcacattggtgcattcccaaaccctgagctagacacagggtgctgattggtgtgtttacaaaccttgagctagatacagagtgctgattggtatatttacaatccctgagctaggcataaaggttctccacttccccccgagactcaggagcccagctggcttcacccagcatatcccacaccggggctgcaggtggagctgcctgccagtcccgcgccgtgcacccgcactcctcagcccttgggtggtcgatgggactgggcgccatggagcagggggtggcgctcgctggggaggcttgggctgcacaggagcccatggagggggtgggaggctcaggcatggcgggctgcaggtcccgagccctgccccgcgggaaggcagctaaggcccggtgagaaatcgagtgcagcgccggtgggctggcactgctgggggacccagtacaccctctgcagccactggcccgggtgctaagcccctcatcacccggggccggcaggggcggccggctgctccgagtgagggtcccgccaatcccacgccaacccggaactccagctggcccgcaagcaccctgcgcagtcccggttacccctcgcgcctcttcctctacacctccctgcaagctgagggagctggctctggccttggccagcccagaaaggggctcccatagtgcagcggtgggctgaagggctcctcaagtgccgccaaagtggcagcccaggcagaggaggcgccgagagtgagggagggctgtgaggactgccagcacgctgtcacctctcaagatctcattaccttgtccaggctggtcttgaattcctgagctcaagtgatcctcctgtcttggcctcccaaagtgttaggattacaggcatgagctgctgtgcctggccaaaagtaacttgataatttgcacacaggtgccacataatcctggtggtacaggttgtactgtccaatacactagccacattttacttaaagtgatgtgaaatttaaagttcagttcctcagtcatgctagacaatttacaagtgcccaatggccacatgtggctagtggctactgtattgggcaatgtttaggtatcgaaaattttcaccatcacagaaggttctattgcacagcactggacagaccctgcttctaaactattctacgcaatttgctaggtgaacgatctttaatgcaaatctaaacatggtcttcttttgctcaaaagccttcaatgattttctcttccatcagcagcaatcagttaatagagtttttttcttttaaaaatggttgtaatggaaagttaaatcaattttgaatcaattttgtgtgttaagaccagcattaaaaacaagtagcaaaagagagaagggaaagtacttatggatcattagtacagttttgtgaaatttttgttttggtcatatctatatttctttgcctctataactagatttccacctcttcataacttgatgtctgtatgatattccactgggttgcaatgaaaaaaatctttctagttgtgtgtggtgagcaaaaaatttgggcttatgggataagaagtctgagctccgtaatgaagcattataaggccctctatgatctgatcccttgctaattcatttctaagtctcaccactgtcttgcacttaggttccattaatacagaattgctgctggtttcacctgagacacgaagctttatttttcttttcttttttccatctctgttgcgtttcctcattctgaactgtttccttggactgccagttctaccttctttttgcctggagaacttatcatcatctaaggccaacttaggaaacacctacagcaggaatcctgcctaaatgctccagggcgggctggctgtccttctttgacctttcagagcatcccacacacatccgtttacggggttataataacgtaattatttatttaggtgttcatttccggcactatactaagttctttcagtgcaggtactatcttattcatctttgtatctgaagcgagaagcgcggtacctgtaacaaactaggcattcattcaataaatatttgttgaaagaataaacgcaagaaggaaggaaaaatcaatcaacaactgtgcggacaatgtcagtgcaacgcagactccggccatcagagggcgccggggcggctgggctggtgcgcaggcgcgctgagagggctggcgccgcggcggtagcggtggcggtcgcggctgtggccgggggaagtgaatggttttacccagagggccctgcgccgcctttctccgctggcaacggcgccgctccccgctcctcctccccagccatggcgttcacgttcgcggccttctgctacatgctggcgctgctgctcactgccgcgctcatcttcttcgccatttggcacgtgagtagctggggctggggaaaggagggcgaggcggcaacacagcctcttttcgccccgggcccgcggtccgggccgccacggccgccggggctttgcgcgtcggggatgcggcccggctggcacgggccgcgcggcgaggggtctgggggccgcgggtactggaggagccggggcgcgcagtcgccaggtggacgcgcccgcgttgcctcggcacaggccgcgcgcaccgctactcctcccctactggatggggcggccgcggtccaggcgggcgcccgcggttccgcgctgcgttcgcaccgacctctgccggcccgcggccctgcattcccggggaggatgtcgacagcgcggtgggacggccgtagtgtgaatgaagttttccgaatttttgttaatacagattgactttcttttagggtttccacagaactgtggccaaaatgtaacctacttagggtgaatttccaactctacttttcagcacttgttcggtgctcttcaaatcaaatcactttttttctctttttccagattgttgtttcctggtgaactttgatgcaagttcaattgattactttgttgattgcatgtgcgcgtttcccccccaaatcatactttgaccgctggagtttcaacaggcagctttccaagccacccttatattcaggattgcttgatttagtagagggagttttcatttgattttgagatgctcagaaaccttaagcttttctggggcagtatttatttctgttacacacatcatcatcactattgcagggtggaagcacagccttactggtccctctaaggaaaaagtcgtaagttccctgtgacatagttctacagagataagaatttctgttgctttagcacaaaattaaaagccttgagagccttctggaaatcattcattaaaaatttatc

SEQ ID NO: 6396 - DNA, 6000 bp, Homo sapiens
cattccccctaagaactagaacaagacaaggatgcccactcttaccactcttttcaatacagtagtggaagtcccagccagagcaatcagacagagaaagaaagaaaaggcatccaaaaagtaaaaggaagtccaattacctctgttcactgatgacatggtcctatacctagaaaaccctaaagattcctacaaaatgcccctagatctgataaatgacttaagtaaagtttcaggatacaaaatcaacgtacaaaaatcagtagcgtttctatacactaataacattcaagctgagaatgaaatcaagaactcaatgccatttacaacagcggcacacaaaaaataaaattcctaggaatacatttaatcaagaaggtgaaagatctctacaaggagaactataaaacactgatgaaaaaaatcacagatgacacaaataagtggaaaacattccatgctcatgaattagaaaaatcaatatcgttaaaatgaccatactgcccaaagccatctacagattcaatgcaattcctattcaattaccaacatcatttttcacagaattagaaaaaactattttaaaattcatatggagccagacacggtggctcacgcctgtaatcccaacactttaggaggctgaggtaggcagatcacttgaggtcaggagtttgagaccagtctggtcaagatggtgaaaccctgtctctacaaaaaaaaaatagaaaaattagctgggtgtggtggtgtgcacctgtaatcccagctactcaggaggctgaggcaggacaattgcttgaacccgggagctggaggttgcagtgagctgagattacgccactgcaccccagcctggacaacagagggagactccgtctcaaaaaaaaaatttataaacatatctaatactaaacctctgcaataggttggtaataacaagataaccttcaccattgcaaaccttattctggattttatagcttctagtgatagcttaatttgggaagaaaaactaatttaaaatgaaaataataaaaactataagactacgtaataaatgtttaaaaataaattctacccttaagaagaaaattctgacacatactacaacatggatgaacctttaaaacattatgctaagtgaaataagccagtcacaaaaggtcaaatactatatgattctacttatataacgtacctagggtagtcaaattcatagagacaaaaagtaggatgcccagggctgaggggatgaaaaatgagcagttagtgtttaatgggtagagttgggagagatgacaaagctctggatatgaaaggtgatgatgattgtacaacaatgtgaatgtacttactgtcacagaactgtacattttaaagtagtaaactttatgttatgtatatgttgtcacaatttaaaaaaatcaatattattcttttacctttttgcttgttgttctcttctattttatccaaaggcaacacttgcactgcaacgtctttagaaaaatcctttgggatatgaaaggaagaaataggctaaataaacttcatgatttattatttatcaagaaccgtttactagctatgtgactactgtgttctgggagggcaggactgtgtatttcatattcttcatttccatcatcatgcaattctgatgtaccttaaagctactcaaagatttgttgaatgggtgagtaatacactatcagacaagtgaatgaatgagtaaatgaaccagcaagcaaatgtagcactgagattcagactcaaaccagtttgccacttgtagcagagcaagtcatttaacatctcagttgcttcagtgaaatgtgaaaatctgactcactgtgagtcaaatggagtagataaggatggcacaacatcacgaagatcacccatttattctcaattatacaataacagtgtatccatacatttgagaagtttagatatcattaaataaggcctgcttaaaaaaaaaaaagacaaaacaacaaaaaaacactccaaagtctaggcatttacttagggatcaagtacagcaaataattatacattttattgtgagcttttgacaaaattgtcatatagtctcaattgaattattagtttgccagcttcaattttcaaaatagcatattgtgaaactctcattatacagacttattaaactgacaatacataggtcaacactatgattagccgtcaaagtctgattagatctcataaccaaaacattgtatttatcaaatactttcggcattataaagttaagatgataatttcatgttattcttaaagaacctcccttctaagaaaaccaaaaccattctcacaagtgttagaatgacatgcaagcacacctcacattaaagaaaaattgtactgttagttgttccttttcttttacctaagaacatgttaagtctctgggcaagaacaccttttccctgaatagtaagagagtttcttttcagttatcctatctctttcagcggccattatcttactaataggtatttttgattctagggaaggccttttgtttaatgtctcaaacaccattcaaagtcacaattgtagtatataaaacatttgttttggtaagtgatatttaaataaaaacaaggcatgctgctaatcaaacataatttaagaatgcattatttgacaatactgaaaattttaacgtgagcataattaagaatccttttgcttacactttctgacaccatgggattttctaatagaggctggtaacaatttctagcagaagttaagtctgatgaacctaacaaaacaaaggaatagattttagtgattttaaaatcagatccttagctttagaaactgtatatgcatgattcaagatctataaactccatataacgcagaagttggaaagacaatttgcatgcaaaaaaagttaagaaaatgtatttaaacatatctgaatgaaagtttttacagttgatatttgggaaaataaggttcggtactgacaataaagtgagattaagcacgaaacattttaaaatataaccatacactattggatgtggacaaactatgggtagaaatatgtatacgatgtaaaggtctaatttaacagcagtactatttgagtgtcaccgctgtatcccccaaagaacagcattacaaaagcgttttgctgtttttgctcacatattcattaatttaatcctcacaattagcagcgaagtgggtaaagcatatgttatccttattttcactgagctctagacagattaagtgaattggaatatagaagccatcaattggcagaagtcctgcttttcccactatgaaaagaaagtagtgaattaggtaaaaagcactactttgggggaaaactataaaaaacactacgtgggggaaaataaagcacattatacaagttaagtgtatccaccataaatataaaaaaaaaaatatgcaaaagtcaatgcaaaaaaaaaaaaaaaaagcacaacaggggacgttaaagtttcattcattccatctattcaaacattttataggcttcctggccattttcccgggaaacagggtcagttttcaaacatctgtacaaactagacttatatcttacgtttgggaatttaaacaaataaggactaaagatttactaaactaaaactggttgaaaaactacatggaatcacataccacgtgatgttccattcaaactagtccccgttccaacaggaagacgtttatttgcagacaatgccggaggaacacagggcaactcatctttcagcaaaaccaaatgatctccatgattttgagaaactacctcacgaagtctcttcactggcatcttaatcttttttttcttctccaagctgacctcagagcctttcatattgttggtcacaaaacaagtcccacacttaaggacggaaaaactttctctgtttccttaagacttcagaacaaaattttcacctctttgcaataactgtttttaaaatgtcgaacatccacaaagctgaaaatctaaattctgatattgaatccaggattagagctgactataaagtcatatttacccattaatcccactcagtctattaatacaccacgccaaaatgtgaaagtggggatgacaagagaatggccacaggagcaacaataaccataacagtgcactccccaaccccagagctggtagggcaaaaccaaacacatgtagtggcgggcttaaaatttgttgagaagaggcagtcaagcaaataaaagcgaaatgctatttttaaaataatgacccacataagaagcgtaatagctttcttcagccacagagtcttacacacccctccagatgcaatcgtcggaaacataaattcacccctacgtatctccagaacgcccgagacccgcaccgtcgtgggtgtaatctgacaacagcgtcagttgcccgcaggtcaacacccacttcccttcaaacccgcccttgagacacaacacgcatgcgcgccaagaaactcacccaaaacatccaaccagaaagctaagcgctctctggtgctcttccattcctctccgggtggaaacaaactccggacataacaggggtttatttatttatttattttaaggtagcacattgccgcacaagaccgctctacagtctcatccaagacttgaagagctcccgacttgtaatactacttgtgtttaccagggactgttgacactgcttcgcttccgaagaccgttagggacgtgggattaggtaaattaggcttccaagaagtttcgacagattcgggtcattattggagaggaagtcgggaatagaaagcgttgtctaagcagaaaataaccgaagttaatccttaggagattttagaattcgctgatggtacctgctttttcttctagatttcctcgcgttataacgaatcggcgtctaagggtttaagtgtcacttgacattactgctcccacgtgttctttcccatctggcggccgcggctcctgtccagaccctgaccctccctcccaaggctcaaccgtcccccaacaacccccagccttgtactgatgtcggatgcgagagcctgtgcttaagtatggtgtctgttctctgccgtgagaatccggggttcccggacggggggtggcaggctacgctccaggaaagtggcggggtctcccgaggaggccgccgcacgtacctggagcagtggggggtgcgaagcgggacagcgcttcgccgggtcgggtgcagaccttcctggagatggtgtcacctgggcgagggtaggaactttaggccctgagccacccccaacccggatctggggagtcggggtcctgttttgggacactgaattagactataaggtatttacgatgtgaccttgagctgcccgggggaagatcctcctttaaatgaaaatcgtctttagacataataccaggtctaacaccccttccctgatctgctcatttcccaggatgcgctacttagagctttccctttacgccttactggaggctttagaataatcaaagcagaaaatgtaatccgatctaaaagctaaataactaattttatttcttttacatctcggcagtctaccttcatagaagtctagacttaaaatggactttaaagtctgagcgcggtggctcacgcctgtaatcccagcactttgggaggccaaggcgggcggatcacgagatcaggagttcgagaccagcctggccagcaaggtgaaaccccgcctctactgaaaatacaaaaaattaactgggcatggtggcgcgcgcctgtagtcccagctactcaggaggctgaggcaagagaattgcttgaacccggcaggtggaggttgcagtgagctgagatcgcgccattgtgctccagcctgagtgacagatcaagactgtcttaaaaaaaaaagaaaaaaaaagactttaagggctcagcgttaaagacccttttaattattattt

SEQ ID NO: 6397 - DNA, 6000 bp, Homo sapiens
ttctgtttttgtctcctgttttaattttacctttcttttataaatcctcaagctggcctttaataatttttatgtccagcatttttttcatgcaattcatttctaaggttcaatttttttcttcctaaagtgtcacctttggtagatttttcttcagggtctgcaattagtaaattttctcattgattacatatttgaaaaggtctgttagtcttgctgggtatagaattcaagatgatgattacattcgtttgctactttgaagatgttattttctcaaactattagattctggttctattaaagactgctgttggtctaacagtttctctgaggtaatctgcctttgatttatgcttgcttttaagattttctccttgtctgcgatgccttacatgttcactataatgtgggtcggggtattgatttattacttgtcttgctaagggctgattgactgtcataaccctagaatttatcatttctggaaaactgcaaatttggataaattattcaagttcccgtgttagtccacttctcaaaacccttcagtgtctccctcatttactgccagtattactactcaggactggcatgatctagcccctgcacatttctgtaattaagtttcccattaattccatttctgtctgccaggaaatccccatgactcaaactggtgatgctatttcttgttcataactcagctcaactttacctaccctctaaagcctttcctgaaacctgttcttctccctagccactctctgtttgtgtacccactctttcctgctcataggtctgttagttattgcatttatctatttatgtgtaaaattttccccctctggactcgagttcccagtgggcagctccctttgtatttatggagacaggtccttagtatgggctctataaatatttgtagatcaaatgaataaatgaatcaagaaataagggtaaacactaactcatagggatcttgtaacaactaaatgtataccacatgaagaagcacctggcaaataacatgtgctaatctattgtttgaaactccatattcatgcattattctgctacagtgggttatgtgccaaactggttgccttttaaaatttccttattccatatggcatagagttctcagtgttctttgatcataatgaagtatatttttggttctgtgccttttattccaattgctatatttctcagaacaagaaaaaaatgaagatgcttatatagtgtaccaattattacattctgtcatgaaaacgcagtgcatctgtgaatgttcttctcccatatatcttaatggcattctcctgctcctttaggtgtctgctccgggcctttgctgaccctccttataaaatagcaaattttcacctcacctccactctgtcctcttttatgtgctttatttttcccatacacttgtctacaaatgaatattatatatttacctttttggttattatttgcccacacataaacaccagcgtataaagtaggaactctgctttatgcctagaacagtgtccagcacacagcaggtactcaataaatatttgttgaataaatgtatcaatgcagatgccactgattcccatcagtaaaattctggtgccagaggagacagacacaataaagccactctgggaatgctagccttcaatattaatcttgacctgggatgagattacaaaacttgactattttgcttttcctgagaacagactgcctaatgcatgatttaatcctgaaaagtaaagaaatcacttcctctcctggcaagcaccttaaccaagttctaagctggctgcagataaagcccgtctgttctctactggtttaaagatagtggcagttcctgcctacttttagcaagctttattttgctttctgttttctttcaccacttaaggaaaatttacatatcttctctacccattttatcgttttgatcttggcaagagctttcaattaatactgtgtgagcagttgtgcaaagaaagcacccatttacgatgtttatgggaaataaattcttattatttcataatgacaaacacctaaagcttccatttatttgtattataattatgagaggtccagagatgataaatgacttgctgaaggccatgtagctaacttttacaatacaggtgattcctagttttccgtgaataagttcatttatgtttctcttaccacctacacattaagctaaagcccgccaatttttacttcactagtgtgaatctgtctgtgaaatagccatcttacttcctcaaccttcaactatcaaactgttagagtggatttttgtgtgccatccaacatctctctccacacttagtatgaatgaaaataatgtgatctttcagccaagctgacattccaaggtcagcttttagacggggtctcactatgtcacccaggctggagtgcagtggtgcgatcacaactcactgcagcctcgatctccctgggttcaagtgatcttcccacttcagcctcccaagtagctaggagtacaggtgcatgccaccatgcccggaaaaaattttttttttgtattttttttagagatggggtttcaccatgttgcccaggctggtcttgagctcctggctcaagtgatccactcacctcggccttccaaaatgctaggattacaggagtgaaccaccgcgcctggccccaaggtcaactttatggtcaatgaaaacgcctggcccagaaagtctgacctaatgtatcctccactttaaagagagcttgcttctccctgttccttattgggaacattgtgtattcaccatacacactatacagactgtcagattggcagtacacgctgtttcccgtaatgtggtggacacaatactcatcagtaaaggtacctgctggcaccttctggacttagggaatgataactggggctatcattggactggcagtgcctcctagtggccacagctctaaagatctccctccaactgaaaagcagccagggcagcaaaagcccaccaggcaacccctgccttaccctctcctttcttctcagtcttgtcctcatatcatgcagtgagaagtcggtgctgatcaggctatcatcatataccagtcttttcagtatttaactgacagaattcccaaaaatgacgtggcaatgaaaaaaattgggaggagggaggaaaggtagggaatacaaatagaaaaaataatcaagaataaccttagagtaggtcattgtgaaaagtgctttgtaataatgtggtcattgttgttccttcccatcagccctgtgggagctctgacaccccattaagctttatcaagaataatttcagatatgttacaaagatacgcagagaggcccagctggtttctccacaagcttgtattctgaaaagaatacacatgatcccaaagatcgtattttaaagtgtatatgcttcattaaaatgaaagatgataaatcatgtctacaagcataaccttgagattactgtccttaggcccatgctggtgtggggtatgcaaatgtagattttgatctgggaaagaacacctctggcaactgtagaagaatcgggaaggctccacttctctatgaaaaagaccctgtaatggataaggccatgccacaagatgaagtggaaagtttgttcctgctccctctgaactcttctgtatgctcccgtggtctccagggcattctctgtcctcatgcagtgtcttgtctcctctagggaccccttccaacagtaccttcttttccagacaatgcccacattccagtcctttctctttcctatttctaccttttcttcatcaaaatacatttatcccatccattccttcagggtcttgatgtatgttctgataaagtagtttatggtaagatttaaaaagcaggtcaccacccattgttctgttccttccttagacatttgcattttaactgtggactcctgacatccttaactacctgggcttggaagccaaaagtcttatctcccaaatacacaccacccacctccattgccccccagtggtcaatcccaaagatgacactgttgagacagaatgccctttgcttccctgagttctgtttgaacgtccccacaaatgacacccttggattgtcactgcattgaccaatgactccacgtaccagagtccaagggctttggtctggggtctacaggcaccgcattctgacatggattccttcaacccacaaacagagaggggtaacccaagaaatacacaagccctctgggacagagcagtaggctttctctccagtgattgttgcttgccaacaaaggttttggatatctgtggaatattccaaaaggagagaatctggcaattcttcagaagattctgggcaattaaaattcatcgagttcagatttttaagagttagagggagaagtgaaaggtaaacggtggcaacaattagggaacattatgctgcaagcctgacatttatgatgccgttgacttggtcttgtccagcaggtttcttgggtttctcagaaatttctagaatatgcacctcgcatattctgggagtcaagaactcccaggaacagcccaagtcctcctcctctcacccccaccgtcagccctttttcccctcctcccaaacctcccacccactgtccgcgtcagcgccttcgcggccagaaccgctttacccgtctccagggtagcacccttgggcagcccagccaacgctgtcgcgtggagcggcgcccgcatccccatgcgcgcaggcggctccggggccgcgccgcgctgattcgctgccggccgcgcagactgcggcgccagcgacgctcccgcccctcaccgcgcgccgcctggtgcagcctcagtctctccgcagccgcgcggccactgcgagcccagccgcagcagccgggcaccaacgcttgagtgcacgctcggcgcccccgaggagagccacggcgagcccccaaagcccgcacgatgcaggccactgccgattccaccaagatggactgtgtgtggagcaactggaaaagtcagggtattctctttatttcagtagtgcatgcctgaggcgcacgggaaacccgggacctggactcgtccattgtgcatcatttcacctgtgggacctgtgcatgctttataccccagagctttgtgttggggggtagtaaacctcttatttcaagaatcaaaatggatggtgcttggttgttgtttttttctttttttttttaaccccacccccacccctttgttttcttgttgtaatgctggtattttaaataatgcatcaatcgcctcctccgggagttcttttgggatctgtgcatcattcagtacttgtttaatgttttctcatccccggagttaaagtgctttcttattgttccatgcatcccagtgcatttatttctgcccaaaggttgaaatctcctggcagaaccattaactgagagggctggagtgcatccttttaagagggacacacccatttcagggttgttatttgtggtcacacaaaggagagtggagatgcagactagctctcgaaatcctgaaaatatgatggcgtagccacatattaggatggttcactttgaaatatttggggtttttttctgtcattggagtaacctgtgactactatttattaataataggtatctgtgaaataaatggagggaaagaacgaaacagtgcccgtggcccttggtataacagatttattttggaatagtccatattagcactgggtgtggctaccctccagcctcgcttggattgcttttcagccatttttattcagcctcacacttcacacatccatctctcctttgttacattaaaattcaccttgcagttacagagtatgaggagaaagataatttgcaagaatgaattgtgtgtagtaacttgggtgtttgtcggaggtagtgtcttttcatatttaacaaagatggt

SEQ ID NO: 6398 - DNA, 6000 bp, Homo sapiens
ctaggttatggcacagtaacaaatagtgctggattgtcagtatcttgacacaacaaaggtttatttcctgcttatataatgtctactgaggtctaggtaacacttttgggcaggtgttctccttgtatttcttggcattccctagtcactgaggcaggggaagaggaagatgagaaaataagtcctggttcttagatgctcacttggaagtaacaccctttccctccattcctatttcattgaccagcattagttgcatagccacactgatttcaaggagcaggaaaaggcaactggatattggtgaaccttagtagtgaccactatctagagccttcactgtaaatgaaagttgaaggggaggaaaaggctcatgtatttactttcaaacacttacatagtgcttattacctgtcagatattgtctgcattgctttcaagtaggaactaacttaatctccatatcagcactattaaataggtaattattatccccattttatagaaagggatgttgtgcttaaataacctgccctgggtcatatagctagtaagtgggagaggcaagattaaattctaggtagtctgggtccacagtccaagcactaggtctctctagtctgctttctctcaacttcgatcctgagttggggggagcagaaaggaggaaaggtagaagatatgggtgtaaatgtgagatttggtgcatgcaaagaaatttagtgatgtttgtatgcttcactgctagagctgggatagggctttgtggaaaggcacgcagtgaagtttagggagttaaaaatggaatggagtgatgctgctgctagtgaggccaaccttggaggccatgatagggaatcacttttgcccctttccttttttccttcttcccatccctccatcagagccacccatttagcatctacatacaggttgtaacttggagctgtactgaggtttgctcagaaacagaaagcaggaaacaggataaaaatttcccgagaaagtagtgcttggatcatttgcacaaaagggatcaaagagtaagtccaactgtacctatttgtaatgcatttttgaaaatttacatataattacagctactgtcaagtaaactatattagaaaatcttcagaggaggggtatttgataaaagagtccttcagtgaatcagtagtaattccaaatcatcacttcctacatcagttttctaagccttctcgtttatattggtttcggttagactagaacacacctgcagttcactcagccagcttccattctgctgtgatttaggagtcagtgaacacttctggggattggaattcttggttatcacagacaaggtctaattaccatacctggagggacagaagaaaagaacaaatgattctgttttaaaatggacttttgacaatataacaaaacgaagctttgtctttgtgtgacattgaagctttctaattcctatctctctcatctgttaaatcttgaggtttgttccccacatacggagtctgtaacacacttttaaaatgctgtattagcaccttgttgcaactggccagcatattccttagggccagtcaatctatatgatgctgctactctattttccttgactctattttgattgggaacagttgcaagttgttgccaagggtttctcttctttcatgggctgcaaaatcatcgatggcaatagagatccttgatgttgctggttgttaccacactagcctaagattaggttattttctattatttacaaggagctctggctacagggtcaggagacctgattttagtctcagtgcagactgttctaaagcactgtgtcatctgggacaggatatttcatctctctgggtcttggtttcttcctttataaaatgaaaatttaaactagaagattaagaaaagtgtgtaaccttttgacactacacagctacattttttatgatcattaaaataatccaaacgttataatgctatggagttattagaaacaaagaagaaaggataaatgtcatttaattgaatctgcagatgggaataagaaagttctaccagtaattttgtgattgtgtcttaatggagtccaaaagaatttcctctttgggaaatgtgagttaatacacccacagaggaatgattaggaacaagaatatatatactagatgggaaatgctgagaacctgagattttaaatcaatacccataggcgagatgtgggcagctgacgatgtgcaaaagaacatatagatttgaaatattctctgttaatgatgatggaattattatagcatgctagaagtctagaatagcaatcaatgaattatacatgtttaaaaaataagtctgtctattcaccaacccagccaatgaatgactgattagtttaggatcatttgaacacaggtcacaaaagaatcgctagagtgggaaattcaattatgtgtttaaggctgctgtggtgatggtggtttcagttcttcccaccaactgcagggagggagttgtaacctggccgtatctcttgagtgctgctgtggcaagctcactacggatccaatctgcacctgagtctcttgttatttaactaaacacacctgatgtatttaaaagacattttaactgtaaggggataagctccatggccagcagcacttcctgtggaaagctagaatagcctagtgttattccaccgagtctcttgatttttttttttttttttttgcataaagatttttagcggaataaaattgcctcgtgtcaaccttctgggtttgctcagctgcctggtctctgaaaatttcagagagggaaaaaatgaccccaaggtaaaggctggatcctggttttgcatttagctgcttcaagcagtaggcttacccagttggggagaggagagaaagggagagagaggtggggggagagagagaggtgggaagagagagaaaggggagagagaaggggagagagagagggaggggaggggaggggaggggaggggaggggaggcaaggagggagagagagagagacagagacagacagagagagagagatcctgtcttgaggtcagtgattagtaatctagggggttccaaaaggggacaggtgctgagatgtgtacttccacccctgcctggggattctccctgcttctggtaatctgaccttgataatttctaacgcaattacctctcctctagcacattctgaccccagcaaaaggggacgcacccatccaactatcttttcgccttcaacactgaagacttcgctctaccaccaaccgctgacgccgcggcagtgcacttttggtcccccactctttgaccctgtttgcacaatcgtcctttctcgacaggcccaggtgcagcccccagagaaaagaggaagccttacatgtatcatatttacctggagggcttgtttaaacagatgagtcaacccaatcctcagagttcctggttccctaactctggggtagaatccactaatttgcattataaacaagttcttaggtggtgcagatgcggatgctgcccgtccaggccactttgagaaccactgccttagatcaaggaaggtgcctcagtgcgggctcctctttcctttccatctctctccacccctttcgcatttatgccattttcctttctctgtgacacattcaggcttttggactgtttgtaacggtgccgctgctgtccgttctcaacgcctggaaattggggggtttgttagaggtgattcgtgccctgctccaccctggcgcatcttcgcccccacagcctttaccgtttttccatcgctaacactgccctcctcactccccctctctcgggtgtgaattattcaccctcttcccctactcttcacatcaagtgcaacctttcccgcaactttgcagcggtggcgggctcgcggatcgcctcctgcgctcagcggtcctgggggaaactcccctgggcggccgcacgctcccccagacgccaagcccggcccgggtcgcaggggccattccgggcgccggctgtgcgctcggacttcagggctcgcgctcccgctccggggtggggtaagggcggtgcggaaagcgccagtgttcaggaaggtttcaggcgccggagcccggaggggggcggtagcagcgtcaggtggctgctctgcgtccccgcgcgccgcccagccagtccctgccctgctctcagcctcggctggggctggagctggagcctgcccgcacctccgccccgggagccgcgtccgcgccagcagcccggattcgggacccgagcgggagacgccgagatgtgagcctccgactggccactgctctctctggcaccctcttctcccattccaccggcccgattggacagcgatcgcttgcctcgatctccggggagaggagcaaccaccaggcgcacagcccagaagttgggctacgctgttcagcccggagctcgctgcgcgagggggtggacgaggagaccgggagacgaaggcgcggggaaggggtctcggtctgagctgagggggattgggagggtgggggcttgagttcccgcttgcgctccccagcagggggagagatgcagagcccgcgcccaggcgccggccgccgcggtagcagcctcagcagcagcctcagcatcagcaccggcgggacagcgacagcgggggcggcgcaggcgcactgtgccccgcggagcctgcagttcccgagccccgtgtgcggcaccgccacagtctgggcagcggcggccgggggagcgctactaccatgaactgcctggtcctcctccccagagctgctcatccgggtcgggctggagacacagtcaggggaccccgtcgccgccgccgcgccccctcttctttcggctcaatcttctcttccaccttttcctcctcttcctccaccttctttgcctgcatccccccctcccccgccgcggatcctggccgctgctctccagacccaggatgccggggggcaagagagggctggtggcaccgcagaacacatttttggagaacatcgtcaggcgctccagtggtaaggagagttgtagttcagaacacccccacctccatcccgcccacacgcgccccccatcctccccatcccatccctctcccaaggggggaggaggatgcaggcagccttacctggtggtttcatttaccagttgggctggatttggggtggggtggggtggcaatgagatggtgggggaaagttagttgcatccccttcctaccagacagactcaccccctcccacctgtccagagcccagaactggaggaaagaaaggggttggatagggtgtaggtacatctggaacatagagttgagttttgcttttatctttcttgttcttccttctcccacatttttccccaaagtgagcagcagggactgaccaaattctgagttaatctcagtggaaaggtttccctcaagttgggaatggctgcgaaagtggctacttaacaagatttaaatctctggaaaggcttttggccctcgtggtcacggggaaaggtgctttgtgccggggagagtagttgaggttgaacctaagaaagagttcagtgcttgcaaaatgggaagccaattactgtggacaaattggtgcttcaagtttcttcttgctatgtttttcactgtacattcatctatatatttcgtttgacttaaacatgagaaacgtagaagtgaagcagtaactattgtgcttttaatgcaactagaaaaaaatcaaaaagatgccatcctaccttgctactggcgttaaagttttcttgccttagtgtgtctttaaaataccatccatttatacattcatttcctacaagatattttggatgggaatggttatatatttccacattttaagaccttataaactttgcatcttactgaaatctgcgttttctacttgtttttaattcttttgtataattttaaacttcataag

SEQ ID NO: 6399 - DNA, 6000 bp, Homo sapiens
gccaggtggctcacacctaaaatcccagtactttgggaggccaaggtgggtggatcatgaggtcaggagttcaagaccagcctggccaacatggtgaaaccccgtctctgctaaaaatacaaaaattagccaggcgtggtggcacatgcctgtaatcccagctactcgggaggctgaggcaggagaattgcttgaacccaggaggtagaggttgcagtgagccgagatcacgccactgcactccagcctgggcgaaagagcaagactccatctcaaataaaaataaaaataaaaataaagtcaagtacagagaaggatataagaaaatcaacatgttaattatgaagcatggatatgatacagttctcatatcacacgatatctttatttggctttgcaggaaagacactgaatcatacccaggtagtatatccctacttggcagcaatattttttcttcaaaaaaatgtttattcacattctgagagaatgcagaaaataaacaaaaatttaaaaaattaaaattgtatgctttgtgataaaaatacttgccatagaatgtttatatttgaatcttttaatatagttaaatttttttgttttctttttacttttttctttttcttagaggcagggtctcaccacattgcccaggctggtcttgacctcctggcctcaagcaatcctcctgccttggcctcccaaaattttgggattacaggcatgacccactgtgcctggcctatagttaaatttctattaaattttaagatattctattaggaaaatttcagagggaatgtgggtagaaaccaccaaaactactattctttataccatggctctttggtatgtaggtaagaccttgtccctctcattaacaatgatttattgcaccagtgtcagctccttcaagttttgtcagcttgtattatttttcctgtttagtgcagttataggtcaaatttccatttctccatcacctttgttcccattactgttaaaggggatattgcattctgacaaaatataccagcgctaaaggactcataatgcagccatgggatctaatgatcacctctactttgttttacatactttcctcttcctctgccatctctgggataaacagaccctagaccaggaaattcctcagatgaatctgaataattcccttgtaatcaaattattttgacagaaaagcacatacacaatccctcagcctgatgctgttctccccttctctctataaaccaagatgctccttgtcttcaaatgccaacgaatcatctgtttcacagaaccattcatagagaatccaatgccacctctctgcttactccacagagtgattactttatgtctcatttttccagagctgtttagtatacctggctttacaccttctttgaatatatttgtatctttttctcatgttttctctccttcactacattgctaatgcttcaatattagatacaagggttggccaggctcggtggctcatgcctgtaatcccagcactttgggaggccaaggcaggcggatcacgaggtcaagagattgagaccatcctggctaacacagtgaaaccctgtctgtactaaaaatacaaaaaattagctgggtgtggtggcaggcatctgtagtcccagctactcaggaggctgaggcaggagaatcgcttgaacccaggaggcagaggttgcagtgagctgagatcacaccaccatgctccagcctggtgacagagcaaggctccgtctcaaaaaagaaaaaaaaaaaaagaaattagacacaagtttgttctaaccaggaacagactaatatttgcctgcagtcctatgaattcaaatgaaacattttaattttttcctagttccaaaatttcattcaaatctatcccccgcttccaatcccccagaaccaaggtcctagttcaggctgtcattgtttctcacctgatgactgcaataatcttctaattatttacctagccttcactctctgacctctgacaatcgtctttgatttctttcccagttatctttctaaaacacagttctgatggtgtcactccctagcctaaaagccttccatggctcccactgcctacaaaattaaatccctttggtattcaaggatttacaacctaatcctatcctccctttgtaatcccatttccaatcacccttgctactctatgctatatgctattgttttttggttttttttttcattttttaatttttactgtttgagacaaggtcttactctgctgctcaggctggagtgcagtggtacaatcgtagcaccccgtaacctctaactcctgggctcaagcaatcctcccacctcagccttaaaagtagctagggctacaggcatgtgccatcacactcagctaatttttttatttttctttatttttagtctgagtctagctctattgcccaggctggagtgcagaggcacaatgttggctcactgcaactgccacctcccaggttcaagccattctcctgcctcagcctcccgtgtagctgggattacaggcacctgccaccatgcctggctaatttttgtattttcagtagagatggggtttcaccatgttggccaggctggtctcaaactcctgacctcaagtgatccaccagccttggcctcccaaagtgctgggattacaggcatgagccactgcaccagccccccacctaattttttagaaaatatttttgtagagtcagggtcttgccatgttgcctaggctggtgtcaaactactgacctcaagtgatcctcccacctcagcttcccaaagtgctgggatcaaaggagtgagccactgcacctggtctctatggactattgtttaccaaatacatttttgcatatccctatcttccttcactttctcttcctaaaatgggcttcttcacctattcatattttgctctgtaaaacaatccagctctacaggatcacctcctaacacctttcttcctgttcctagtcaaacttgtcctcctttctgaggcatgctgtttatgtctgttttacacttgccatcttctctatactctagaagtagtcctgtctttctttatctcccctaaactgtgaacaacttgagagcatgggtgatgatttattcctctttctatggccacagcctagcaagtggagtgggaggaggagagtacctgtccctgcgaaatgaaattttttttttttttttttttttaagatagggtcttactctgttacccaggctggaattgcaatggcacaatcagggctcaccgcagccttgacctcccgggcttaaataatcctcccgcctcagtcccccagttatctgggactacaggtgtgggccaccatgcccggttaattttctttttttttttttgagacagagtttcactcttgttgcccaggctggagtgcaatggcgcgatctcggctcaccgcaacctctgcctccctggttcaagcaattctcctgcctcagcctccgagtagctgggattacaggcatgcaccaccccgcccggctaattttgtatttttagtggagacggggtttctccatgtgggtcaggccggtcttgaactcccgacctcaggtgatccgcccgccttggcctcccaaagtgttggggttacaggcgtgagccactgtgcccagccctgcccggctaattttgttcattttttgtagaggtgggatctccctatgttgcccaggctgttgtcaaactcctggactcaagccatcctccctcctcgacctcccaaagtgctgagattataggcatgaactaccacgcctgaaggaaagtatttctactgttttaagggcatgggacaatttcaagcctgtttcttggaagtagttcacattctttaattacagacattcacctgatcatggcgggtgtggtggctcacgcctgtaaacacagcactttgagaggccaaggcaggagaatcacttcagcccaggagttggagaccagcctgggcaatatagcgagaccctgtctcatctctctctctctaggtatatataaaagacattcacctgacctgaggagttcagagaccttataaactgctctagctagaagtcaagttggtaacttgtgagacacggaagttaagcgtctaaattaacgttaccaaactcaaaaatctatacactgcattcattctctacatttattctgtgcaagccctctaggtattagaatctaggaaaaggaaattttacacttaagaacacctgtgctcccttaacatataccaaaatatttgataaatgacacagtattttgaatttgtaggtggctggcttttcttttgcagaccacacctgttaatatcacctggccctgtcttgggatctacatgtagtcttgtcaccactggtcaattggcacatggttttccgaacatcagtcgcctgggacagctctgtaattacttgttaattacttgagtcgaatgattccgaactcatggtagttgcttcgccttcattgatcattcaccatttggttctgtgccagcaggatgcccggctgcttggtcacaggcattgcgcaagctggcaccgggatcgtggcctctttaagtcaacttctggctgagggaatccggcgacactagcccgcggagaagaagggctgaaggtggagcagggggacacgccgcgtcccaccagacgtacgccgcgacgcctgctggtggatattacccgggacctcaaagcggccgcccgccgatcctcagcgccaagccacggccggatgcgctcagggcggacccgcgcggcccggcccctcagggagcccgggtgggggcggggctgggcggggcggggcgcggcgcgcgcggggcgggggcgcgcggcctgtggcgccgtcacccggcagactccggagggtagagcgctgtgccggttccgctgccgctggccaggagcgcggggacagttcggggctgcgccggaggccggcccgccttcccgggggttccgttatcatgtcgctgaggcagcgcctggcccagctggttggccgtctgcaggacccgcagaaagtggcccgtttccagcggctgtgcggggtggaagcgccgccgcgccgctcagcagaccggagggaggatgagaaagcggaggcgcctctcgccggagaccctcgactgcgagggcggcagccaggggcgcctggaggcccccagcctcccgggagcgaccgcaatcagtgcccggccaagccggacggcggcggcgcccccaacggcgtgcggaacgggctggcggccgagctgggcccggcctcgccgcggcgcgcgggcgctctgcgccgcaactcgctgacgggcgaggagggccagctggcccgcgtgagcaactggccgctctactgcctgttctgcttcggcacggagctgggcaacgaactcttctacatcctgttcttccccttctggatctggaacctggaccctctggtgggccggaggctcgtggtcatctgggtgctggtcatgtacctgggccagtgcaccaaggacatcatccgctggccgaggcccgcctcgccgcccgtggtcaagttggaggtcttctacaactctgagtacagcatgccctccacccatgccatgtccggcaccgccatccccatttctatggtcctcctcacctatggccgctggcaggtagggttccttctcgtcctgttcagcctgggggagttcaaagaactcggagttctctttgctctctgcatttattttaattcgaccgttcccctccaaagcctctctttccacaggttttcacaatactcgcaaacaggccctttctgggttttgaaaaattaagtgattgggggaaactggatacttagccgttgaattctattttaatattaaattccaatttaatgccttagaacccaaaggacacacttttcctagagta

SEQ ID NO: 6400 - DNA, 6000 bp, Homo sapiens
gcggaggttgcagtgagctgagatcgcatcactgcactccagcctgggcgacagagtgagactccgcctccaaaaaaaaaaaaaaaacttggaattaattacagcaatgaagagagggtatatgaaacactttgctatgatttgaatgtgtccctcaaggttcatatgttggaaacttaagcctcaatacaacagtatagagaggcagggcctttaagaggtaaattaggtcacaagggcagccctcatgaatggtttaatgccattatctctggaacgggttcattatcttgggagtggttccttattaaaggatgacttgtgtccccttccctctcttgcccatgtcatgccttccatcttgttattacacagcaagaaggccttcatcagatgccagccccttgatcttggacttctcagcttccataatcataagccagtttctgtatgctcattatagttacccagtttgtcgtattctgttacagtaccacaaaatggaccaagacacctcgtaccttggttttaccatttcttttctgtgtcgccttttccttttgttgttttcgaagctggctttacttctcatatgagtttactaacagtataacttcaaggagtccagaaataagcatttcttttttttttttactactccaggcatctctgaccaatgtgaatagcaggatctcagctatatgacattgtccaaggctctgtagaatgggccttatggacttacttgaagaagatggatatacatgggtgtcaggcaggcactaatattaaattatataaataggggaatataaagaccaaatgtatgcattatatatcaaacaaagcattctgatgagaggtggtctagcgaggagatctaaaatggtaattacattttctctggctaaggactggagaatgaagagataaggacaaacactggccctgtgaagtacatggagaacatgtgatccctagttgtttttatgtcatattccttatccctggcagatggcagacttcattcttaacactgtgcttcatacctttctctttaccttccagtgactgtcatgtggcatgggtctctgcccaagctcgtaatgagactatagcaaggcggctgtgggacgtcagttgtgacctgctgggcctcccaatagactaacaggcagtgccagttggacccaagagaagactgcagcagactacacagtacttcttgtcaaaatgattctccttcaaggttttcaaaacctttagcacaaagagagcaaaaccttccagccttgcctgcttggtgtccagttaaaactcagtgtactgccagattcgtctaaatgtctgtcatgtccagatttactttgcttctgttactgccagagttactagagatatcataataggataagaagaccctcatatgacctgcacagctcattttccttctgaaagaaactactacctaggagaatctaagctatagcagggatgatttatgcaaatttgaactagcttctttgttcacaattcagttcctcccaaccaaccagtcttcacttcaagagggccacactgcaacctcagcttaacatgaataacaaagactggctcaggagcagggcttgcccaggcatggtggatcaccggaggtcagtagttcaagaccagcctggccaacatggtgaaaccccacctctactaaaaattgtgtatatctttgtgtgtcttcctgtttatgtgtgccaagggagtattttcacaaagttcaaaacagccacaataatcagagatggagcaaaccagtgccatccagtctttatgcaaatgaaatgctgcaaagggaagcagattctgtatatgttggtaactacccaccaagagcacatgggtagcagggaagaagtaaaaaaagagaaggagaatactggaagataatgcacaaaatgaagggactagttaaggattaactagccctttaaggattaactagttaaggattaatagcaaaagatattaaatatgctaacatagctatggaggaattgagggcaagcacccaggactgatgaggtcttaacaaaaaccagtgtggcaaaaaaaaaaaaaaaaaaaaaaaaaaaaatcctaaaaacaaacaaacaaaaaaaacaattcttcattcagaaaaattatcttagggactgatattggtaattatggtcaatttaataatattttggggcatttccttacattgtcttgacaagattaaaatgtctgtgccaaaattttgtattttatttggagacttcttatcaaaagtaatgctgccaaaggaagtctaaggaattagtagtgttcccatcacttgtttggagtgtgctattctaaaagattttgatttcctggaatgacaattatattttaactttggtgggggaaagagttataggaccacagtcttcacttctgatacttgtaaattaatcttttattgcacttgttttgaccattaagctatatgtttagaaatggtcattttacggaaaaattagaaaaattctgataatagtgcagaataaatgaattaatgttttacttaatttatattgaactgtcaatgacaaataaaaattctttttgattattttttgttttcatttaccagaataaaaactaagaattaaaagtttgattacagtcaaaagaagaaaacactgttcattattatggttgtgcaatgatttctcattctaaagaataatttgttccagagtctagctacagtgtaatctcaatccacatgctattaatttaggttgtgtgataatctaattgttcattcaccatttcctacttaaccttttttgacactcttcacagacactttttccacatttcttgatcatcccgggccatttttttttcctttctttttaattagagacagcgtcttgctttgttgcccaggctggcctcaaactctgggctcaagcgatcctcccaccttggcctcccaaagtgctggggtacaggtgtgagccgcagcacccggccccaggctattgatcctttttttgcacctgccccttatttctgtactgtgacaagtcccagcattgtgctgtgggacttacacagtatactgactatcctcagacttggtcatgtctatgctcagtgcatattaagagcttaaccaaagtgtgttgaatcaacagccaatgaacttgatctaataaaaatgagggcccaggagatacaaattagcaaagcattttctcctgagcagtcatacatcttttaatatttgtaggcagtttaaaattgaactcccaagcaaacatttgagaacagacaccttgagcaaaccgtgaaatcggtgaaaataataatttattttaattttttgagatagggtcttctctgtcacccaggctggagtgtggtggcacgatctcagctcactgcaaccactgcctcccgggttcaggcgattctcctgcctcagcctcccgagtagctggggttacaggcgcccaccaccacgcttggctaatttttgtgtttttagcagagacgggggtttcaccatgttggccaggctggtcttgaactcttgacctgaagtgatccgcccgcctcggcctcccaaagtgctgggatgacgcgtgagccaccatgcccgacgtgaagacaggaatttatacccatggagtgcaagaagggaccttgtaatttttaacacgtgacacttagtggcagatgagacctaatgaagccaggcccaccttccacaccagattataaattcccctggagcagagattaaatgttttattcaccaacatgcccagatccctcgcaatgcctacgcttgacaaacacctgttgtcaacaagtgcacgaggcagcctaggaggagaattagtctccacgaggagaattactcgggcctagcagctagagtatttcgaggtcatcctaactgggttccacttttgaatttttggtttttgggttttttgtttttttggagacaagatctcgctccacttgggagcaaggtctcccaaagctggagtgcagtggtgggacctcagcctccgggggtagctggggccaaaagtgcgcgccaccatgcccggttcttattttgggtttctggtagagctctcgctattgtgcccaggctggtctcgaactactgggttcaagcaatcctcccacctcggcctcccaaagtactgggattacaggcgcgagccactcgcccggccgggttccacttctgaaagcttggggagccgctgggccttccaagaaaagtgctccacctcccgacggcaggcagagcccctggcccggctatctttccagggccgaaagctaacagtcaagacgcgaaacgaggaattcgggtcagggtggcaaagcaaagcgcgatgacagtgaggacgacgtctagacgcaaacatacatcaaatcgggccgaagcccgctgtcgccgcgcgggctgaacctggcacccggagcaacgcgcgaccccgggacgagacgctctcgtccgagccaaactacatcccccggcgtgcactgcagcgcccgcccctcgccggccggcggggcccgggaggaaggcggccgcgctgccagtcccgcaggtcccctaggcccctttcgctgcggcctttccccaacccggacccggcacttctcgggttccgcgactgccgatcgccccggcgcggcaccgctccctcaggagtcgcctaggccgcgcagtctcccgacttctcgtcaggctttcgcgccggcgctccagcaatcactggctggagaaggtgggcgttccggctcgagaggaccctgccgcggctccggaagagcctcgtcctgggcggcggtggtgcggcggtcgccgttatggccactgggctgggcggctgaccgccgggctaggaaagggcccagggccccgaatctcggtggccgctgctccagcgcggcctgcgccatggcctcctccgccgcctcctcggagcatttcgagaagctgcacgagatcttccgcggcctccatgaagacctacaaggggtgcccgagcggctgctggggacggcggggaccggtgaggcgggggtgggccacgccgtggggagcgcagccctgcgcgctttggaaggaagattctcccaccttcctcccagacccgggcccgcgtctcctccctccgcgtcctcagacacgccccctagggctggcttgtcccagccccaggtctccctgctgccactgagagtaaattggacctcgggattcagttccctgggatccttctatggccttccacattttctcatcttttttcactgtggcaaatagagcagaggggcttttgcatctgcggtcctgtaatgtagagtgggtttctttcatagctgtttttgtttgttttatgcatttaaaagcactagtctcaagacaggtctagttttcaccagactgacagaggatccgtagcacagaaaaagggttaaaaacccaaaggagtcataatttgggggtgttggtaaataccagttattggagggtagagagctggcctttaaaacctgattgtggcatttagatgtggtcttgttttgaacgtttttacagctgagactgtttactaccccttaatttcatgattcaggttgctacaagttctgtctggaggagctagagttttccggccctaaatccataggaaaagctgctatagttcttggcctccggatatatagaatttgatggcaaggacaaaactttgttttattgcttttatttaagagtcagagcttgggtgtttgctcaacgaattactcaaggtcataggaattgaatgactggtgagaatgaaattcatgtatttaatatatatttattgtgaggctgctgtgtgctaggtgctggtgaattgtgaggcaccgttctaggtgctggtgaatattgcaaattacagtgaaaaa

SEQ ID NO: 6401 - DNA, 6000 bp, Homo sapiens
tgccaccacacctcgctaattttttattctgtgtagagactaggtcttattatgttgcccaggctggtctggaactcctggactcaagcaatcctcctgcctcagcctcccaaagtgctgggattacaggcatgagccaccatgtccagcctctacagccacatttataccataagtcactaccatattttttaatggctacattcttttaaatgggccataaccaatcacctactaatagatatttaggttatttccaatagttcactattacaaagcaatgctgcagtgaaaatctctttacgtagatcctcaagcaattatctctataggataattttctacaagtagaattctactgtcaagagcaatggctgactgaaggctttttatgccacttcagaatctgggaaaatagctgacttttgccagagatgaaattaaaatgtcccttaagtaaaatttacacagccaccactacccccccatgattgtttggatgttgtgtttgttgtgttgcttgctacatccagcctgtgaaagaacaagtctaggccagtttggaaaaaatatgcaatcacaggatcttttccagtcaaagctttcaggtctcaaaaagcaggctaactcgggagacaggatgaggcaaaagaaggagcaggtcagaagagcagctggggcccggaaccaggctgggcatgaataccaattgtaccactcactagccatgcaaattgggcagattatttaaccactctaagccttttcctaacctataaaataaggatagcaatagcatcttatctcataaggctattgtgaagactaaataaaaacgtgggcatttagtgctatacatttccctcttaacactgccttagctgtatcccagagattctggtatgctgtatctttgttctcattagtttcaaataacttattgatttctcccttaatttatttgcccaaaagtcattcacgaggaggctgtttaatttccatgtaaatgtatggttttgagcaattttctttgtactcaattctatttttattgctttgttgtccaagggtgtgattggtataattttatttttgttttttgcattggctatgaattgctttatgtccaattctttggttgattttagtgaatgtgccatgtggcaatgagaagaatgtatattctgttgttttggggtggagagttctatagatgtctactaggtccattcagtcaagtgttgagttcaggtcctgagtatctttgctttgatgattcgtcttgccttgatgatctgtctaatactgtcagtggggtgttgaagtctccctctgttattgtgtgggagtctaagtctcttcatgggtctctcagaacttgctttatgcattcaccccctctggaggatgcagcaacaaggcattatctgcagagagcagccctcatcagatactgaatctgccagcaccttgatcttagactttccagcctccagaattataaaaaataaatttcaattatttattttttaaaaagaacttgctttatgaatctgggtactcctgcggttggtgcatctatatttaggacagttaggcctttttgttgatttgaacccttcaccatgatgtaatgcccttctttgtcttttttcatctttgttggcttatagtctgcttcgtctaaaattaggattgcaacccctgcttttttctgatttccatttgcttggtagatttttctccatccctttattttaagcctatgggtgtcattgcatgttaaatgggtctcttgaagacagcatgctgttcggccttgcttctttatccagcttgccactctgtgccttttatttggggcatttagcccatttacattcaaggtaaagggaacacttatacactgctggtgggagggtaaattagttaaaccattgtggaaaatagtgtggcaatttttcaaagaactaaaaacagaactaccattcaactcagcaatctcattactgggtatatacccaaaggaatataagtcattctaccataaagacacatgcacacgtgtgttcattgcagcactattcacaatagcaaagacatagaatcaacctaaatgcccatcaacagtaggctggataaagaaaatgtggtacatatacatcatggaatctatacagccgtaaaaaagaatgagatcatgttctctgcaggaacacagatggagctggaggccaatattcttagcaaactaatgcaggaacagaaaaccaaatactgcatgttcccactgataagtgggagttaaataatgagaactaatgggcacgaagaagggaacaacagacactggggcctacttgagggaggagggtggaagaagggagagaatcaggaaaaataactatcagaactatcaggtactatgtttagtacctgggtgacaaagtggtccgtgcaccaaacccccataacacaagtttgtctgtaacaacaaacctgtacatgtacccctaaatctaaaataaaagttaaaaagaaatgtaatttaaatcacagcatccatcacacagcatgtgctcaacaactctcaggtatcattaacataacacaaaaagatcttcctgtttccaaaattgtattaaattagagtagattctgaggggatatggggaaaagaatggagggtgtcaggttcctggaagagatttttccattctctgcaaagtcacattgctaggaacagagggaatgggaaggagtgggaggaggggcagccagggcaagaaactgttttctcaaagggaaaaactcacagtaggaggtggaaggattttgggttcctgagaagaggtgaggaggaagagttgatagagactacgtggtttagaatccaggttacaaatgtgttcataggaactcttcttctctttggatgtgcacaatagacacatgcccagaccctgatctttaacagatattggtcaattcctcctcaccctttggcatcaggcaaatgtgtaaaaacctaacgtctccctttgacttcaaggcctcatgtacggttgcacaagacatctgtagagtggcgtccctagcattgtgtagtgcccaacctgaacaggtgtacctggcagccctgcatggcctccaccctcacgtgcttccatattgcattgtgtaccatctggccatctgtggtcttgtacagaccatcaggtccctgagaacaggaacatgaattatatagttttttttatttatttatttttattttttttgcctcccatggtgcctggtactcagttagtgatcaataattctcccctagcaactctgttcccttctgattagccccagggagaggaagcagcctcctctgagactcaaccctaccctgtgggaacgctcagtccaggcatcacatccagtgcccagtcctctgcctgccctccctttgataccagcccaactcaagcaccaggaaatcattagcagagactctcaaaggaaaagaggcttcaagttcatgtcacccagggccacagtatacggccccgcaggctgcccaccgcgcaagcccagggagcagccttttcatggatatgatgcaatatgtatggatcctgccatccaacccttatccaagcaggattccagaggcctcaaggccattcttggagagctctcattttcaggtggttccttgcaccaagccaaaatctgtccccacctccacccaacagtggttcacaccctggtccctattctgccctctggagtcctacatacaaagcctaatcacctgtttcagaccccacccaggcctcctaggttccaaccaagccaagaagcaattgtgtttctgaaggagacccctcctcccttgtcccacctctgcagtggggatagatggaaagagcaaggcctaggataacctcacacactaggtggccccgcccctggcatgcccacctctctctgcttctgctccacgccccaagcctggctcccagcctgaaacacacaggcccagtgcaaaagtaaagcaatcaggaagtcaggaagaaaagactgcattcctgcttccttctcagcaagttttgcaagcaatgggcctcctcgggcacaaagcaatctccacagccagggttctctcaggttgcttttcggggaaagagcctccaagcttcctgagagcccacccaccatcccagctggttattccctctgatggtaagcattccaggtagtgtggagcagccaccaccagtattcctccctgggactcatacagtcccagtttggggataaaacaaacatttccccagaacaggcagggaggatactggcatcctctcagctcccaggaaaagggtcatggacacatcccctcctggaggccagtgacattgcctgtcccacacccccttggactatgctacctgtatctaggaaccaaaggcaacacccagctcctttcactctcatgggttctggggacaaatgataacccactggacatggggagggcaccttcccccaaccaagaaactaaggaatcaagagcggagctgggaaaaggagctgcagggaaggagatgggctggacctagattcaggtgggccctgggcaggtccccagtaactgaatgaatgcccatgaggcacactcagtggagggcaaaggggagaaataagcccagaagcagcaaagtgacaagggaggagtacaagtagcacccaggaatccagcagaggtcagggagcttgggagagctagggcaggcagataaggttctgggctgttcctctttggggcgacagccagagaaatagctcagatagttgcataacccttctatttgcccagagcttttgtccagaaactctctgtcctgagaggtgattaaagaaggcatccagcaagaactgcacaagaaacggagtcagccggagaacaaggagtggtcttccactgcctcacaggaggatggaggcccacaacgcgtctgccccattcaacttcaccctgccacccaactttggcaagcgccccacagacctggcactgagcgtcatcctggtgttcatgttgttcttcatcatgctctcgctgggctgcaccatggagttcagcaagatcaaggctcacttatggaagcctaaagggctggccatcgccctggtggcacagtatggcatcatgcccctcacggcctttgtgctgggcaaggtcttccggctgaagaacattgaggcactggccatcttggtctgtggctgctcacctggagggaacctgtccaatgtcttcagtctggccatgaagggggacatgaacctcaggtaggcctgggggtgaggagggaacagcctgggacaggagctacattagatatgtcacaattgaggggaagagctgggctaaagccaggaaaaggagtgaatgcaggctgggtggaggctagggcaggggaagtctggcatttattgccaagagcttatgctgggatgggggcaggagttggggtacgtctggtttaggcaccaagccaaagggaccatactggtccaggaagctcgtggtgatctccttgcttccagaggtgtctcaaggattgtcttaaaggagcactgattaaagccaaaggaacctctggagaactgcatccacctacaacagtggacaagttgcctgctttgagcccagagatttaaaaggtagtgtgattcgttccaaacatcatcagggagatcaaggtgacttggaaccaaatgagcacctcaaattcctgcaaagcgggcaagaatttccaaaaggtcctcccaattacctggtcatctaagatgttttctctttaaagtccctcattccccatcagatgcaatgacatttccatgcaaaggcacaaccagggagatcctagagtttcccagcacccactccagataggccagccccatctcagccaccctgataaggggaagacagcagca

SEQ ID NO: 6402 - DNA, 6000 bp, Homo sapiens
agtctgacaatactaagtgctgagaagaatgtgatcaaacaatcttggagagggagagtgtaggcaaatgttcacagcagcattattcaaaaaataaaaaaccagaaacaatttagatatcaagagcagaataaaaagttgagttgcatattcattcaaaggaaactatacataaatgaaaaatcacaaattgctgctacacacaacaatatgaatgaacatcaccaaaattatgctgagcaaagaacccccaaaacagtactttccatctgcttccatttacgtagagttcaaagtcacataagattaatgtgtggttttagaagtcaggagagccgttccctctggagaagaggaagaagcatcgctgggagaggcacgaggggagctgctggggtactggtaatatttattgttctggatgatgattaaataaaatatattcacattgtgaaaattctttgagctatagtcatgacttgtgcacatttctgtatgtatatcctactgcaataaactttataaaaggaaaaataaataattgacaaatttttgaaatacaagttataatgagattaaaaataatataacgcatagggaagaattatgtctcactaaataaataccctattatcagacagggtttactaaacttccatcctccctacagagctgttccagaacttacttttagcttccacttgactgctgttgtttctcaactgctatcagattgtatagtccaagggctgtggaatgctggcacctaggttgcttgtgagaagagacactgtggcttgtgtgggatgcagtgccactggtggccaggactggcaggtcgtctgcttatgaagtgcctgaggccccgcttttggagaggcactgacttgtggagttctgcagcataatggcaaatactggggccccaccaagaagccatgtggtcccttcccactattcatcccatctgccctattacttgctgctcagcctctagagaaagggtattctatgacaaggactcacagaattagggctactatgacaaaataccaaagactgagtggcttaactaacagaaattattttctcatagttctggagcctagaactcccacatcaaggtgtcagcacatttgatttctctctccttggcttgccttctcgctgtgtcctcacaaggttgtccctctgtctgtctgtgtcctaatctcctcttcttataaggatagcagtcatagtggattagggcccacactgacggcactgttttaattttattacctttttaaagaccctgtctcaaaacccaggcacattctgggtactaagggctagggcttcaacacacaagttttgggacacacaattcagtccataaaagagtctgtctagttcttaccaagctctgtgactgggctgaatcctgtagcttctcgggtcctgagtttcttcccaacttgaaaatgaggtttgtggctcttgctcccaatgctgatgttacacagcttactttccatcttccttgtgaacatctccttgggttccagtacagctagatataagtaacaatggcagaaatgcaagtacggtgtcattacatttaatgttttccaaccctgtatgcatgtagtggggagaaaaaaagaagtgagaatgtccagagttgaaagcagtctgagacttcataggccacgtgaaggttggctgtagaacttaagatgggagagaagcagggttgggggagaacaaaagtaggggagaaggagaattgatatatatttggggattggtctgtaccagaaactgtaatctcactgaagcttcacaacaacctcacgaggtgggtattattattattaataataataattaataataataataataattattattattattaataataataattattattattcccattttactggtgaggacactgaggctcagaatgcagagctgggctttgctatttcagtctacctagaactcagaggaacctacgcaagtcagctctgccgacagcgttggttgaacatgctttggcacctcttgccttcctccccgcagcattgccctgtcacaggtgacaagaggaagacaaggttcctgtctgttttgtttggtagttctaaaaaaatgacatgaccaattctgttgttgttgctggttcagttttagtgaataggtaatgttcactgaaaatatatcaatagatattaacaagcaaacaaataaaattctggcacaagcaaaactaagccacagtgacagaaagcagatcaatagttgcctgtgggaagagcggatgagtataaaggggcctgagaggacttctgggggagatgaaaatgttctatgtcttgactgaggttgttgctctacatgtatgtacttgtataaaaactcttcaaactatacacttaaaacaggtgagtttttagtagtagtagtgatgtttggatacctgtaactttatctccattagaaatgtcagatattttaatatcatcagttagtttttgcaggtatcttgaaatattattcatgttcctcactactgggatagttttgcagattcatgttcctcactactgagatagtcatttagcctgtgcactagaccttgcttttgatgccttcataaagcatagatcagaaaaaaggtgagttgttgtatgtaaattacacctcaataaagttgattgatacaaagagaaacaaaatcaccagaaatcccaccaccaagagataaccactaccattttggggtttttatgctgccagggcattcatccccaccccgccacccccgcacatgctgtgttacactgtgttctggggttttttttctctctgtctacgatatattataaaaacctttccacaccagtacacagaatgctgcatctgtatttttacagtggtagaatacagcattatgtcaacaaaacatgtttacttcaccaatttgttgtgttggaaaattaagatgtttccaatttttcactcttaaaaacactaccatgaatatccttgtaactaaatatttgagcatatccttaatgattgccatagaataaatttcttccagtaaaattactgggtcacaggcattcacgtttttaaggaatttgatgtatctttcaaaattgccctacctaaaaactctatcaatttaggtgcccattagccatctctttgtctctactgtagactctcaatgtgtagactcagcattgtgactctccacgggagcagacacaaggtaagtcccagtaactgacatatcctgagatcccacaactttagaagctattgaaacctttcaaagtcagtcccagccctaactttaaatgaaattcaagacccataaaggttcaggggtctgaaagcactcctactgctcctactgagcacatccaggattctgactccggactcaggccagaaaccaccacacagcttgctaacggaacactgagtcaaaggaccagcaaagacctcctgccatctcaggcttagagattccctagtctctacacccccttaatctgtttgaaccaagccttgctccagagcagccgggcaaaggagccagggatctcaggagtcacacacactgttgacgtctcagcacaactccggttggttgcattttatttcaatccttggctctgctgcacgtggccttgggatggttatttaacctaaggctcaatttcctcaacaaaaaaatggagttggtaattgtacctagctcacagagttttagtaggatggcatgaggtaatacaatcaaattcactagcaccactcctggcccttaaaaggtgctgctatttggtaagtattattatcatttgttggcccctcacacttagcctcaggcagcagagaggcctgaaagagaacaacttcctgcccttacattctgacttttctgcactggtgtcgctacagaaggccagccaccaggctcattttagatctgcctaatgccaccgataagctgagggcttgaaaccccattcttaggagtggcttgcccaccccgcatgcctctaggaccaagcctgacaaatatagcagaaattacaggcatctgatttaaggctacgtgtgtacacttcgcctgagccaagccccaagccctagtcccgctgctgcatcaaaggaccagctctcttccagcctccaggcccagagtaagcagcaatttgggaggcagccccctcttatttttagctttagaaacccgaaaagccaacataccagagctcacccaagcgtctctcacaaactgttgtttgacttgggttgagaaaatgacaggctgggttctgcaccaagaagagaagaaaaaaagagggggaaaaaaggagttttcttttccctccgctgccaatctccatccccctcaactcctcccctaggcctgggtggaccctgcctgggtaatagttccctgctatatttaaaaaccacagatgtgtttggtggagacttaatttcggaattgcaggcagcgtctcctgaggacaaggggaaagccggtgccgcgcgcccgcctgctgcctggagctcccaactcggcggaatccaggtcaggacgcgccgccgttttgacgtgctgccggccgggaggcgcgggcgccaggctccaacgactagggtgggtggccgcggggcaggggttggatctgaattcgtccctcgggggctctggatgcgggatgcgggatgcgggatgcgggctcgacttcctcgctgctggtcgaggagcgttctgagagtctcccctccgcgcgcgaggataaatatgcgcggcttgtcagtcagtgcggcgctgtctcccagctgatagggtgacgttccgtttggaggcttggagattggctttttgatttggcttcttccggcagcttaatgggcaaagctctccgctcgcccagaaaccagcctctccgcgcgtcccctctgcgcgcggcgaggccgagacgtctcccgcggtgacagcgtgcaaggcggagacccggcgcgctcccagcccagggaaagcccaggcgacgcgaccgcaagcccgagcccaggtccctcggagccgccagggcgcgccgggctgcttgccttcctgccccttcctgcaggaatcccccgccgcccgcggccgggactccgggcctctcccgggcgtagattccagtcaccgctctgggtcggggtttccctctttctgaaatccgtgcggaaggacccctcccggggcccctcgccctggccccagacaccctccctcccagaccccgcgctccagatgcgctgccccgcagctccctgacagctgcgagcccacgaaccccggcgggagggcggcggcggcggactgacatgccccggacgcggctgcggccggcgggcagcccgcgggggcgatgagccgctgcgaccggtgaggcgccgggcggcgggggcatcgcgtaccttcctcacccccctcccttgcccactccgctcgggaggccgagaggaaacggtgagtaatggggtgagcctcctgcccttcccccttagcgggcagccgagacatgggaggtagaggttggggggcttgggatgcccctaagaggatccctgattgtgagtaacggggttaagttatttctcaagatcattcatatgaaccgccttcctgtggatttagtgccaggagaagtggggtgagggtgccccggaaagtgtacattgtgtatgcagtgttgggggggcagatctggcagagtgggtgtctacaggagggtgccgccgggtggggaggggcagagagagatgcctgggcaggtgggtacagttggatcgtgagcatgctgggttggtagcgggtgctgtttggggagactgactgctgtgttgtgtgtgctggatgcatgtcggcatatgtgtgccacctgggccagggcgtgttgtgcttctggtgctgtgagtgtccgc

SEQ ID NO: 6403 - DNA, 6000 bp, Homo sapiens
agagatggtcagatagactgtatttcatacatagcaacagctatacttttgatgggttgaatgtagaatgcaagggaaagaatggaatcaaaagctgttcttaagatattcatatgaactgagtaaactgagttactcaaggaaggggaacagctaagagaggtatcagtttaggggtataagggttagaaattctcattttatcataatttaagatgcctgctaggcatctaaattttgagatgttaggtaggcaactgggttacacaagactgaagctcagtgaagagacatgacagctggcatattaatggcattagagccaggggtctgaattagacttcttataaagatagcatatatatacagaagaataaagagtaccaatcaaaaaggacaatagaagataaaataattgtaaatgccttgtggctatctgctgtcatcaatagctggggtcagcagtgcaacttgcagcaagaacttgaaaattaaagcaataatactgctatcaggtctaaactttaaaatcaacaagtaatgggccagagcagagatatgcaatgccaaaggctgtgacttcactgtaatctgtgttatgggctgtgttgtatgcctgcaaaattcatctgctgaagtacctcagaatgtaaccatatttggagaaaaggtctttaaagaggtaagtaagttaaaatgtggtcattacggtgggccctaatctaatatgaacgatgtccttataagaagaggaaatttggaaacagacatgtgtgcacacagaggaaagaccatgtgaagacagaggtagaagatatggccatctgcaagccaaggaaagaagcctctgaggaaaccaactctacctgcaccctgatcttggacttccagactccacagctgtgaaaaaatacattttcattgttcaaattacacaatctgtagtattagttacagtaacattaacaaactaatatcgtctgattaaatgtaataataatacaacaaagaaaaaagtgtgtcaatcacaaaagagttttgtcacctaaggaagcatagaaaaaataaaatatgcaggaatttgaaactaaataggtaagggcaaaaagttggaacaaatgctatgtcaaaggagaggtggataagtcccaaatacaaacatattcatgagttggtcatcaaagaggctgatagaataaaatactgaagtaggaggggactgaagcagacaagagagattaaaaagacaaagtgaatatatgacaggaaatgtgcaaaaatagagcaaggtgtgattaaggtgaggcaaggtttccactaattttgtaaatggtagattgaagtttccactacattctacattttttacataactcaaggtcataagcagaaaggttagttcagacagaaagtgtcacttcttgtgtcagagactgccagtggcctcccaatatccattctcccactttcagttaataataataaccttgatttttatggttggcacatttctatccctgagattacaagaagtctatgacatttccaggaggtcttctttgcccttccttcattaccttcctggaatgtagatatgatggttgaagttccaaaatccatcttaagcatcttggaccacgaagtaaagtctacactccaggggtgagccactgcacccggcctgattccataatttttctcaattgtttcctctgagtaggatctcattttctctgtcatttgctttcctacatattaaagctccctcatttttttttttaatttatttacttttattattttttagtagagatggggtcttgctctgttacccaggctagagtgcagtgcttcaatcacacctcactgcagcctcaaacccctgagctctaatgatcctcccgcctcagcctctagagtaactgggactacaggcatatcaccacgcccagctagcttccttgttcttccattgttactggaaaggggtcctgatccagaccccaacagagggttcttcaaccttgtgcaagaaagaatttggggcaagtccatagagtaaagtgaaagcaagtttatgaagaaagtaaaggaataaagaatggctgctccataggcagagcagccccgagggctgctggttggctatttttatggttttttcttgattatatgctaaacaaggggtggattattcatgagttttaggggaaattggtgggctattcctggaactgagggttccttcccttttcagaccatatagggtaacttcctgatgttgccatggcatttgtaaactgtcatggcgctggcaggagtgtcttttagcatgctaatgcattataattagcatatcatgagcagtgaggatgaccagaggtcactttaatcaccacgttgattttagtgggttttggctggcttttttaccacattcttttatcagcaaggtctttgtgacctgtaccttgtgctgacctatctcatcctgtgacttagaatgcctaacttcctggggatgcagcccagtaggtctcagccttattttacccagcccctattcaagatggagtcgctccagttcaaaagcctctgacaccattattcctatacttctattagggaataaaggcaatttacatatcccatctctcactctacttattaccagcatttcctcaacttgtttaggatacttttttctttcactgccctatgtatttcttttgaagctgtgtgttcagatgaaaaggacaattttcccaggtactgagaggtgattcccccaccaccgtccccacagtggtctaaaagaaaccttgtgtttttttccttacaaatctcctcattgatgatttcttgattttccccccatttctatttgatcttttctctcttgacattccaatgtcatttattttattttatctatttattttttgagatggagtcttgctccgtcacccagcgtagagtgcagtggcacgatctccactcactgcaacctccgcctcctgggttcaagtgattctcctgcctcagcctcccatgtagctgggactacaggcctgcgccaccacgcccagctaatttttttgtatttttagtagagatggggtttcaccatgttggccaggctgctctggaactcctgacctcaagtgatctgcccaccttggcctcccaaagtgctgggattacaggtgtgagccaccccgcccagcccccaatgtcatttatttatattacacatttttttaatttatcattctctgccttttataatgatcattttattcactcatccaaccaacatatgaagagctactatcaatcccattttaagatggggaaacagagttcagagatgttggattccttgctcaaagacagacaagtttaagggaatggaatggaaacttgagcccaagttgtaagtcataatctgtgttatttccactatcccatcttttttttttgagacaaagtttcgctcttgttgcccaggctggagtgcaatggtgcaatctcggctcactgcaacctccgcctcccgggttcaagcgattcttctgcctcagccccccgagtagctgggattataggtacctgcaaccacaccgagctaattttttgtatatttagtggagacagggtttcaccatgttgaccaggctggtcttgaacttctgacctcaggtgatccacccgcctcggcctcccaaagtgctgggattacaggcgtgagccactgtgctcagcctccactattccatcttaacttctctcagagtgagcaaataagaggtcttcctgccgaatctgcccctatctccttctgtttggtaaacatagtagctgctgctttggttttttactctaaatttaaatgtctttacattggccttgcactttctagtcctctaagatccccaccaatccctgtggtctaactccaggttgcttcacaaggttgtcaccttcctggctctttaggcttttgtgtttttgacccctgaagtttcattcaagttcagtttggaatgtctcattccaaaagtcaggaagactggcctaaagttatacctaagccatgcgttaaccttattgtaagagttaaaacattaaaaagattgaattttcccagttgccaaaagaatgagacattcccccacccccctttcttaaaacattttcttgagcaaattgtaattataatccgtgtgtagtgtgtgtgtgtgtgtgtatctttttaaaagctaaataagcctcttgtcagataaaacccaggaattgttttcgtcaggtcccgggagccaactccttgaaatttaagtatcaaggtagacagtgcccctatgttccaggctcgcgggagttacccgaagcgccttgctccaagccgtaagtacctgtttgtcacagagataacgttttatttttcctttggataaaggcaattaaccaacacaggcggccactccaacggtgaactaccaaaaattgaataccaaaccatgttaactcgtcttacatgagaagatgcgtgtgctttggctacataaaatgtgagatttttgtctctctttgcaatctcattagtggattgcctgtaacacccattccggtctggttcgatgcttacagaataatacaccttttttttcttttctacatttgtggagattttctaggatggcaggagatttttttaaaattttttttctcgacaatatcaatttatttaggtcccttacttttactagccacccccttcccacttgcttccaatggcaaattagaatggtaacttgccccttgctcacctcatgcttggctttgggaaccggtgagaaactgcaatccattggcggtaggaaccacgattcccagcattcccagtgctccgagtccttcgggcttccttttccgggtctcgaggctgctgaaaccgaaaccgctgtgctgtgggcgcagcgccgagattgattcaccttcacctgtgctgcactccagctgacccaagtaggaagccagacgagctgtaaaacatgaacggaagagtggattatttggtcactgaggaagagatcaatcttaccagagggccctcaggtatgtgcggaaagggtcatatctgacagtaggggattagagggtgtaattgcagacacctctgctgctgagccggattcacctggcctcggggcgggcaggccacaacctagaggtttcgtgcaacgcttcggggtgcttagagaaaatatattgaaatccatcattagccagatacgggtctgaggaatccacctcaaaatccagttggatgaacacaaatatatatagtcaagaaggggttctttgtgcaaatcgtgctagaaaagcctttttaaaagcctgcttttttagcctgcttatcgtggataccacatccttctttccgttgcctgttctatccctccccctatgagggaccgtttagtaaaatgggagcataaacggtgtggactctgaatgcatagccgttttcctgcagctaggatccctccctcgctcctttgatttctgggaacttcatttacaatgtcaactagaatgttaaagcaggaagagcccttagaaatcttttattacacaggttcccaaacttggttccgccacaaaattacccagggctttaaaaaaaaaaaaaaaaaagaaaataaaaagttaaatcttatctcccatctgcagggatttggatttaatacagatttattttatttatttatttattttttatgaacacctcatgtgattttgagcagccaaactgctatcctcttcccccactgtggctcttcattaaaccgggctcttgacattactacattctgcctgctttcgactttgtttactttcctttacaactatttagttgatcaattaagagctctttagctttggaattacagtatctgggtctaaatcttgtatctaacctcttactgattcttg

SEQ ID NO: 6404 - DNA, 6000 bp, Homo sapiens
acaatgcaacagggctctctctttgttcccaggcggatcggcaggttgtgaaataatagacacacacaagatagtgaaagctgggtccaggggggtcaccgccttctggtcccatggtgctgccaatgcactgaatatactagcatttattattaagtttagtgagggcaggggtaggttagtgaaggatttagggtcatttgattatgaggtgagatggtcacatggggatgaagtaattctttaacataacatctgtatgcagaagtacagtatacagagataagaatttacaatatagtgtgtgcatcagtaatttctaacagagccttaaaacagaaacacagtctttccataacctatgattagcaagatattaatcagcagtaacagttgcagcaaaagctggttacaaacaatccatagaaacaggatgtgaagctagacaaccagttagaccacaaattctcagaagggagtatgccttaaccctaaagaggcctagaagagccgtggcaagatgagggcgtttatagccctatcttatccacatggacaggcgcccctcatgcgtccatttataggctccccacaagggtcgcattccattcccagagctatgaacatctgcttttctgggataggaatcttggtgatgtgaaacctccctgactgcacgtccattcataggctctctgcagggggaagcacatcacgcgttgttggctcgtctggcagaccaacctggcattgtctttacacaatcctgcatgcaattttgtatttacaataatcaggagcatttcatcttttattccatagcagtagtttcagggggtctccctacaggaattggtgatgtgaaacctctctgactgcacgtccattcataggctctctgtggggggaagcacatcatgcactgttggctcgttctggcagtccaacctggcattgtctttacacaatcctgcatgccattttgtatttacaataatcaggagcatttcatcttttattttatagcaatagtttcagggggtctccctacaggcatggtgacacgtacctatagtcccagctacttggcaggctgaggcaggagaatcacttgaacccgggaggtggaggttgcagtgagctgagatcgtgccactgcactccaacctggtgacagagcaagactccatctcagaaaaaaacaaaacaaaacagggctaggaaaacagtttccagggcctaataaacaagtatagctggaagacaaagatgattttgagaagtacttatccacctctaattccaggggttctgtgaggaaaacagatttttcctgaaacaggatttttggtgccttttctgttttcccaatgagtcccaggacaccagaagtcattttagtgttcttcatacatgcaccaagaatgggaagacaaagtggacaaaagtaattcagttaactgggaaaaaaccttttccaggaaaacaagatttatgaagagaaaaacataaaggccttttgaatatactcagcttggatattcattttaattaagctgagcactctttttcatcggggtgagggtggaagttagaattatataaatatcatgccaagttaaattaaaggattaggttatgtgccaggaattccctgagataatgagggggattttccgggaaagatcccagatgctgtttgatctgtgacaaatcagacatggaaaaaggcatatgaatgcgagcagtgccttcaaacctagccacttctcagaaacagagaatagcagagatggtttttgaatgggtagcaggtggagaaggaggaggagtgggatttggggctgagggcttgggggcagggcgggacaccggggcagagagttcagacagatgaggagcatcatgatgcagggggatgagaatacggaggggattcatctgcagggtcaaaagggatttcggaggaaggagttttgaaggaagaagttttggaggaaggagagacccagggagggttttcattaagaaaaaggatttcatgaggggtacaagcttgacacagggagggttgggatataaggtagaagaaagcctgaatatagagaacctcttgccatttactgttcctggttataaagttgtcaaggtccctgagaatttgaaagttaaaggtgccatttttgggccatcagctgtcattatttaatttgtattgggtccaggccatgttgcaataaaaaactaaatgcatatgtcaagtttggcgaggttgtgaaggagacagcccagtggagaggatgaggaatgtgggattgtttggcacccatgtagactggcaagaagaagccgagggtgtctgtttttgttccagttgtccccagacaaaagacagaaacctggaatcctctttctcaagaggacgtcaagctgagaagaaactggacatacccaagatttcttccagcttagtcccactggtcctccaaggactgggacagcagacctcactttccccaggtactgtaagaacagcaggtgagggcagatcttaccagctggctgaattagtggccgatgttggatgttgcggttggaatcagcaaagggcctcttggactggagctgtacaaggaagagagtgaaggaagtatgaggaaagaggagaggagaaagcgaaatacctgttatgggtggtcagaggtggattcctgagacctgaggattttgagggctcactggagagtagccccaacctgagccctcacagtccccttgaggttagttgtcctcctcatgcaaattgctcaaaaagtgaagtgagagacaagatgaggtaggtggccagagactctcaggatccagcgggatgagcagctgctgtccactgcttcctgggttgcatgacagcctgtatccccaacacccatcccaggtttcagcaccaaatgtaagaagtaaagaaagagaaaagaaacatgaaaagtggctcaacagtcaaagacaagtttattttggagaataaacctgagaggggcttctggacaatttttttttttttttttggttaggagtgcttgctcctatggactaagagtttttattggttttagggtgagagagtttatcacaggcttggaatgtttctgtgtgggggagaagtttatggcagggttggaatgtctctggctggaggggaggttatcttggggctgacatctctccagctggaggggaggttatcttggggctggcatgtctctggttggggagaggtttatcttatggttggaatgtttctggttggagatgtcatttgtggtttatggtcatgctggccttagccattaggctgatgcactttggatttaggtagtttttgatcaaggtgaaccttaaaatggtgatgcttttataagacagcgatgctcctgctctgtaaatagctctttgtagttatataattttctttttaaattctgtagtcattaagggacatacactgtgcaattctttttttttttttttttttttttttttttttgagacagagttttgctctgttgcccaggctggagtgcaatgttgtgatctaggctcaccgcaacctctgcctcctggattcaagcaattcttctgcctcagcctcctgagtagctgggattacagatgcccaccaccacgcctggctaatttttgtatttttaatagagacaaggtttcaccatgttggtcaggctggtctcgaactcctgacctcaggtgatccacctgcctcaacctctcaaagtgctaggattacaggtgtgagccaccatgcctggccccaattcttatttttaggatttgctgatacttccattatgcccatggatattatgtattttggtatatgtcccatgcacatttgaacttcataactgtgctgcaattgttggatgtttttacatgtgtacattaggttaatttgattaacatttcttaagttttctatttccttactaattgttttttaaattgttctatcagttactgaatgaagcgttttataccaacaagtagactttgaagttttctatttatccttttatatctcttacaatttcgtttatatattttgaagctattttgttaaatacaaattcctgttgaatttcattctataaagtatatccactttatttttgttgctgtttcatcatttctgttattagtatggtttctttggctttcttttgctaatatgaattagtaaaatgttgcaaatattttggagtagaagttatttccttccaattcagatttggaactttttgctctggagcgtgttgagatctgattcttctttgcatctagagccaataaggggtggtaggagtatgtcttgaggagtctaggcatccgttttcaggataagttccccagctgagctcattgtaaggtctcaagcttgaggtgcatagacttctcagacaggagagctctgggctctttcactagtaaaggagactaggggatattttggaatgtttacatgtttaaaatcatccaaattcaccaggaattctctatttcaagtctcaaagttttcccccttcccagtcagtttcttccctttcccttgacgtatctatgtattcaacttatgttgtcactctgcaagcatttcaattaaattttgttttcagtgagcttggttgtatggttaaaacaaaggagagattcttttaggtccaccattataagctccctgtttgaactgtgaatttcaagactttggcctcatcatgtaaatttcccagtttacattaaattagcttaattacattaaattaaatatagctatttcacctctcagtctttgaggtactcatagtaattatcacagcagtcacttcatccccttacacacttgggtcaatagggcagttcactgcaatcaacattgagtagtaactaattgtgatgtcattacatgccattctccattggatgggagttcagcagtgtgtttaagactagggtcatgcccacatcaatctcagattcccattttatctttcttttttggtatcactcctagtaccaagtcttgtgtctgtcaatatcctgtccaaaaaagaaaaacacaccaaggaaaattaatataggaaaaatttaaaaagttattagaggactgaaaatataaaaatggaacactgaaagacacagaggtaagatttgctagaaggagctacagtattattaactatatgcacattattgtacagcatacctctagaactttttcatcttgtatgactgaaattatatatccattgaacaggaactcctcatttccctaatccctcagcacctggcaactaacattctattttttttcttctaagaattttactactttagatacctcgtaagtggaatcattctgtatttgtcctgtgactggcttatttcacttagtataaaattctcaatgctcatccatggtgtagcatatgacaggatttccttccttttttgggccatgcgtctgttgggaaatatttacattttttttccaccttttggttattgtaaataatgctgcagttaacatgggaatgcaaagatatcttcaagagcccgattttgataatttggataaatacctagaagtgggattactagatcatatggtagttctatttttaattttctgaggaacctgtatattgttttccatagcagctgtgccattttactttcctacctccagcattggaagtcacattttttttaagcatgagaattttatgtgatacatgggaaggcttctataagtataaaataaaacataaaataatttaggataagattaatacatttaagtgtttttgtgtgcgtgtgtgtgtgtgtgtgttttttttttttttttttttttttttgagacagggtcttgctctctcgcccagactagagtacggtggcccaatcttggctcactgcaacctctgcctc

SEQ ID NO: 6405 - DNA, 6000 bp, Homo sapiens
ggtgagtgaggcaggaagcagatctgtcccaactgagcttgagatgactgtggtcttataagagacccaatgccagagagttgacccacagaaactgagacgataaacgttcttttaagctactgagttttggggtaatttgttatgcaagacaagatagctaatatgtatctcattttatagatgaagaaaatgaagctttagggtgatgaatcaatgttccccaaattacacagttggtaaatggcagagccaaagcttttggaacatactaagttcgaggttctagggtctgagtttaagtctgctttctcatgaggttccaagtgattgggacactgcagttctggaagaattctactctctgaaatccttggaggatagccatgtttccaggaaactctttgtgtgcataaaaacagagatggacaaaagtttaaatggtgctaagtgctttgagtcggtccactccctgctgcagaagaatggctgatccacccatagatctggtgatagtaaccaggagctccagtcaatagcacaatggcagaactcagagctacagcccatccatttttacaagcgctcaagccatattatgtaaagcaggcggaagggggcatacacttttcttgaggatgaaaatgaatgcatttagtaatgaaaatgcatagtgtggtatttaaaaattacatgagctctggaatcaaataacaaatggttctgcctgagagaccagaacaccttctttcactgatttttttttccttcccatccctgaaacagagccttgaactttgaaaccacagtaccttgttccagcgtggaaagcagcgtggcacttcccggtggtgaaagcaccccagcttgaaagggtgaaaacaccttctcccagatagtctccctttgtttagccagtgcttttgccttaaggaaatcaaatgaaggtatgctccttggttggctgctgaatctgtccttccttgtcagctttgcccagagcagcaggctttgagctctgggaggatttccaggtggcagcagaacaacggtcccataggctggagcctggcacgctttcccttttaaccagtggcagaggctgcactttgctggtgtaattatgcaacctagtgtaaagtccacatgggtggggatagggggtaggcaaggcaggactgtaagctggctcagcactctgattgggttttttgactgtttttctagcttttcttacccttttctctcctgccccctcatctcctcctcttccctccttttccctccccttctctctaatcccttcatctttgtcagcctccaccctcagggatccctaactcaggaagctacctcttatcaaatattttggcttgcctccaactgctagtggcaggcagttctggcccttgtctgctatctgagcgattttcttctccaccggttgtttatttctctaatctagttggaattggaatcgtgtgtagaatccagaggaagaaaatccaaaagcaaaaaatggatcctttccctagtgagattgcccctgtgggctaaaatagaaatggaaagagacttggattcttttcccttgaaaagtgacattatgaaagagcaggagaaacagcattagtgtacaggaaagcccaaggcacactatatcactcctcagatattggacatcactctgagtcctctattttctgcttaattgggattataaatgctatttttgccccgaatgtacctgccatcttggtcgtgcccaagtggctctgaacagataccatctgcaggacctccacagccagccatgcaacaggaagctgcagactcccagactccagtgttcttgttttctgagagggagccctgagaatggtagagaagcaaaaaacacaggaaagaaaagaaaaaagctggatggagtaattacatgatagggttaccttgtgcacgtgaaagcaaaatgtagggatacaagcaataacccctccggtactgcacagtctttgataacacaatagccttctgttatttcaaggcatgttccttgaaaccttccttaaggttttcccactacttactgggttgtaacatatttattttatatgtcctttcttaactgatattcacaaagaataggaatgatagatgtgtgtatatgagcaaaagcatttatacatgctttctttttttttttttttttagtgtatgaaatagcggctgacttttgtgacaattttccacccagttttgtgatagtaatttcgctgcattcttcaacttagatggcaagtcctcttagcaaggctggcctaattctatgttttctatggcacctagtcactatggctgtgcaagagccattattacccaaagtaccataataatggtcatgtcctcctatgacgttattgtttcctatctgtcaggacattaattgtcttctaacttgctctaaaattggtagcatggcacactgccaagactagagagaagcaagctgctggtgatatattaaaaggctgtgtaaaaggacatattggtatttgctttttcttggggcatcttcacatttgcattacttcacatgttatgggatgttagctcaggcttgccttatgtcttggcgtctatcttatcatggtcaatgtctgatctttccttcagctgaatgattcagacatctctaagttattttggcttttccactttcctttcacaggctttttgtgagtcattgaattgaatgggaggttatttctaaattggaaggtgaggaagagaggagggggaggaaagttccggaaaataactaggaaaaggcactttattgttatgtatagttactggaggaataatttctgcttagtctggtgatagaagtatgtactttatttaaacttgactaaaaatataggctagaaaaaagacaatatttttctgaataataaaccatacagttttagactctttgtagcttgctctgcaaagaacaaggaggttagtaaatagaagaaatatgagacaaagggttagcagaaagaagaaagagacaaagcacatttccaaagtccacatccttgaggtgaatgcctccttgacagtgtctttttttttttttttttttaagacagagtctcactctgttgcccaggctggagtgcagtggcaccatctgcagagacaggggtttcaccatgttagtcaggctggtctcaaactcctgacctcaggtgatctgcccggctcggcctcccagagtgctgggataacaggcatgagccaccgcacggcctgacagtgtcttaaactatccctgggtgttgtttcatggcccatgggtatatgtatcataggtggggttgtgagaaagtacatttaaatctgatttagaaactgaaagagtaatcagaccagcattttgttatttaggagcaggaaaagtgggtgaaaaaaaaggaaaaacaaaaagctaatgatgaatatatttctaggagcacaagagtttttatagcaacattagatttctcaaaaatgcctactgtgatttgtacccaagtgaataaaaaatgcaatcatttattcttgtgcattgtgccaagtgaggaaaaaaaaaaaacacacacacacacaacccggcaattcattcaatggccctaatttagactgctaggaagaggtttagaaaaaaaaaagagagagagagagagaagcttttaaagtatctgacacacagctagtagggctatttaagaactgctgaacagaaaaacaaagtggcagtgagaggtgggggaaagcagaattctcatttccagagcatcataaagggtataatgtggcccgcttattagaaagttgctggccgggcgcggtggcttacgcctgtaataccagcactttgggaggccgaggcgggcggatcacctgaggttgggagttcgagactagcctgaccaacatggagaaaccccgtctcatgcctataatcccagctactcgggaggctaaggcagaagaatcgcttgaacctgggaggcgtaggttgcgatgagccgagatagcaccattgcactccagcctgggcaacaagagagaaactccgtctcacagaaaaaaaaaaaaaaaaaaaaagttgctaatggctgtctggtcaattggcaggggtcagccaggagtggatctggaagctggagaactctcaatacgccacttcagtttattgacgacatttataattgcaaccgaagttgactgatttctgctaaatgaaagtttgcgctttgccctttagcattgaggctcctggaaagaacttcaatgaaattggatgcattgagaccaaagaaaagaaggggacatttttatctctctgatacctttctccccagggcttggaaacacttcttaaacacaacctctaatgttggtgttttgtaagtactacccctatgaataaagctagcagagataagcttctccttgcaggaagtgagctggagaagtggaaaagtttacagagaaaactctacaacaaagacttaacccttcccgggtaaccacgaatgtgagcgtctgcccctcctttgctttctactgcgcaaccaaactgtgcacaagcgtgaatcaaccttaaccgtcacgtctcttgccagttagcttaacagacacttttagcagcctatcataacttcgaattgcccaaccctcaaccaattacaactaaagcttgggctaggacgctccaggtccgggcgggggcgaataccgggtttaggaaaaggggcggtaaagagcgatgacgggcgggtatactaaaccaatcagagaggagagctgccgccccactatccaatggataggttagaagtatgaaagagggtgggcctgttgtcatgggggaggtggtggcgcttggtggccactggcggccgaggtagaggcagtggcgcttgagttggtcgggggcagcggcaggtgagtgccggtaacgcgggtcagagatctgggggccgtcgcggggcggaatctccagctcagcactccggaggcggaggccggaggaagggggcctggacttcgggtcggggcccgggccggggccggggccagggcggaggcggcgggggcggcggcgagttcgcgctgactgggctagggggagaggggctgggcttctggctgcggagttctcccgaggaaggtaggctacggccggacccgcgcgggtcaggccaggaggtcccttgggacgtccagctgctccggtctagcgcgctgaccggcggccactgtgtgaggagtaggtatctgaggaaacggaagcggccagggtcccagagagggggtgacctgtaacgacctgcttcaagggcggggtgtcttgggaatacccaggacggcttgggtgccagggagaaaaggaatccgggaagcccgcagcggccggtgaggagagagcggggtggggggcaggggaactgggagtggccccggtccgagggaggtaggaaggccgagggtggccagggtcccgggtgacagggagcagacttgctccaagtaggggcgtctgaggaaacgctcggagggggttggggaccctcctgagaaaagcggctgtccaagggagggggctcctggagagatgaggagcagcaggtcttcggagggtcggacgagtagagatcttgcaccgcctgggggaagaaccggagctccctgcgcccccatagctgagctgggatgggagacccaactggcctggccgctccggctctgaggatccctaagggaccaggaaagaagtcctcgaggagtggctcgcgtttgagaccggggtgaggagccagcaggggagtggaagttccctcggtcggagaggagtcatgcaaaatgggacggagatgggcggaggtgggagagaatccctataggaggggataaggtagagaaagaaagttgcccgaggagagagtaatggtttcgtggaac

SEQ ID NO: 6406 - DNA, 6000 bp, Homo sapiens
actcctaagctaagttatcctccagcctcttcctcccaaagtgttgggattataggcatgagctaccacacccagcctgaatttccacttttaacacccactaggggtgtgactttgggcaagttacctgtcctttctgaaagtcaatttcttcatctgtaatatggaaataacaatattatagctacatggggtcataaaaataattaaataggaggttagtaaaagaatcaagagaggtaaagcacccagtatagtacattgtagtggctccaaaatgttagttcccttccctttttcttttcttttcttttttttttttttttttgagatggagtctctcgctctgtcgcccaggctgccaggctggagtgtaatggtatgatctcagctcgctgcaacctctgcctcccgggttcaagcaattctcctgcctcagcctcccgagtagctgggactataggcacatgcagccatgcccggttaattttttgtattttagtagagacggggtttcactgtgttgcccaggctggtcacgaactcctgggctcaggcaatctgcccacctcagcctcccaaagtggtgggattacaggcgtgagccaccacacccggcctccttttttcttccaaatataaaatgatagctttactctcaacactttaataaggtacaataagatacaagattcaactggccaaaaataaaaataaagattcaacttgctgggttcagaaagttatcatggattatcagtgaactgctttacaaatttttaaaactaaaaatcagcatcaaaaaatatatagatcacataccatgctcttatccttaaaataaagtagatcataaagttcccttatgatcatcaatctctgtttgcttcagacaagaaaacatgcaacaaggattgaaaataaaagagagccgataacagtaaaaccattctgaaaaagtgtcttgcttcaaacagagttaaggtcaattgaaatgtcttaagtatatgttaagatttcaaggaattaaaaatctttgaaatacataaccacatcagcatcaccatagaggtagttaatgaggccaaggaggctttctacctacctaccatattatctttctcctgatcctgcttcttcaggtaacttaatactgacattatgtctttctccattttacattgctttttctttaagtcctcattactttttgccagtatccgtgaagtatcacgatacttaatcctagagagttctgtgacttccaacctggcctcccaaagggaggcattggccttggctctgtccaccacagattcatctgtttttattaacttcctgcatgggaagaggatattgacagtatatgactatttatacaactctaatatgcagatagtatataactctattatattactattaaatttttctctttttttatttgttttgcttggcattgcctggcacacatgatcaaatattgttggaagaataagttaataagaaatacatattcacatttgaaaaaagaaaaaaaaagaaatacatattcacttgtattcacataagataattaagtaagtgcctcttcctggaggaggggagtcctggagcataactcgaaaagactggtaaaacaaagggaaaagacaggataagccaaactcatttcagaaagctttcatatcttttttttttctttttgaaactgggcctggctgtgtcaccgggctggagtgcagtagcacgatctcggctccccagaacctctgcctcttgggctcaagccatccacccacctcagcctcccaagtggctgggactacaggttcatgcaactatgcccagctaatttttgtactttttgtagaaatgagtttttgccatgttgcccaggctggtcttgaactcctgggctcaagtgatcctcctacctcagcctccgaaagtgctgagattacaggtgtgagccactgcgcttgggcagtttttataccttttcatttacttatttgattctcccatatttattttttttttaatagagatggggtcccactatgttgcctatgctggtctccaacttctgggctcaagtatcctcccaccttggcctctcaacgtgctgagattacaggtgtgaaccagtgccctagcctgattctcctgtagttaaactatcttttctattcctactcactcagtgctggactttggttctctccactgcaaacccattatctctgttcagtttctgcatgatgatacccattggtagtataactgtgatctcccacccactttaccctccacttttgagtgtgttttttttttttctgggggagggacggagtctcactctttcacccaggctgaagagcagtggcgtgatctcggctcactgcaagctccgcctcccaggttcatgccattctcctgcctcagcctcccgagtagctgggactacaggagcccgccaccaggcccggctaattttttgtattttcagtagagacggggtttcaccgtgttagccaggatggtgtttttgttttgttttgttttgggctaggtcttggacaaaaagtcaagtcactagggcaaatacgttaaatagtttatcagctggtgccacagttcaccggactttttttttttttttgaaacaagatcttgctctgtcatccaggctgtagtgcagtagcaccatcacagctcactgcagcctcaacctcccaggcccaaacgatcctccacctcagcctcctaagtaactgtgactacaggcatgagttagcatgcccaactaatttttaataaaaatttttgtagagacagggtcttcctatgttgttcaggctggtcttgaactcctgggctcaagtgatcttcccctgctcagcctcccaaagtgctgggcatgagccacgatgccccacccaccgggctttaaggatgcctgagaaaccataatcatttatatagaggtggagaggaaaaaggatggattcaaagattaaagtggtaaaggaagagatttttctaaatatttattgtataagcattaacaaaacactcccccttatatatggtaggtaccatgatatataaatatgtacatatttaagaatatttcacctgtatttgaattctaaatattttcacacatatgtacatgtggacctttctatactgccaccctccacatccactttcctacctctggttctcagtcctcttccacagaggtaatgggtttgcagtggagagaaccaaagtcccactttcaccttttgttctcttcaaattaaggccagctccattcccaacccctcagcctgttatagctgttgatgtccctttctggcatgatttaggcactagtgatacactgtctcactacgaccatccaggtatcaggtctgagtggctcgaagtacttgatgcgacagggcatggtggctcacggctgtcatcccagcactttgggaggccgaggcgggtggatcacctgaagtcaggagttcgagaccagcctggccaacatggtgaaaccctgtctccactaaaaataaaaaaattagctgggcgtggtgacgggtgcctgtaatcacagctactcgggaggctgaggcaggagaattggttgaacccagaaggcagaggttgcagtgagctgagatcgtgccattgcactccggcttgggcaacaagagcaaaacttggtgtcaagaaaaaaaaaaaagtacttgatgcaagaaattagacactctaataggaccactgatactcactgtagaaacaaagccaggtttctcaaacaatgggtcatggaaaatccaaggaataaggtctcttacccttagtgttcctcattgttcaaatgtgtactgtagaagcatggtcaaaatctgaaaacatatgttagtgagttctaggaatgtgataagcccttggcactttaagggctagactaactgtgcagttatgtaaaaacaaaaaaaaaataccataaaagaatacttacattaacaaatgggaagaaaaaagccacatataagtatgtacattgggctatcgttttattaaaaaagaatactccaaaatatagtagtgtttatttttggataatgagactacaggtgatttttgttttttcttttggtacttcccatgtttcccaaactttctgtattgagcatgaattactctcttaagttactttacaaacatctcaagtttggtgccaactctgtgttcccatatatggtgttgttgctggacaccacgtatgactccaacgtgtccagaaaccaccggggtcccccaatagggctagtagcaatctagcagcaactccaggcctgtaaggggttagtgctagaacattacccacctcagtggctctgatcagtttgggaaaacctcaataattatccaacttggtaaaatactttaggtgtcccctttgaaccaaaagagatctctgaaaaggcccaaggaactactttatacatcctctacacgtttaagataatctgaacacatagtagagatctgccagactatggacatgggagctgtaatcctcacaagccgggagagccggggagagggtccgagtgggccggcgcggggggcgccaggttgccagccccagacccgaaatcccaggcaggcccagggagaggggactctcgggtggcttctccttacttcgtgtctttgcctttgctcttgcctttctttttgtcctttcccttcgacggcatcttggcttccccaggggctccgctgtcgtagttgcccagccgcggccgccctggccagctctgtctccaagggaaccgggacgccgagctggcaatgccccacccgcgccgctgacggcgcgcggagagcgcacgcgcccgtgacgtagcccaggcgccgcggcgcgcggggtggggcggaggtcgcgccgagggcggcgggctgccgcgcaagggtggcgcgcgcgcggtgagtgtgcgagtgtcggcggcgccggatcctctacgtggggcccgggctctgcgggcgggaggcgggagctggcagccccaggcggtagcgcttcgtcctgcggcctgggtgtgtcaggagtcgctgcggtcggggcgcccttgcctcaggagacttagatccccgctgatccgcccgtcccgccgcagtggtctgagccgcagccctttcccgtgccgcccgcgggtcccgttcctcccgtgtctccatgccgcagccagcgtggccgcggctaccttgccctcgcccccgctccgcttctgccgctcccggcactgccttactcctttgggttgcatctctttcctggcttttcacccttgctgattctgtaagggatagtgcagccagcggacgtcccaggccaaatgttttttgataggcagtcgaggactttcccgagggcggtggttgagggcgaggctgccagcctccgaagagcagcggcacgccagggagccgggcggggaggggagtgctgccaccgaggtcgggagcagggtcctcggcctcactaggtcctgtgtggccgatacttcctgcccacgaccgccccccggatttccatttgctaataccggtccgcagccttctttcctgaaagttgcataaagttggaagctcttcaacttgcctccccgactcctgaaatcccgaatacacctctgaaaaggagtgtactcacaagtattctcatttttcaatgagagtcagtcagtgagtcattaaggaaggtacggtattctgagtgccaagccaatagttaggagacttgtggttgaagctctgctctgttatactccatttcaaattaaaaagtttattttaaatgtggttgtagatccttcgtcaccatttctctagggaggacttaatccgtacactccttcccgatgtctttgacctctaattactcccctccgccttgtttcccacttgcatagtttctgtttc

SEQ ID NO: 6407 - DNA, 6000 bp, Homo sapiens
actaaaaatacaaaaattagccaggcgtgctggtggacgcctgtagtcccagctgcttgggaggctaaacaggagaattgcttgaacccgggaggcggaggttgcagtgagccaagatcgcgccactgcactccagcctgggcaacagagcgagactccatctcaaaaaaaagaaaaaaaaattggatcttatccaaaagataactctgaaatataaactcaaatattaacaaccaatatgatatatggccttttgctatgcttcattatgatttttctatgcagatatttacatctatatatattttcatagttgagatcacattttacatcaagtttagtattggtgtaatactttttttgttcaatgcaatacactcttttttattgtgaaagctgaattgaaattaaaagatctataaaaaactgtcatttttggccttcaagagcaccaactctcatgatcaaaaaaggccacaacagggccaggagcagtggctcacgcctgtaatctcagcacttggggaggtggaggcgcgtggatcaactgaggtaaggagtttgagaccagcctagccaacatggtgaaactccatctctactaaaaatataaaaaattagccgggcgtggtggcgggtgcctataatccaactacccaggaggctgaggcaggagaatcacttgaacttgggaggcaggggttgcagtgagccccaatccagcctgggcaacaagagtgaaactccatctcaaaaaaaaaaaaaaaaaaaaaaagggccacaacagttaagaatgtattacttgatttattgtatactaagtggtgggcacagagcaattctccttataaagttgacaattagcttcactcagaacattttaaataatgcacattaaaacaagtattcattttacaagttgttctgcaatctaaacatacaatagcttggaggacaatatttagaaaacaaaagccaatgtaaaaagacagattaaaacaactagaggccaggagcggtggctccgccctgtaatcctaacactttgggaggctgaggcagaagcatcgcttgagctcaggagttctagaccagcctgggcaatatagtgagacctcatctctatttaaaaaaaaaaaaaaacttaaaaattagctaggcatgttggcgcatacctgtagccccagctactcaggagattgaggtgggaggagttggagactgcagtgagctgtgattattatcccactgcactctacctggaccacagagcaagaacctgtcaaaaaaaaaaaaaaaaaccacacatacacagacacacacacacacacacacacaaaccaactacactagaacagtataggttttatatggcttgaatttcacagttttcttaactgcatcatcagtatcagaaatctgttcttggccaggtgcagtggctcacatctgtaatcctagcacttagggaggcaaaggtggaggatcacttgagcctaggaatttaagactagcctggacaacacagtgagacacctccccccaacccctgccttctctacaaaaaaaattttttttaattagctgtgtgtgatgccagcacctacagtcccagctactaaggaggctgaggtggatcacttgagcccaggagatggaggctgcggtcagctgtgatcccaccactgcactccagcatgggcaacagagcaagactctgtctcaaaaaaaaaaaaaaaatatatatatatatatatatatatatatgtatatttttacatatatatattttacatatatatttttacatatattatatatatataatctttaaatttaaattttaaaaaatctgttccttcagctggcttctttgctccaaattcaaagaaataccttctcttcctggtttcatttcaccttctggatccatccaatattatttaatatcaattaccctttaaaatcccaaacactggcccggcttggtggctcacacttgtaatcctagtactttgggaggccaaggtgggcagatcacttgaggtcaggagttcaagaccagcctggccaacatggtgaaaccctgtctcgacataaaagacagaacttagccaggcatggtggcgagtgcctgcagtctcagctactcaggaggctgaggcaggagaattgcttgaacctgggaggcagaggttgcagtgagccaagatcgtgccattgcgctccagccttgggggacaagtctaaaaaaaaatcccaaacactaatgtacctcattttcctaacctgaaacatcatgttatcatctgtgctgctgctgctgttctctttggaagatgatagagctcttcaagtttcaccagtcttttgcttctttacaggtctttctggagcaacctgctttttcctctttaactttttgtcaacatcactgtcagaaccgctgccagaagagcttgaagaagtaagttcctttgatttgggcattactctgctctgctgcactccagtagcctcccgcttgctcactggtaactctggtgtattacttcttcttcttcttttttttttttttttttgaaacagtctcactcttgtcacccaggctggagtacaatggcacaatctcagttcaatgcaacctccgcctcctgggttcaagtaattctcctgcctcagcctcccaagtagctgggattacatgcacccgccaccacacctggctaatttttgtacttttagtaaagacgggattttgtcatgttggccaggctggtcttgaactcctgacctcaggtgatttgcctgcttcggcctccaaaagcgctgggattacaggcgtgagccaccgtgcccagcctgctacttcttaaaagtttacagtaatagacaatgctgaggcaccctgggacagtaatgccaccgaataccaaactaggacatttttgagactgaaaggggacaagatctgtaaacctagattaccctagagaggtgacgttgcttgctttaatactttggttgccttattaatttttcaaaaattgcatcctatttttttggttttcaaaataagaaagacatacttgaataaagttatttcctcttcaaagtctttctagattccacttttccccatgctgagttaaatgcctttctctttggttctggggcagtggttctcaatgctagggggtggggtaaagctggaattttggtcctttctcccctaagggacatttggcaatgtttagagacattttgggatgcctaggtcagaaggaatgccaccggcatctagtgcgtagaggcctgggatacagctaaacatcctacattgcataggaaagcctacacagcaaagaatgatcaggccccaaaacttaatggcgccaaagttgagaacccctgctgtatggtatgtttgtcatagcacttcataaagacagctgtaggccgggcacggtgattcacacctgtaatcccagcattttgagaggccaaggtgggtggatcacctgaggtcgggagttcgagaccagcctgaccaacatggagaaaccacgtctctactaaaaatacaaaattagccgggtatagtggtgcatgcctgtaatcccagctactcgggaggctgaggcaggagaatcgcttgaacccgggaggcacaggttgcagtgagccaagatagcaccattgcactccagcctgagccacaagagcgaaactccgtctaaaacaaaaacaaaaacaaaaaaaggccaggagcggtggctcactcttgtaatcccaacactttggaaagccaaggcgggcagatcacctgaggttaggagttcaagaccagcctgaccaatatggagaaaccctgtctctactaaaaatactaaattagctgggcgtggtggcacatgcctgtaatcctagctactcgggaggctgaggcaggaggatggcttcaatccgggaggctgaggttgccgtgagccgatatcgcgccattgcactctagccggggcaacaaaagcaacactccgtatcaaaaaaaaaaaaaaaaaaaaaaaaatctgtaattgtcaactgattgacctacccagctagactgcaactttcataaagacaagtgatacatgcatgttgtagagtgtttggcttgcagttgaaacttaataaggattggaggaaagtgagaagacacatccagattcaaatttagggacctgtgggatcatgctgtttgggttttttttgagccatttcccacctccctttgggtactaatcagtcaactgataagcatttcattcattcaactatctatcttatctatcgatcattatcatctatttatttgtttttgagacagggtctctctttgtcgcccaggctggagtgcagtggcacagtcacggctcactgcagccttgaccttccgggcccaagtgattctcctgcctcagcctccagagtagctcggaccacaggcgctcgccaccatccccggctaatgcttttgtcttttgtaaaggcggggtcttgccatgttgcccaggctggtcttgaattcctgggctcaagcgatcctcccgccttggccttccaaagtgctgggattacaggagtaacccaccgggcccggctggaagcctaatttatacttttttaaagatcatgctggcttctctgggagaatatgtaaaacatctattatacacagaatctaaaatacttgccataaagtagttacactctcggatacctattgtcaaaagggaagtctcccagaaaatatgggggcgctgtagccgccgggtcagccgagtccactctctggtacttttagagacgtcggtcgcttccgggagagtccgcgtctcccgcaccttcctctctatcaaacgccgtctctgtggtagccggggccccgcccctcctcggactctacccagtactgaactaggggcagctgggctccagagtccctcgggtctcaggtcatggcggtcgcggggcccgcgcccggagctggcgccaggtaagcagggcggtcggggaggaggtttgggagcaggagttccgggctgtagggaatgggctttcctgccctccgtgcctcgtccgccgccctggcgcccccgtctcgcccccgtgacttctgagagaaagaggagctctcgaaggggcgtccgccctcccgccgctctaggccgctccgcaccggccgcggccccctccgttcttggccggacttgtgccatctcctgcggtgtgggaccctcaccctcgcaactggcattctttttttgaaaagaagaacctcaggtgcacaaaattgagttgatccttctcagttcttgacaccctgtgggccaatgcaaggctccttgtttattttatcacttcctctcttcgttcctattcccagacccctttcactccccttttcagacagccactctggtgtgttatataagtggctttacggtccaccttgggtaaatttgtgcaagtgttactttgaaatctatatagcggtttcgaattcttcaatataatatgctgtgatttttctttaaacctttttcctcaacattgtgtttttgagtccatccatgctagtcatcttgttttcacttctgagtgcttgcatgaggggtgctgtgtgcatagacttattcccctagtggtggatagatttttttctagtattaacacccccacaagccacactgtaacgaatattctggcagttgtctccttgtgcatattgttgcatttctctgggtatccaccccagagttgggtcctggtcatatctaattttgctggattgttctttggaatggtcacactagtttatacttcccgacgggcagtgcataaagcttcctgtttcccggtatccctccatcgttcagtggcggctggttttgtaatgtttatcagtctggggggtgtaaggtggtatcccatcgtgtacattttctttctttcttt

SEQ ID NO: 6408 - DNA, 6000 bp, Homo sapiens
ttttctttttttcttttttctttttttttttttttttttgagacatggtcccactctgtcacccaggctggagtgcagtggtgtgatcttggctcactgcaacctctgccttctgggcttaagcaatcttccacttcagcctccagagtagctgcgactacaggcatacaccactatgtccagctaattattggtatcttttgtagagatggggttttgccatgtcacccaggctggtctggaactcctggactcaagcaatctgcctgcctcagcctcccaaagtgctgggattataagcgtgagccactgtgcccagcccgaatgcaaatttttagtaagagcttctgattcaccatctggggtgaggtgtattttaaacatgccccctcttacacaaaggaaaatttgagaaacctatggcttagggatagattggcagagggtgtcttcatgatatttcttcacctccagaggctccagtggctcaggaatcttaggtggatttggctggggaagtttcaggatgacaggacggcagaagactgctggccagagagaagcatttactgtagttatgggacactttccatttgctctccaagtcaaatgaggcctttctaccatgcagatgtaaaacggtatcttttttttttttttttttgagttggagtctcgctctgtcgcccaggctggagtgcagtggcgcaatctcagctcactgtaacctctgcctcctgcgttcaagcgaatctcgtgccacagcctcccaagtggctgggatgcaggcgtgagccaccacacccagccaatttttgtatttctagctgagatgggatttcaccatgttggccaggctggtctcgaactcctgacctcaagtgatctgcctgcctcagccacccaaaatgttgggattataggcgtgagccaccgcgtctggcccaatggtaacttcttttttttttttttcttgagatgagtctcgctctttcgccaggctggagtgccatggcgcaatctcagctcactgcaacctccacctcccaggttcaagcaattcccctgcctcagcctcccaagtagctaggactacaggcacgtgtcaccacgctgggctaattttttgtattttagtagagacggggtttcaccatgttggccaggatggtctccatctcctcctgacctcatgatccgcctgcctcagcctcccaaagtgctgggattataggcttgagccacgatgcccggccggtaacttctttaacacaggtgcaggcttaaaagtcttggttccattccacagcatacagaggagaattgtttttgtttgtttgtttttctgtgtccttatatagaaacaagagtgtattttccattttttttaagaaaagatagacatgttggtgacactgaaactgtacctatgctttagatacattatggattaaacaaatttatgtgaaaacagctaaagaataatgggagaaatttgtggttgcgctttctaaggtaccagtcttaaattcattgtaccattatttattgtacctaagtgctaggcactgttttaggttcagaagataaaacagtgaaaaaatagataaaaatccctgccctcacaaaacagacattctagttagggagacagactaataaacacaataagtaagtaaaatgtatgctttatttgatagtaatgagtgctaaggggaaaattataaaggagggaagaaagacaggaggtgttggaggatggggataagtaagactacaggacaagaaaggactggaagccgggcgcagtggctcacacctgtaatcccagcactttgggggctgaggtgggcagatcgcaaggtcaggatgttcaagaccagcctgaccaacatggtgaaaccctgtctcttctaaaaatacaaaaattagccgggcatggtggtgcgcgcctataatcccagctactcaggaggctgaggcaggagaatcacttgaacccaggaggggcaggttgtggtgagctgagatcgcaccactgcgctctagcctgggcaacagagccagactccatctcaaaaaagaaaagaaaggacttgagagctgtgacacagaaaagtaactgctgtgcatctgagtttcttcatctttaaaataagaaataatagcatcttcctgaggatagctcaggcccctagactgcttttgtcacttttaagcttatgaggtttggggtactgacaaagattctctccttgaccaaactttacccacgctgttctgatctgtcttctcaataggctctgacttttggacttccatgactctgcattgtccaattttaggaagaatcctgctaagttagtttagccagaatctccccttactcccaatatttccttttagtaattttccatccactgaccctgatttttggctgtaaatccctacttttccttgtatttggaattgagcccgatctctccttcctactacaaaaccccattgtcataggcccttgtattacctatcttggcagtcccccttgaataaagatttgctttacaattttttttttttttttgagaaggagtctcgctctgtcgtccaggctggagggcaatggtgtgatcttggctcactgcaacctccacctcctgggttcaagcaattctcctgtctcagcctcccaagtagctgggattacaggtatccaccaccatgcccggctaattttttgtatttttagtagagataagatttcattatgttggccaggctggtttcgaacccctgacctcaagttatccgcccgccttggcctcccaaagtgctaggagtacaggtgtgagccaccgcctctggcctgctttacagttctttaacaaatgtcatgaagtattttttctttaacagtataattatttggcctctcagaacctcggtttcctcatctgtaaaatgaacagattgtccagactatttcacagggtttttgaaaatgtcagaggagatcattatgatatgtgaaaatattttaaattgcattatctattatgtaaatgtaagatggaaatttaaaggaaacacatacacagttttttcatgggttgagatctcttgctattggtcagcagagcctcaggaatgcaagtagacaatgaattagataactgcttatactgattccctgcattggcagggaaaaggccaatgcaaattatcaggatgtactgtgtggactaccaatcttatcttagatcagtgatacaacaatccaactaaatgctcctaagtggacacctcataaaataattattgtatggcatttgtcaaaattttaaatgctttacagctcctttgtttgttcttgttttgtctgtgggatttcatttctaggaaaataactaaatggactaagtttaaaaaaaaaaaacaccaatcatgtacattactaagggcagacagtccatcttctggatatttctgaagatgctcaataaacgttaatcaaagtaggtaatgattcccaacatgggctattgtgtcttccacgtttattttctacacttgatgttagccaaaaggccaaggagcaattccattttctttctttccttctttcttttctgagacaagtctcactccgtcgcccaggctggagtgcagtggcgccatctcagctcactgcaacctccatctcccgggttcaagcaattctctgcctcagcctcctgagtggctgggattacaggcgcccgccaccaagcccagctaatttttttgtatttttagtagagacggggtttcaccatcttggccaggctggtcttgaactcctgacctcgtgatccacccgcctcagcctcccaaagtgctgggattacaggtgtgagccaccgcgcctggccgtttattttaatatattcttcagctctgaatatttgctagtatcccagtaatagtttgttaaatcaataaacgtgttgacatacatgcatagcataatgtctggcacacagtaggtactccattgaatgaatgcatgaattattaccgtgtcaatttgcttgtctatttgcaaatgttaatagttaatttgatccctaaagtgtttgtgaacttaaaacacacacatacgcactttccctgacaacgcttatctgctaaccccttaattatgttcatctgagactggaccaaaacatgttgttttattcaatttaaataccaaattcaaatttattttgaatatagcttagaacacattcaatgtttgctaaaataataataataataataataataataataataataataccatgtacattcagttagccagacaattactccagcccaaataccctgctatgggacatgaaccggatgtctgcccggcacacattcatcaggtgacccctaaaacttcttctctaaggtccacactgtctaatagccaagttgaaatctttcctcgaaattttcctctctagtgtctcagtgccccaggtgtcatcaaggtgtcaaaggcgcttgggagtgcctgcaaaccgccccatccccggagacacagcctcattccccgccctcgcgcctaggcggccggtgggcgggcccagcgaagggccttgtggctgtttcctattggggcttggttgctatggtgtcactcgcctttaaactcgtgggtacatctttcggaaattaaaggagaattacttccagggctgcccatacttgccatggccgactcagtagtcactaacttcaacaaaaataaaactgttgcaatagtattctattaaagcttctttaactgcttaaacttgcggttttgacatggtacctatcctttcttcccttttcaaaagattcgctatagagtctttctctacatgccagtctccaaaatggcgcggacggcatcagaaggtcagaggtgagtcacgtgggtccccccggttccggcgcggttgaggccttcggtggtgaacgagtctccagcaccatgtctggtttgtctggcccaccagcccggcgcggcccttttccgttagcgttgctgcttttgttcctgctcggccccagattggtccttgccatctccttccatctgcccattaactctcgcaagtgcctccgtgaggagattcacaaggacctgctagtgactggcgcgtacgagatctccgaccagtctgggggcgctggcggcctgcgcagccacctcaaggtgcggcattgggcgacgtggggccgggagggaagacggcaggcttaggcgaggggaggctcgggttcgggggagtcgggccggcggaggcctgggagttgttctggcctcccgggagcgcaaaggacgtgcggtggagcccgccccctcaccccgctggttgcctgtcgcggggcggggcgggtcaccaacgcctgggaaccccaagaagggctgcgaggctttggcggatgtggtgacacctgagctggggcggttgtcaacgtcctataccagttttggtctcagatacattgaaccgtaatttggttctccaaataaatgttggggtgttgaatatttatacggattggcatcataagataccgcgatacctgcaggaaagtaaaggagacagagctaaccgtgattaataaaatgttatttattgagcatctgctgtgtcagttactgtgctactttgcatatattaccatttggttcatgcactaccctatgaagtaggtaggtactgttagccccattttacaaatgaggaaactgagactcagaggtaggataaactagtaagtgtcacagatggaatagattcttttttttttttcaaaattattattatactttaagttctagggtacatgcgcacaactttcaggtttgttacatatgtatacatgtgccgtgttggtgtgctgcacccattaactcgtcatttacattaggtatgtctcctaatgctatccctcccacctccccccacccca

SEQ ID NO: 6409 - DNA, 6000 bp, Homo sapiens
cagtggcacaatctcggctcactgcaacctctgccttccaggttcaagcgattcacctgcctcagcctcccgagtagctgggattacccacaaccacacccggctaatttttgtattttagtagagacagggtttcaccatattggccaggctggtctcaaactcctgactgcaagtgatctgcccacctcggcctcccaaagtgctgggattacaggcgtgagccactgcacctggccaattacaggtattacatttgtcactacttctaagttatagtagtttaagactcacccctagatcacatgtgatcatggtctttctatctaaatgctagtgtgatgaggttggacaacaattgggcaactctcctcctaataatcattcagtcactaaatgatgacacctcacactggtgacccagacatctatgctgcttcccagtacccccgacctatgattgttaatcaaaggccaccctcccagtgtactgatcttacacaaactaaacaaaaacagtcttcatgttgttgtctttagaaaacaaaatttaactttcccagatttgaaatgatcttattatttaatgtattagtaaaacagcacatattactatgttacaaatgtgttttaataactgcatttgaatgtaattagtactctttgtaataatatgtattttattttaagccttaaaaacattattctggtaaggaatccatggcataaaaaagttaacaactctgatctaaggtaatgtaaagtataaagccttcatttattccttcatttcgttattcagtcagcaagaatttactaagtacctactataatattaggtcaaactatctgcaatcgtcagtatttgactgtttctgacctaccaaaatggcagtttcatatagttcaatctaacatttgtcaggcccaatctgtaaacccactaataagagagacagtaatggagtaaaagaacaacctttaaaaagggaaagactgatacttgcagcagaagttaaaagttttatgaaatgggtaagaggcagcacaccgaaagcaaaaagtcagaagaagggaaagtaaccagagggaattatccatttaattatcctgaacaagaatgacccaaatatactttcaaatctctattagtttctatgacctaacagtgataagaaacgtttcctcaaagctttcttaatgcttcaacaatttttttcaaattacaagtaatcttgtatcttacaagaagcccaccataaattcaatattaaaaccagtaaaaataatgccttacatttgtatagcacttacaaagtaatttcacatacattatgctatttgagtctaaccagacccctacaaaatagcctgggagatattatctctatttttcaggttacatagcacacacatatccaaaaggactcagggagaatcttaaaaatgaattttacctttaaaccagattctctctttactctgtgtcaagcaataattaaaggaggcaaaagagcaaagtgatcaaaatccagaaaagctaagtccaaatctcaatgcatcacttactctctatgggtcactgaggaaatttcctgataagactgagtttaaaaaagtgaaaataataacaccttcagatttaaaaagatataagatatagatgagataaagcctttatcgtcatctgtagtagctatatttatcattatcattcttttttttttttttgagatggaggtttgctcttgttgcccgggctggagtgcaatggtgagatctcagctcactgcaacctccacctcccaggttcaagccattctcctgtctcagcctcccgagtagctgagattacagatacccaccatcacgcccagctaatttctgtttttttagtagagatggggtttcaccatgttggccaggctggtcttgaactcctgacctcaggtgatccgctcacctcggctacccaaagtgctgggattacaggcataagccaacacacctagctattattcattcttattgtgatgatccagtaatcatgaaattggactcttaactaaaagaactcaggaaagcagtgtgggtcaatggacacaacacaggctatagaactctaatatcctgcctcagagttactatggtaagttacctgacctctctatattaccaccattttatcattgtaaaggcttttgagaaaattagcaaacgtaactaatgttgtagagtttggacatgcttttcttcaatacttaaacatttcaaaatcttctgttgggagttctgagcaagagttcaccaagagctactacttgcattttacaacatctagagctgatgttcacttatgggcccagaaagagagccttatctcatttctcatagctgatagggactgagtaacaagaccttaaatgacattatggatagaagctaaaaccagagttagataatccccaaggaatgacactagataaaagagtacataagtaaaagagaagagtatatagtaaaacagtatataagagtatataagtgaaagagtacaaagcacaggttgaaagcaggcttgctattacttactcttgacttatgacctcctcatcctctgaggatgatgctgtttcctccaggtcccgggccatcacgattggcatttcctttagggtttgtcatgcagtcagcagacgggggcctcagagacctttcctagcagattcactggatcaagcaatttggatggcacagattcctgcaagaaatcaacttgattggatcaattgacctgaaacacaatgcagttgtctatttattggttattgctgataatctaagtaatgaaaatgactatattcctaaacagtgctcaacctctagaagtttactttccataacatatggaatgtgcctcaatatgtgcctcaatatgccacaaaaatcaagatttttttcaaacatacagtctgtgctctatatatttgaagagctgttactaagtttgagtttctcattatttactaaatcgaatatgcaccaaaaggatagactcctcactttcactcagtttgaggcaggtgactgattccctaaaacatatattccttgctagacaaacctggcctgggttaaaaataaataaataaaaactcaaggtttaagacccttgcaggccgggcagggtggctcacgcctgtaatcccagtactttgggaggccaaggcgggcggatcacctgaggtcgggagttcgagaccagcctgactaacatggagaaaccccgtctttactaaaaaaaaaaaaaaaaaatacaaaaaattagccgggtgtgctggctcatgcctgtaatcccagctactcgggaggctgagggaggagaatcgcttgaacccgggaggcggaggttgcggtgagccaagatcgcgccattgcactccagcctgggcaacaagagtgaactccgtctcaaaaaaaaaaaaacaacaaaaaacccctgccaacatttatttagactctatgacaagcacgctgacaagatgccatcatgtttccagtaaaataaattcaacaatgaaccgaaagatgaatatattctcttgaatcaaaggtccatataaataggtgggggaggggaggaatgcccttccactcttaaaaattattcttcctaaaaatcacaaagtttggtacgactctcaaatagacgatgaaattaggaaatttccaacactgcatttctaacttaaaatattttttctaaagtaaaaaagtacatgttcgttgtgtgtgtcagaagaagaaataggaactacaaataaaagaaacatgtttaaatgaccataatcccaaattactcagcgataattacttgctgtcaatccttcttaacttttccatgcattcataaatacgatgagactgtaaataagacaaaaaaaaaacagaccccgataatgatcaaagatcttcggcgcaataggcaatgtctaacaacttcaatggctttcttcaggggattctcaacgggatttcttgatctttcccaaaatgctgggaagccctttaagtttaaacaaacaaaacctccaaacgggaagggatgccaacctctcctaggctgcctgcagagcggggagaaacaggtctatcggaagaagagtagagatactcacctaaggagactcctctcccgaaaggaatctgcttctcagccccacccccagctcaccccaatcccacgtaggtccgcagatgctccccccgggaaggacgggacgaccccgcagccgcgattcaacgcggcgcgcccggaagccaacagctactcccgggctctgagcgggaagtcctgctgcaggcgccagcccggacccgggaatgctcctccctagggtagggaagcgcgcgggcgcaggcgtttacctgtctcatcttcccatggttcggggcgagcaggcgtggaccgcgctctgcgcctacctccctcctccttccccaggaaggctcagggcagccgccgacggctgcttccccggttactacaacaaccaacaagcaaccgcccgctcggagccactgcgcaggcgctcataacgctcagctgcggacgcgggcgaatgtcgtcaccgccgcgcagcgcgggcgcagagccctgccctcagctgaagggagtcttcttttttttttttttttccgctgtttttttctccgcccctaagaggttgactccaaacccggagttccgctaggtccaacaggagggcttacggcgtgagcggcgtacctggggagaggcttaggcagcggcaaccgctgattggcagtaaaggggttcactccccatctcctgctcgggcgaaaccgggacagccaatcagagagagtactgacggaaacggcccaatcctggagcagggctgagggagggggcggggacaaatggctcaggtggactccgggctggagctgtcctgggggagcttgtttgcggcagcggctgctgctgccactgctgtgctgggggcccggtcgccaggtaaggagaatatgggggagaagagggatgtaggtgtctgtgttgcttctgattgagaggatccggagagtctggaaaaatggaggtgggatggaaggaagataactggaaggcaaccttttggggggaaaaggtttcgagaggcgatgacaagggggagctaggaagatggagaaggcttggtgaattcaaggaacgaaggaatggatgagcgaatgagcagccactatgagcctagcactgtacaaagagccttcactttttgtcatataattcttacaatagcccttcgggttgatatttctatctccattttgcagatgaggaaaccgagactgaaaagtgtaaatgacttacccagggtcacacagctactaagtggtagggccaggataagaatccctttctcctgattaagttttaacagcacacctatgctgggctgggcttggctgggctgggccagggccaggacaaaatttggaaatagatgttgtatacactctaagaggcccttaagctttagggaaattaggttgagaaattggcagagcaattcagaagtgctcaggctctgtcctcatcagctatctgttgggatttctaacagataacacttctgtgaaatggaaggcatacttgtgcagaaaagtggagaggtgcatccatgcagcttttctaaaccccggaggagtctcctcttgagagagagtgagaaaataaagaggatgggtggatcttggcccaaatgataatggcctgtgatgtccagtagaccctcagtctctctgatcttcgacagagaccacctttgtgatccagctctccctgaagggctcatcaattcacccttccttctctagatctctttattgcttgtttggggcggggagttggcgggggggggcggcggtgtttcacactgtcttgggccattgctgactttaatatctgtccca

SEQ ID NO: 6410 - DNA, 6000 bp, Homo sapiens
gctggggtagggggagggagaaagagggggtcaggagtgtgaggtttgtgctgcctgctgctctgtgacggtaacgacatatctaagaggtctccaaacagccaagggcactgcagggacctcactcccttggtctcactcccctcctcctgtaattgagatgtccaccttctgcctcattccctcccaacctggacacctggcattgcagggctctcgatggagacagctgattttgccctgctcctcccgagcctcctccatcatgaagacataaacttggtgtgtcagacagataaatgagcactctctcactacccccctttcttctccttcctgtctccttttctctcttctcctctctgccctctccctccctcctcttcttcctccctataccccctctttctcctccctctgcctcctgcgtgctctgagatgaaagggccagttaatcttgctgccaccgcttccacagggctgggtactcgcttgtccacaggcacaggcgtccctaccaggactgcctaaacggtccctggaaaccatggctaattggtgaaagagcccattggttcattcttccacagcctggatactgcaaaagaggctctcccaagctaacccaagatttccaccctgatgcaccaatcacctgggagaccactgggtttacttgtcacccagacctgtagtttctaccttgacatgtgagcttggaggctgagcatacctgcccctaatcacacacaccccctccagcacgacaaacagcagagtgcctgagggcatttgattaatgtgctgcaggcttacaagtttatgcatattatatttattcattcaaccaatgtttactgagcacctactactatgtgccagacactgttataggcacttgggatatagcagtgaataaagcagttcaaatcctactctcacggagttgagaattcagtggggagagacagacagtaaacagacaaatatatacctgtcaagtggtgataaaagttgttgaagacaaagcagagtagacaggatgcagagtgcagagcacagcagttttaggtaaagggagatccttcaggtctgttactctgggggagtatgttacatacctgcttcctttatgcaactgacatgttccagaaaagttaaatatcgatgagatatgttttgcatattaaatcatatttcaaatcaaacatagtcaagccttgcaaattaacatgcagcaaatctctgaacctcagtttccccataaggaaaatgggtttgataattctcaccccagctagtttgtgctgttgagagagattcatgggatgaaattttaattttgtggatgactttgtagcctgcaaagcactttattacatcaaagtaatgttatcgttgttaaaatgaagacatagttagcaaagtaaattaccacctccaaatagaaactctgtgataatccaattttcatgtatttagttggctaaaatgaagattacacttgcatgttttccaaatctgggcaggcagggatggcatctttgtaagccttcccaggcttgggaaacactctgtggttatccctggctatgatctgctgtcagcgctaaagagcatcctgacccaagcctatcttcaccttgatctatctgaaataagagcataagaatgaaagaaaaccaccaccagccttcttaggtgcagctccttgcatcttggaatagtctccatccaaaacatttggggcattataggcctgacagacatggaggcggggttactcactcaaggcagaagctgcttgctacatggatttctctccttgtaatacaacactctgaagcaaagtggaataatttccacttgaaagggaattcattttattcaaataacaccaccaaatagcaagattgagggcgcatatctccaggaaagggctggacagcaatgagatgcttatctgtgcccctgtccccatgggactgcctgcaggtacagttatggcttaactataggaatctacagcaagagcaatggagagtgtggtttataaatcatttctgtcactgtttatggaggatgagattagagtcagggtgggtggtggcaggttgcaagatcaatggcaaatgtgtcctcagcagatatttctctttgagacagagtcttgatctgtcacccaggctggagtgcaatggcatggtcttgggtcacagcaacctctgcctcctgggttcaagcgattctcctgtctcagcctcttgagtagctgggattacaggcactggccaccacgcctggctaatttttatatttttagtagggacggggtttccccatgttggccaggatggtttcggactcctgacctcaggtgatctgcctgcctcagcctcccaaagtgctgggattacaggtgtgagccaatgcatctggccctcaccagacatttcaaagacctcagaatatagctcttcctttcacagacagaccagtagcaattcatcgatcaagagacttttactcagtgtcaactctgggcaaatcatcctattaggaaatatggaagaaaccccaaaacatttccaacataggcaaggagctctcattttagttggaaagtgaagagagtcctgtggttgaaaagaggagccctaaagatgtgggagacgctaaggtgcttaaattacatgatcccatttgatcatcatcaccacaaataacagcagcattcttattcccattttaccgatgagaatactgagagcagagaggttaaatgactagcagctcatggtcacacagctggtaaatggcaataaaatgctcattcttagtctgcttgactctcatagggccagaatccaagtgaagttttcatattgattttgcctccctattgattttgtcagggataagcataagttttagaaaaacaaaatgacatttgccgtgcttcccttcactccattccttaaggggagctgaggaaccactagctttagatctgaagctgtaatgtccttttctgttgataaacgatatttctaaataaataatcgtccttgtccatttgtgtttccacgaccagatctccttttcctgactgaatactcccttcccccactaacatcttcccacgttcgcttagcttctttctctctttccctttcctcatacacacagattcagacacacaccttcccacctcacacccatatgcaaaataaaattagaaataccacccgactcacaaggtatttggggaatggagatcttcagtcagtatacccaaacccaagcaccccagccagcctccctccctgccaagcccatgtgagaggcagacagagcttgtgaaaaggggcccagacggccacgattatgagacaaagctgctctgaagggaaaagggccatgtgtgcctccccatgtctgtcctgtggccactggaactcacaaggctaccagctgctcacggccaccatgtggcatatactgttctttcacttacatgtcagatccttttagaatgtgaaaaggtttcctggcctcttttttattttgatgtatgctgataaattacagaggaaacagtgtgtggttattcaagaatagaggctgagctgatcagcatatggccctcatttcaagggattgctcttgttttaatcagccagttgagaaagcaataaatgtttatttattaagtatgccatcaccgagaggagaggaacagggcaggtaggtgagctgcgacacccaggaaattgaggatggtgatggcaccaatattcctgcagtgtttgatgtttttaaggctctgctccccccaccccccactgtttgatacacattggtgtcactaccctcttggcgcatcacagtacccaccttagaatagcggagccctggaaggggaaggaaatagaaataagaaggtgggggtgaggctcaaagaagaagctccaagttcaagctctgtgtctggataaactcccattgtctttccttctctcaaatcagagctgcccgtgggtcccagggtgatgctgggctgtgtagaggctgagtgcaggagcattaatgctagaaccaggttcaagtccaggctctgtcacttaatggctgtatgaccttagacatgagacttagcttctctgagcttcaacctcctcatctccagaatggggctcagccagcttcacagatcaggctgagaggattaaggaagcatcttatgctaaaggcttagcacaatgcctgctacctagtaggggcccgataagtagtgtctaattatgatctaatcaagcagtgcttgccctgggcaggccctgtttaagggttttacatagattgtcatttaaccctcatatctctatttcacagatgaggaaactggaatctaagatcacactggaatttacagacgaagaaactggaatctgagatctcacagtagtgaatggtgaatattcaaacccaggtagacaggctccagagtcccaactcccaaccctctgtacacagcccttccgaggagatgacgctgatcttcatgggtgttgccctggcaagctgacctctcaagcccccagggttccttcagtccgagtggagagcagggaaggtcgtgggacctagccgagagggaagggcaggatgatggctggagaatccacatcagggctgaatcccaatctcccagctggaacgggcgctgaaaccaggcagggcgccccagcccgctcaaggggaatcgagaggggaggagggggcaagtccacgatgctgagactggcggccagagcaccgcccccaggagcggagggaggggtggcggggctggggggtgcccagctgccatccccgccgcttcctggcccttactcgctggcgcccaagtgggaagccagcagctgcccgctccctcctccccacatccccgctacttgcccagttcccgaagcgaagcgcaggctgcgagccagccgggccgagtccacaactttgcagcctcgggcagggcgagagccggcgtccggggctcctcttgtcggcgaccagagctcggtgagttgatttcctcacccctctgcgacggcggcagtgcggcggcggcggcgcggggggcggcttcccgtgcgtccgggaggcagtggccgagaagcccgcggctgccggcgctgccggtctttccaaggctccggctgtgccgccctctgccgcgggcgaggcgggcgccagggctgaacggacagctccctacaccccggggccccacgggcggtctctgctgtcccttctcccgcgcagggccagggctgaggctgcctgccgagcgcccctcactcccctagcccctgtccttcgccgccttcccagcgctgcggcgcatctggctgctcccgcgcccccctggcgaccggcgccgggaaggcacttgcttcgccggagccccaggccgagggctctctggggtgggcagcaccgccgcagcccccggcggcgcaggactgggggcgtgcccagcccccggcgaccaccctcaggcgtgcactgcgctgcgccccagcggtagggagaggcccacgctctccgcggaggctgcgggttcccggggggcgctgggacctgcaaaggggattccaaggtgaccagtcgacccgtgcggacgggacagcctggacggaggccccgtggcatccacccatcctaggtgcaaccgccttcccagaacttttctcgcgcctccggctggccgattccttagcccctggaaaagttctctcgggcgcacggaatcctatttctcggtggcttccgaagctggccaggaaccccggctgtgaggcgtggggtgggatggggacgtggtgagggctgagcacggcggcggggtcgatcccaggaaaggctggccaagcatccactcgtgcgcccagggcgggcttgtcggcatggaaaggatttcggcgccatgagggttgtttg

SEQ ID NO: 6411 - DNA, 6000 bp, Homo sapiens
tgcctccacactctggaggcaagcttcttgggttcaaatttcatcacagtcatttgctaactgtgtggccctgggcaagtaacttaatgggcctctggagccagactacctggttcaaattccagttctgcctcttagtaactgaaagatcttgggcaagttactgaatgttgcctgttttttgtgcctcagcttcctcctctatacaatggggacagtaataatagtacctccctcctagggttgctgaggtttaaatggaatcaggcacacaaaagcactcagcacagagcttttcctcagtacaggctgctttggttatgacctttgccaaaggctgtgttaagccaagggagggaagggtcaaacaaggactagccacagggcccttgtttctgcttttctgaagcctccgaggctgatgctggcccgttctgtttgctttgccagttcaaataaaataagaactgagaagggccagctgttcccctgccagttaccaggggcatgtggattttgtgaccctgctttaaacatggttgccaaggggctttggagagcagtgttgggagaagtgtcagtcccaagggaaaaaacaacccccttcctcccaccctcaccctgtgtttccggggtggagatgccatgcagggatgggggttctaggagccgggggatgctggttgctgggggtgaggtcctctctgacagagcaacccttccatcccaggccagctttgcacccgggcttatccgccccagtccaccccactccagcactcatcctggaggaggcacatctcttaccaattcgaactctccatgagcaggagcttcggaaataggaatagaggatgggctgaggagagagaggatgaaggcgcgtgttaacccatgctgggtgggctccagcttgggaggagtcaaccatttcttcctgtcctgccaggcctcctctctcaggcctgcatctgtgcaaatcagggcagactccaagctctctgagaggctcatgaggtcccttggctccaaaattatgctggtttgagctcctgaggtccaagaggcccccaaaggggcagctagcctgagagtgccttccataccttgccagactctgtcatggtatcgtggtgaccctcagcctcccaggaaatgtcccctctggcacagcttctgagcagggaaaggaaacctaaaggggtggatttcaggagccaatggggaagctgggctacccaggcattgggggaactttgactctggtcagaaagggcatttctggccaggcacagtggctcacgcctgtaatcccagcacttcgggagccaaggtgggtggatcatttgaggtgaggagtttgagaccagcctggccaacatggtgaaaccctgtctctactgaaaatacaaaaaaaaatcagccaggtgtggtagtgggtgcctgtaatctcagctactcaggaggttgaggtaagagaatagcttgaacctgagaggtggaggtcacagtgggccgagatcgcaccactgcactccagagcgagactgcgtctcaaaaaaaaaaaaaaaaaaaaggcatttttttccaactcgcaggaagtttcttacgctcctgctggggccaggtttggtgtccccccaacagagcgtggcctggttttgatgcagtattttgagtggtggagcgggctgggagctggcatctggagtctggacctggtgcaggaaccagctctgcatgaccttggacaaacctctgcctttttaaatcttcggctccctcatttgtaaaacaaaggttgccctaaaatgatggcagggcatcctctagcaatgcagcaagacaaggaattctaattttttgacgctttggtacatatctccttcaaccccacctcccagcagtcctccgggctctcggctgtccccataaaaacagctggcagatatgctcactcaccccaaaggtgaggtcaaaagctggcagctcactggggccctatctggccctcagaatttctgtttgctcaacacagtagtttaaaatgtttcaagtagttgccaatgtttaaaaatcaggacatttcattctagtatggtgggtcatgcctgtaatcccagcactttgggaggctgaggccagcagatcacctgaggtcaggagttcgagaccagcctggccaacatggcgaaacaacatggctaaacaaaaattagccaggtgtggtggtgtgcatctgtaatcacacctacttgggaggctgaggtatgagaattgcttgaacccaggaggcggaggatacagtgagccaagatcgtgtcactgccctccagcctgggggacagagcaagactccatctcaaaataaataaataataaaataaaataaaaataaaaatcatgatattttatatacaacacctgtttgttttttttctttaaaaaaatctggagacagatttgggttcctaaatagcagcaattgatgggaacagactaatggcccccatcaaccagcgtatgcgctctcaggtctgccatggcccatatctggcccacttttctcatttttgttacctttgggcccttgggggcagctgggtgtgcgatctctactccaaggtttaaggggctcaaagttaatttctctggtacttcttcgggagccagcatttcaaagtggaacccaggaaagactcgccagtgattagcactcatgaatcttcccaccaaaacatgtgtatccctatggataggggagaacttgaaagaacttctcagatgccctgtttactacccctctgactatagacatttcaccaaagctccctctcccctctgccacccctagcatattaagctgctctctgaacttgctattgccatccctgtactaccaactcagtctgctagatggcaagggtgtaagtgggaacctaggcccttccaagatggttcccaagcccagcagtcccagcctgtcctgaaggtaccttttgtggagaaagtaaagatggtcctggcacagaaagcaggtgatgggcagaaagtgtctttcgaagaggaggaattgggtggccacaactggatcttccttatttggagatgcaactccctttccttacctagccaggctacagggactcctggtgccaagggacagggactgctggtgaccactagagtgtggcagacattaattagcttagaatccctgaagaaatgccttacctaatggctaaatgcctttggattacacctttggatctgtactacgagtgaccagaagcatggtaaatgctgctgccctccgtcacgacccacaagcaggaaacctgaaatctcttaggcaatttctgccttctcttaccagtgataactatgtaaaccatgccccgttcctttctgcacttgtagaactaaactttaagcccaagtatccatctcatcagcactcctagaagacctgtgtttccaattcaaatatgcattctgattactttagcagattttatttttaaaccatgtcttacacatgatttgagaaaaagactcctaaaatcccatttggaagagggaggactatacattattaacgtgacgcaaagtcccatctaacgtgccaccttccttagtgccacaaaagtggttctcaaacttcatggcacgttaagaaccatctagaccgcttataaaaacatgcagattctcgagcccgttccaccagagatgaacagagtggctctggagcaggccccgggaagaacatgtgaaagccgtgaagctccccaggtgattgtcatgactgcctctcctcgctcggggccttttttttttttttttgagccggagtcccgctctttcgcccaggctggagtgcagtggcgcgatctcggctcactgcaagctccgcctcctgggttcacgctattctcctgcctcagcctcccgagtagctgggactacaggcgcccgctaccacgcctggctaatttttttgtattttaatagagacagggtttcatcgtgttagccaggatggtctctatctcctgaccttgtgatccgcccgcctcggcctcccaaagtgctgggattacaggcgtgagccaccgcgcccggcccggggactcttaaaatacaaacattactggaaggtcacctcctgctagggccaagagaagagcatgaagggctgcgagaaattgggaggcttggggcgacgtttggaagccttagtggagggaggggtctgttatggggagcagggagggcggagcagaagtgaagcgcgaccggacagcgactccaccctgctacgcactccctaccaggaccgcctcctctggcccaaccctcccggaacttcgagccccagcgggcagcgcgcagcacgcaggcgcagagcgtgcccggcgcaaagcactgcatgccgggagtcgttgtcggcctgggcgggcggtgcagctcacttctgaccccgccccccagggtctccaggtgtctaaccagcttccctccacccgggtgcgcgtcacagaccttccccgcctgcatctggcacttcgcgcgaccccctcctccaggccgagaaacttcgcgcctgggacctgccgacgactaaggctcagtgagactcgacgaatcaggcccgtgtctttcgtccgggtaaagcgaggggctggactagaaagatccttccggtcgcctctggctcgcccagctctcccgccacgccccgtacctgggggctgctgggagttgcagttccctgagcccgacccctcctgcccagtcccccccgccccgggccggccggccctcccggtcccgacatgctctgcgcctcctgccgcctcctagcggcccgggccgcgaccacgctgcccgccccgccccgagcccggggccccgcgctccgctgcagtgaagggcgttgcatttcccggggtaccccgagctgccctcttgtgactccttggcggggcggctggtcagacaaagtgtgcctccgggccggagggcgacccagaggagggggaagatgccgccggccacgggcggaggcctggcagagtccgagctgcgtccccggaggggccgctgtggcccccaggctgctagggccgcaggccgggacgtggccgctgaggctgtggcgcgaagccccaaacggcctgcttggggctcacggcgcttcgaggcggtcggctggtgggccctgctggccttggtgacgctgctgtccttcgccacccgcttccaccgcttggacgagccgccgcacatctggtgagtgatgggagggactcggcgggcaccatggcaaccgcgacgggacgccgccctctgattggcccgagggtacggagggggcgggatctataggaggagggccacggtggaggggaacttgaggtatcgggtgggttggcctctggcgaggtgcattctctgggagggggatcgttttgctctggtggtggggcagtgggattcttagtatctgaggaagcagccctcatgtcttccaggttatgctacagtgcatcacctggcttgcaaattgtggcttttaaaggtgctttcaactttccaaagagaattgcaaatttttgggtacagaattttctaaggcctgagttcctatgtctgcaggattttcaggcatcaacagaggagaaaatacctaactgtgtacctttatcctatagggcaaggacagtttgggtgttcaggtatggtgaccaaaggattttatgaggcagaactcttcttgtgagaagagatttattttcttaaaggttttagcttgtactatccagatactgggtgtcagaaatggaattctttaagcaaaaagcaggcaagaaaacagactgtcagggttgctttatttagaaattaataaattagcttgttattgtgtcgtgactgctggcagaagatgagactcctgggttagagacaaaggactttattacaggaaataggatg

SEQ ID NO: 6412 - DNA, 6000 bp, Homo sapiens
aaggttacaccactgcactccagcctgggtgacagagcgagaccctgtctcaaaaaaaacaaaaacaaagacaaaaaacagaaaaaacgtattatctgaatagcttgttaagttgtttcacctttctgggccccagttttctataaaatgggaattagtgaaataatacatataagaggccccaaacacagtaagctctcagcaaagcatagctattagcagaatttaagaaagtaaacgctcagttaggactgtatgtttaataatttaaaaagtttcgttatatcttcttgctagtaaaaggactcaggtattaacaagcatagttttcttatttctaaaccatatgacttatggaattttagggttataaggcctgttgaagagtcatctagggaagagattccagggcctacccagccctaatgaatcaaaatctctggaggatgaagcctaggaatgtatctttttcaaaaaatctcatttgattctgaagacgacccaagtttggaaaccactgaggtggtacatttctgggcatgggtgtgctgagcaaaaccatggttatgccaagaactgtccattcttggagggttattggggtggggtactaaaggagaggttacacgtgagattgtttgtgatgctttgtaaattgcaaagcactacaaatggagggtactgttatgcaaaggagaataatcatgaactgttggtgctggagattttagaaaattgatgctcagagtggttaatgtagcttgtttcaaagttaggcagcaaagcaggcaaaatacatatggtgttatataagtgccaaatgggtgtcagagacacaaaatgtcatgagaacttgggatgggggctactgtgggctgggaatgttacaaaagacttcttggggagatgcaaatgaggaactggtcttgaaggatgattaagattcatattagtaatacagaggatgggggaactgagcgaagacatagagagaagaacgcaccaggcaggtttgcgaaggtgttagacctggtggtaggctggagcacaaaattcatgtggaggagtggtaggggagagaacttgtggagggccctaaattctaaactagggagtggagactatcttggtaagcagaagggatccaaagaaggtttttgaatagtacataagtaggtggaaagtgagagcataaaagcagggcccttgaatccaaagggtccattgagacaggctaaaagcgggaggccactgtggtgttctaggcatgaggccataaggtctgaaaagtgggaatgaagaaagccagacggtgtaagtgccacaggagcaatggacagttcttggaatatttatggggatcaaaggagaaagaggaggcaaccaccgtgagcctgaggaactggaattatgatgacaccattgacagaagtgggaggccaggctggaggaaaaaaaggttggtttgagacagatggtggcactgttaacagtgctctgtagggaaactttggacacaactcaccttcatgtcctcaaagtttgttatccccatctgagggaggtttgagcagttgacgtgaatgagttttcggccactgatgaagtttgtgataaaacactcctgtcaatacaacaaggacatcacttaaaaaatgtactgcaaatagaaggaagaaagggagggaagggggaggaagggaagaagtcgtgtttgttctaccctgagaaaaaaatattattttgttttttcttttttagagacagggtctcactctgtcatccaggcgggagtgcagtgctgcagtcatagatcactgcagcctcgaactcctggactcaagcagtcctcctgccccagcctcctgagtagcttaaatttactttctatcccaataacggcacaatttttccatgtaagctctttattaaattttacactgctctttaactgtttttttgggcatggtacaaccagtgcttcttcatgtctcaattacatttgtaagtatagtaggtacaaaaggtttcagatcttgtattgttttgtggtagccttaaacctagttggcatcagtgaaacaagaggtttacactgactttttactaaaactagttttggttaactggctaacttgaattaatacacttaagtgctcatgatacaggtgacatatttggggcagacactttaaaaagtaatagcacaagttcaaagcaagggagctgccactaaaataacttgacaaagtaccaaaaagcctaccttgaacaaagtctacttaaaaatacagttttctatgaaaggaggtctaaggccgggcacggtggctcacgcctgtaatcccagcactttgggaggctgaggctggcggatcacgaggtcaggagatggagaccatcctggctaacacagtgaaaccccgtctctactaaaaatacaaaaaattagccgcgcatggtggcgggcgcctgtagtcccagtcccagctactcaggaggttgaggcaggagaatggcgtgaacctggggaaggtggagcttgcagtgagccgagatcgtgccactgcactccaaccttggcaagagcgagattgtgtctcaaaaaaaaaaaaagaaaggaggtctatatactcttcttggtcttttattcaaggattgcagagaagtgtaatcactggaagaggaaaaacaaaccgatgtgaccctcccttcctctcccaaaatacaaatatacatcagtggcaaggccaaaattaaaatccaagttacctctaccacagtctaggactttttgatactccttccggtaaagaggtaagagctcaggccaagttagaaggaataagaagtagacggatgacagcatgtgatttcaaaacatcttatttttgtataccttgtattgagggaagcctagctggctaatccactctgcaacttcctctggatcccaattaagatgctcaaattgtaactcagtccctttttctggctgggtttcgtcatcttcagagacccgttccttcaactcttgggacaaatctacaacttccttttcatgaacgaactcacttaattctgtctgagactctgagggatctgagtatgagcattcttcactgacattaagcaatttttggagtggttgcaaaaactcataatgtgtaccaattgattcttcactttctctgagagatcctaatgcgtaatattcttttctaaatttgtcacttagtgacaactttcctcttttaggctcacggtgctctagctcatcgtttcctacagaatacttagactttattggttctggcctgtcttccttggaaaattctacatgtgtctcccttggtttggtttcatctggtaactctagaattttctcagttggctttgtttgtgttttctcttcaacttgtgggttgatctcctgtggtagcactggaccagtctcctctggtggctgtggattttttttctcatttgactttcttatctcttctggactttctggtttcatcatttctgattgttctagaattgtttcctcatttgtttttcttgattcttcctcaggaaactctaatttgatctcttctagtggctcaggaacgttctcatcagtagactttcttggcttgtggtctggaaagtctggtttagtccgctcaggtagttctgtccctttctcctcagttgcctttctttgcatctcctctggaacctctggttgagtctcttctggaggctctagacctgcctcctcactagactttcttggttccttctccagaaattccagtctagcctgctcgggtggctctgtccttttcttctcagttgactctctttgtgtctcctctggagtctctggtttggtcatctttggtggctgaagatctgtctcttcaagtgattctcctagtttctcacttggaaaatcttgtttggtctgctctggaggctctagacctgtctcttcatgttgcactctaagtgattcctctggaacccccggttcagtctcctcctctagtaattctaaatttctctctctgactgtggcccccgaaacctcagacatggtttccgttggtggcactggatctggatctgtttccatagctgactctaggaacacatcctctgtaacatttggtttagcctcctctggtggctctaggtctgactctttatgcgtttcatccataggggcctccaaatctttgaaaaactctcccatctctctggatgtttccgactttacctcttggtgtatccctggttcagtttcgcttggtacgtctctcttggactccttggcaattccttcctgggacgtcccgccaggtttcagctgcacgttcttagcactgtctggctccccctctttgaagtcctcttcctcggtctctggctgtggctcttggtaaatctctgctggtagcttcgagtctgcctttgccatggtgtctggttcggcattttcatacaatttatgaagtccaggcagttcaggcctctcaggctccagctctccatcttcatctgggccggaatcataatcctccgggacttcagccatttgcagcttagcagacgcgccgcggcttcctagcaaccccaacttccgatagcgtctctatggataccacgatttccggcagtgtcttcctgactcttccccaggttttgtttgttctttcaagccctgactttaaaaatcgtctgtcacaagcacgcagtaaccctccctgcggcctcatcgccagcctcagcgggccagagctcctgtggccgcccctgggtcagctagcttttcaagcggccgccgcgccgcttcttccggcctgcaggctgcgctcggctgtgctcggcgctcgctcggccttcggctgtttccggagccactcgcggctggcagcggagagctccgtgcgcgggctgcagatgtctgacctgcaggcggctgaggggccgggctcctggagccccacagcccgcccagggtcggctggcggcgtcggggactgccagggagtggaggggagccaggcggccgcctcaggtacgcaaggccggggcgctggcgggtgggtgccgcccggcctcagggccccgcaccacggcgcgagcctccgccgcgctctgtcctgggcttccccgcggagcggacccacctcggcagccccttcgcgcgcggggccccttccccgccgctgccaccacccgggccctgggctcgaggttattttctactcactcctgtttcgaaatgccttgattcctgccccgcttcctttctgagatctgcccaaatggtagtgacagggtggctctgcccctggcgcctcttcagcttcagtttcagcttcagccggggttcgggtcccacctccgtctgctaatcacatctagactgccgacccgaaccctactggcctcgccgccccctgcttctggctccccaccctatccccatctcagtcccctgccccagccttaccacgcgcctctcggcccccacccgggttggcagccttgccttcctctgccagaagcccactgcgccctagccttcctgcacataggccccctggccttgctgccatcctctccatcgcttagagtgggaaaaatgaaaagcagagttgaaataggtagtgtctggggtcttttgcttgaacacagtagccaaagcaagagcaggaattaaaaatttggcctacctccctcattctcaagaccctcatcctcttcttgtccaggacgacgtctccatttctactaacgcgagttcctccgtgtgtattatttcagtgtccaaagacaaaagagtccatccatcacactttcttctttcagcctcctgaacaccacacacgatgcaactgaaaggatgctcttttgaaatacgaaagggtagaggggagagaacttgtcttatttaagtagcaaatataaattaattttctaggtctgaaattaaaatagaca

SEQ ID NO: 6413 - DNA, 6000 bp, Homo sapiens
cctttttctattaagtcccccatttccctttgggaaatcatctcttctcatttaacgtactcttcttaagagggtgtgtcttggtaagcacctcccatcatgaaaggtgaaggacactttttccttttgtttgcaccttttaggaccagtgcgacgtaaactcaaacaagcagatattctctccagtatttgactcttgaccaagtgacccaacaatggaaggggtagttagaagtcatttattttggcaggggtgttgctaagagaaaaaattcaaagaaattaaatttagaccgggcacagtggctcgcgcctgtaatcctagcactttaggaggcctaggtgggtggatcgcctgaaatcaggagttcaagaccagcctggccaatgtggtgaaaccctgtctctattaaaaatacaaaaattagccaggtgtggcggcgggagcctgtaatcccagctacttgggaggctaaggcagaagaatcacttgaacccaagaggcagaggttgcagtgagccgacatcgtgccattgcgcttcagcctgggcaacaggagcgaaactccatcctaaaaaaaaaaaaaaaagaaaagaaaagaaaagaaaagaaaaaaagaaataaattaaatttaacagaatttaactgagcaaataatgatcctcaaattgggcagcccccatccagaatcagaaggttcagagagattccagcactgtcacatggtgagacaggatttatgaatagaaaaaggaaagcaacatacagaaaacagaagtgagacacagaaacagttggaatggttatagcttggcatttgccttatttgaacactgaacagttggctgcctgttgagtggttgaagtatggcttctgtgattgcctgaggcttggctacttgtttgggttttttgtttgtttgtttttgtttttgagacggagttttgctcttattgcccaggctggagtgcaatggcgcgatctcggctcactgcaacctccacctcgcgggttcaagcgattctcctgcctcagcctcccgcccgccaccacgctggataatatttttgtatttttagtagagatgggggtttcaccatgttcgccagtctggtctcgagctcctgacctcaggtgatccgaccccctcggcctcccaaagtgctgggattataggtgtgagccactgcacccgccagcctccttctttaacatccattctaagctattgctatttgtccttttcactcccgggttctatctccttgtagtgaacactgttagggttgttcctcccttctctgctatgattcttccttgtctataactgattcctcccctccagcagtttgaccttgtgctctggccattgcgattggtcagatttacccatcctcaccataagctaggccaatcagatttctttttcctgagagtgtagaagtttgacctcatgaatatgaaagttgtaggttgttgagagctaagcaccagaagtggtttggttaggaggaaggaaggtctataattttctgctgctgaggtttaggattttcctgagtgccaacacttccctgtcttcaggagagttccaataaatttacctttcttgaataagttttttaaaattggcttatgttatctgcaaccaaagaacctcaattaacacagtctccatgtgatagaaggttccttggagacaaggccaaaatttttttttttttttttttttgagacagagtctctctctgtcacccaggctaaagtgcagtggcacaatctcggctcactgtaacctctgcctcccaagttcaagcaagtcttgtgcctcagcctccaagtagctgagattacaggcatgtgccactacgcccggctaatttttgtattttctggagagacggggtttcaccatgttggtcaggctggtctcgaactcctggcctcacgtgatccatctacctcggcctcccaaagtgctgagattacaagtgtgagccaccatgtccagccaaggccaaattttaattcatttatccatttatgcattcatcaaacatttattgagcatttgctatgtgacagacacgtggtaggtactgggaacccaaagataaattagacaatcccctcaactcaccaagcttgttgcctaattgtaagtataaatgtattcaatcaatcattcattcacttaataagtacttcatttatccaatgaataattaccaacactcatttaatattatgtaacaggtcttggcactaaatgcttttgttaattctccaactctatgaggtatatcccattttacagaagaagtacctgagtcatagagaggttaggcagctttgcctaaatcataaggattctaggtgctgaaaccggtcttcaattatggtatatctgactgcagagctcttgcttctaagcattgtgtaacctccctctcaaagaatctcaaagcagtgtgatacatgcttacacaggtgtgtataaagctcacagaggagaaagcaactaattttgtggggaggttggggttcaaaacaggcttcacagttgaagtggtttgagcaatcttgaaggaagagaagggttgtcttcctggtgcctagcacagaactttgcatatgaacactgtaaaatgatgattaagcggcttatgtttctggaaggagttgttttcctgtttacatggagtctggggtgtttcctactgcctactgcagcatcatttttgtgatttagcaatggcatgtgaagtaatcagatcatctgtatatcactgatgctcacagaagcctgtaaggtaagtagtacaggtacacactttgtaagatgagtgaggaaaccagggctgagtttgcattacttgtccaagactatacatagtgagtaagtggcggaacaagacaaggggccagccccctgaggagggatcggctaacaggactcctcaaatctagccagactcctttactcctcttagcctgcaggtgaggctttgatctttctagactcgacacccgagtttctgaaggtttcctcagaacaccctccccatccttctcagttccagctctccaagtcccgctcatcttccaagatctgtctcattgcacatcttcctcgcaagccttctccagagtcattcagctcactccctaagcttcagttaaatcccttagccctgcttccatccagattcctgccctgaaaactttctacctggttagactcatcactgccattcagcttccctcatcagaactcctgttgcctaatctctccagccttaggttggtctttaactattgttttctttctatgtgtatatcttgtctctcactgaaatgtaagctccatgaagcacagccacatgtttcctttttagccttatacatacagatgtatattcactttgggatcaatagtgtttgtcaactcaaataggatgtgtgggatgaatgatcccaccttctgttagattattcagctcctaagtcatgcaaaaccaataccttgtggacctcctttctaaagctcctgcagggtggggaaagaatgcacggattctcataggtgcatttagcaattactagtaaccaacacttaatgaatgcttactaattgctaggtcctgtacaaaatacattacatacataaacttattcaatcttcacgacaactattattgtccccactgaacagatgaagacacatagaggtcactcagctagtaagtggcgcagctaggatttaaaacccagaccgactccagagtccatactctcaattatgatactaaattctttatggataacagaaagtctctaattgtaatgtagatcaatttccttgctttctaaccccatgggaagatggaactaaaagggtgagaaaataatatttattatactcctactataagcctagtattataagaggtgcataatgggttaatgatataattcttgctgtaagtctatgaagcaggaagtattaactccattttaaagaatttggcttctaaagtggttaaacacagtgctcaagttttagcttccagttattggcagagttggaattagaccaggttttctaactttgaaggaaagacttaatttaaaggagactgtatagaaaaccctgccaagggcaaatgtgaagggcacgtgaaaaggcatctgaattattacttataataattcagaaatagtgaatgtgtggcgcatattgaagaatgatgagagattgtcaaaaaatctattctataaacactcacagaggaatcagctaattaaataagcgagctgcctgtcttgggctaggacataaactccaaaacttcccacgaggcaagggcaaagagggcgccacctgtcctggagaacctgggaacccgctctagagacttcggctcagccccttttatttcctcacactctaattggctacttttccctgggctccgcctcctcctcggtctggaccattaaacaggcaagccctaccccggacctggatgcggcctccaatcaggtgccaggccctggagtccctctagagaagccccctctccaccggcgaggcgctttgctctcgtccgtgattggccaggcagcagcatggggtccgcctccttctcttccagattggtcagcggtcctcaggaccacatccctctcggcaggtccccgccgctttttcccttcgctgcgtggccttggccgagaccggtcctctgcggagagggccccgccctctgtgaaggcccgcccgggaattggcggcggcgctgcagccatttccggtttcggggaggtgggtggggtgcggagcgggacttggagcagccgccgccgctgccaccgcctacagagcctgccttgcgcctggtgctgccaggaagatgcggccggagcccggaggctgctgctgccgccgcacggtgcgggcgaatggctgcgtggcgaacggggaagtacggaacgggtacgtgaggagcagcgctgcagccgcagccgcagccgccgccggccaggtacgaggggcccgcgcggcggggccggggtggcggtgtggactggcggaggggcggccgggcggggcgaggtctccgggccatccgctgggcaatccgcggggcgggcgccgttcgcaggtgtgggcggcagtgtccggccgctggcccgacctccacgagcctggaggctcaaggacggctcgggggctccccacctctccgcgcctggaggtcttactcccggagctctgggttctgctcagagctccgggtacttttctctgccccattctgccagaagtgtgtgctgtccccaggggaagcgatgaggggcccttcggactccagtgggagccgcccaagggctccggagggtcccttctcaaacccctgaggttattgcttccttttaaagtcctgcagtcgtccaaagaaaaccacccatggggtccttaagaagcaaagaaaattaggcggtggtgtcagatggaaacacacccagcctctcccaaccacattctggactaccacgttcagtccccaaccaggacattggtccatagatctggcagggaatccaagctggtccctcgaaagcatcattctcttaactctgccggtggtgagactctaccccaggctccaggttggattaggtggccccttcgaccctttcctgaacacgagtgctatcacacaaggggattgtttagcctggtggtgacttgcgatgactctatactaattaaccatgctgaatcatcaaccaagttcaggcagttctaaaatattttgaaaagttctaaattcaagacaatgcttattatcaaccttacagtggtctggactgacagatattctgttgaaatgtgtttttaaagatgagctggttaaaaagatgcaagatcggtgttcctggaagagagtgttgcgataattttgcagttgactttaatacgtttaagtct

SEQ ID NO: 6414 - DNA, 6000 bp, Homo sapiens
actggcaactcattgaatcttttctttccctgcctatctcctaccatctttatctccctttttctcttcatttttgctttccctctcctttttatttcctttgtctttttctccccctctgtcttaccagtaggtagcctggaaaaaaaagagaagcaacagttcctgagggaagaatgcattaacaactcggatgggtgctgtctgccagcactgcagaggaacctacggagagggctgctgggagagaatgctcatacctcccaaggcgtcagcctgccctcccgcccccaagttgctttgctcaaggtgtgtcagagtttactctgggattgtgtattttatccattgagcttctcctttcatcacaaggcagagaacacggctgtgtttgtggaatggatgggcccacagggaattttgagtgattcagtagttgtggtgtaagccgttcgtcataactccctgtcaggcagagtcactggaggcagtaggttatacagtttgtgattccttgctctgataagagcggcgctgttttaggcgttatgtatggcaaccatattctcaaatccaaaatcagcatgcctgctgtttccagacatttttggatttataatgtgtttatttgacatgtttttaagaaagtaaaaatgaaatgccattttttaaattatgcacttgacaaatcactggaattagaaagaataaaattccacgaaacaaaggcagcttgaaagtccatggtatgagttgttaacatgacagaactgtctggatgctcttctgctctttcaaataagaataaggaaatagtaatggcaactgttgtgcttaaaatttccaagtctgctttcagattatccaactttattttctcaatctcaattttagagtcaagaagaggactaaagaaagtcttgtgactcatatgcttgttattttccaaccagaaagaggcaacagtaggacatgatgctcttttactatgggaatataaaaaagttaaacaattttgcaaaggttttttcataaaaagcccaaagcattttgccctaggctgcttctctttggaatttaaaacccgtgtggaatatcgtatggggaaatgcaaccgacatgcccctcgttggtttgcatttaactcattacatgttgattgctaagaacacatacatgaccaagaagatagccaagccctttgaaagaacatatgaaatctaaacaaggagcctgagtcgggacagtcttaaacagatgtgaagtcctcacagcctttgccattttgaagattaaattactagcaaaccactttcaacaagggttttggttctcatagtaatgaccaggacccataacagacattaaagaaaaaaagtgaggcttatttagagttagggaaaatatcccaacacccgcttggactccctaattttggtaatctgctttctctcatctatatgatgggaaaagtcatactctgtcaccttaggattattctgttacttaatgagtataaaattacttgaaaatcaatgtggtaaatattcttaataactggaatgagcaattgtgcaccatgcataaaaaaagaaatagctttggagaaatgtaatttcttggatggacagattgtctatctgctagaggaatggccctcagttttgtgatgtgtttatcgttcatttagaaaaatgattgaagaaatctgagaaatgacataaccagattggctgtgtatctttttgttctcctatttaaaaaaaaattcccttcaaacacttctaacctcaataaataaataaataaaaagaaacaaaagcccccaacagagtcctaattctaacttataaccacttaaagtctggatatgctttgaacttcacatttaaaagaaaggtttttctgattttctatcaatccctctccttagcttgccatttacaaacatactttcctccttcagagcaaaagcaagtgagagagaattggtttaaagctgctgaagtctccactgcaggggagcactggtttaattcaatcaaggtagaatgaaggtctgagaaggggagagattctaaggcctgggcaattgagtggaagcagcatttcctgagtctacacctccttctgccattgttggtgggaactatggcaatatagctttcacatctccaccagttaaaatactgtgctatcaactccctgcctttgttctttcttttttcccataaggacattgagtagtttgagaagatacatgcagtaaatgtacattgcatatattagtaatattattttgctaacattgtatgctagtcatagggaaggtgtaatttttctatgtggtttatattatttttctaagctttgaagtcttttaacaatttcgtccatgagatgcaaattcaaaactcattaggagccaaactaatgaaaaaaatgaaagaatttgtagggaatgctgagggttgtgtcacaagagagggcattgcacaaggccaccacgttttacaattccagggcacccccattcacatcatattgtatgtgaatggtgccccctagtgtagagcaatgcagaggccctctacatgccctgttcattcattcattcaggacgtcctcaatgagccaactgtgcgccaagcatggttctaggtgttggggaggtagcagtgaacaaagtggacaagaatccctgctctcacggaacctaaaggcattcttttttgattattgtttttttaaaggcaaaaaagcaacctgccaaccaaacaaaatgcattaatatgcagaattcagctaacaggacgacaaattaatgactcttgtctaggcttttaaattatttctgtgatcatgaaggttttagccacatggaaaaaatacgcaatacgctaaccacaagcttgcacctactgcttagcttatgcctaagctctggctacatagaaaactcagctatctattacccagtatctaaaactcagtatctatcactgagaaaactcagtgatctattaggtaacacaggatgaaaaagtagaataaagtgggggtcatgccattctgccaaagcattgtctgcctaaatacctgtcctaaagactcatgggagaggcaagccaatgaacaatggtcaatgtggcaccttgaaccaattcagtcggctcttaacttcccatacatttaattaaaatttttttcaaacaaaaaggaagattccttaaagtatcaggtctcttaggggttatgctaacagaagcaggtgaaacaccaaatttaaagagctttcattaataatttctcagccttatggcttcttaatgctattcaatggaaagttttaattttatctgcaaaatgaagctaaaagaatgtcgcctagctccttccctgtctggaggaacttggattttttttttttttttcattagaagcttgggtaaaactaaaaagaaacctgtattcaagtttctgcaagaagctttaaagaaatgctgggatggtactcaaatagtttacaagttttccacctacaactcattttgcattttcttaaataagataatgactcaaaaaaatttaaaggacctaggtcacagatcttacaaagggttggagtcatggtataaaggtataaagattgtatataaatgttcatattttccaagaaacagagcaaagaccgcctgtgataactcttccttttttctacctgccttccaggatcctttctttccaaaacccctcataaattaatgataatgataatcagaagagagagtgttggccatatcaatctgcacattatattaaattacttttcccaaagtttggaagcatttcctgaaggctgtcaagggtattagtttttttctctctttaaatcacaaagcaaaattccactgtctctccccaaccccttctaaaaaaaaaaagttgtcgagttttgcttttctattcactgcaatcctggccaaagtaaagccctctttctcaatgacgtcaagatctttaccaagattaggctttcacttctctattgcagcaattagccagggaatgtataaaaggcgtcagggagactcactgggctgcagagagaggcactttgcaccacagacagatagcaagaagggaaagacagagagtgagaaaaaagaggagtcagtcgctcctggggaagggagagagtgagactgggagaaagagaagcacagaaagtgtgtgtaaaacggagtaaagaaagaaaaaaaaaaaactacccttaaagcacatttaaaaaaaaaaaaaactctggcaattcaagaaagaaacaggctacgtttaaagagcatagagacaatgaaaggctaaagaaaattttaaaatctctgccacagtctcataggtgcttggaaatgaaagtagaactgcctgtctttaacggactctgacagaggtaactggattagggacgagtacgccagctttttttttttttttttttttttttttttaacatcttaaatcctgaaaaaaaaaaaaaaaaaaaaaaaaaggcagcagctccgaattgaatgaattgatgggcacactccaactgctgggctggagagactggacttagtcttgccatttctgcttctttgaaagaggagacaacttgggcttccttttaatttagttttttttccccttctcccccaacccccaaccttcccccttacctcccccaccccctttatcaccaccccccttttaaataagagggtgaaggggaaccagagcgcacaagggaactgactcaggaggcagagaagatgggcatcctcagcgtagacttgctgatcacactgcaaattctgccagtttttttctccaactgcctcttcctggctctctatgactcggtcattctgctcaagcacgtggtgctgctgttgagccgctccaagtccactcgcggagagtggcggcgcatgctgacctcagagggactgcgctgcgtctggaagagcttcctcctcgatgcctacaaacaggtgagctgagctgagaagggcttctccctaggtctacaggggcaggggctcatatgctggggaccagaggccattgggagcattggggggagagctgtgaagccctatttgtggggttgccaagtgagcctctaagtttactttccacacctgttgcacaggttagcttgggagggtgacagctattaagccataatgactctgtgtgacctaataaggaatctttctactaagggttattaatatcttgctgtgatttgggagtagaaggcattgtgctggtacgataacttgggaaaagtcagaaaatgatggagaagaggagactgctgcatttattctgctcttgccataaactggaattttgattttttgcttgatgggaggctgaggtacactgaggaagtatgttcgaggggtgggtactgaaaagcaagaaatgagaaatgctactcagaactctcagagagttgacaagataagaaagtggtcatagaaattgtgattgggcatcatagctgcttggtttctggtagaggtaagagttaatgaaagcaagcagctgtgtgccacctcctctacattgattcaaatttgaaccctttggaagcgattttcaggcagtgatcctgagttactagatatcaacttgcgaaagaaaagtctgaaaactagctgtcagaaatccagcatttgtaagggaagcctcctttactttgtttctcaaaaataaaatacgttgccctagaaagagatgatgggtctgtgattcattaaatctcagagctgttatgagcattagagcagtggtctcccttacctgctcaggtagtgcccaggggctgctctctcaaaatcagaggtagtgatcttagtttctaagtgaaaaatactgtgttccaggctttttgctggtgagagatgttagtagagcattttcaactaagatcttcaggggcacagaggatga

SEQ ID NO: 6415 - DNA, 6000 bp, Homo sapiens
tatcacttccctaataatactcttacaatttcttatgtctgtctttactttaatctcttaatcacgttatcttcgtaagctgagaatgtctgtaacctcaggaccattattgtacaaattgattgtaaaacatgtgtttgaacaatatgaaatcagtgcaccctgaaaaagaacagaataacagtgattttcagggaacaagggaagataaccataaggtctgactgcctgcggggttgggcagaatagagccatatttttcttcttgcagagagcctataaacggacatgtgagtaggagagatatcgctgaattcttttcccagcaaggaatattaataattgataccctgggaaagaatgcattcctgggaggaggtctataaacggctgctctgggagtgtctatcttatgtggttgagataaggactgaaatacaccctggtctcctgcagtaccctcaggcttactaggagtgggaaattccagcatggtaaattctagtcagactggttttctgctctcgaaccctgtttcctgttaagatgtttatcaagacaatacgtgcacagtgggacatagaccctcatcagtaattctaattttgccttcgccttgtgatctttattgccctttgaagcatgtgatccttgtgacttactccctgttcatacaccccctccccttttaaaatccctaataaaaacttgctggttttgcagctcggggtcatcatcatggtcctaccaatatgtgatgtcacccccaagaggcccagctgtaaaattcctctctttgtactctttctctttttcagaccagccaacacttagggaaaataaaaaagaacctatgttgaaatattgggggctggttcccccgatagaaggcaggggcacttctaacagcatccaatctagagcaaacccaacttccttagtctctgacaaatcacccaatcaaagcccaaattctaagataggttctttctaataccctcctacggagataccttatggtgtattttttttccacactgcaatgagtaataaagccaatgtgctcaactacaggaatgttcctgtatatttgtggaaggaaggaaggacctgtgaaaataatgttcctaatgcaacattcactaattaaatacattgctatctactcaagggttaactgaatttaatgggagctctaagctgtttatctctaccttataaagttcacttcatcgagttcttatttaaatttagttataatccagtctctccctggaactagcagttaacaaatttatgaaaatattggacccaaggatgcctgtccagttatttagggtaaaaacatatcctggcctttcctttatctggtatgagtcaacactgctcagagaacacacatgtccagagcaaatgtcacctcacgatgaaacttggtaaacagcctgaggctccctcccccctttcatcttctatcagcttcaaacattaggtagatcaaacatactcctccacaatctatgatctgcaatccaaacttaatgctcttaattataatcatggaaactggcatgaacacccaaaacttattaatttgatcactttgatcacctgccatatgctgtcctgaagttaggagggataagatgaggtataagtccattgttcatttactccaagagctcagaatataaataagaagatgccaggttctatctcactatataatgcaagagtttatattttcatttatgcatgaaaactttaatttacctcatctataggaaagaaagtacattcttttctaagccctgaagggaaaaatattctgcttcttgcttctccctaatcctgccctggcaaataccttaatacaaatgctgacagtcttgcctattaccaattcaaatggaacgcaaagaaaagcacaggaaaggatatatcccactagagttggtgacaattgccccattctcaggaaaagtctctggaggttgtctcaccatccttaagtgaaaagcaagttggatttatgtcctcaacacgttcaggttctcagcatttgttaattgcttgattcatttcaatggcatgaggttacatcagtgtcatctgcattaaaaggtgtttattacctacctctgttgagtgctatgctgtgctgcaatgcagagcaaacaggttttctgcaacttggaaatctctgacaatgacccagaatgctgatatggacagatggaataaagacagctgagcaaatattgaagcagtctaagaattaataaataatattaacattttgtacaagtacataaccttaactgggaatgctggcaggtaaccttgaggagtgtatgcacagactggataggccatggagaattcacaaccttttttctaattaatctcatgtaatatagcaggctgataaaataaatctgactttcccacagcatattctgaaccactttggagacttggaacttccccaggaagtcaggtcctatgagaattctcagagcacgtcagctactcattgctggctaaaggcaaaagctctagcagctctaagcccttttcgcattaagggtataaaactaatttccctccttcgcctcaaccaagcaatcaataagaaacaatactatatgtaaaacatcctacaatgtagaaagtgcttttatcctgtgtctccattttgaatctcacaacagacaggcaagacatatctatcaaccaataaataattaactagtgctagtggtggcaagtccagcactatatacctatacacagaatcacatgatcatctccagcctcagcatgtttacaatctgtttataaggcaagattgtgagtgttcaatagattcttagagaaatgaagattaatgaggacagatctggttggagaagtgtgatccaagacgaaatgtgaatgaaattgggaaggatgccagagttatggctaagtgaaagaagcaagggcagttggagaaagggtagaggaacccttaggaagacatgattgtgttaatgtgaaatctggaaagtaaaacggaagtggctatttggtccatgcagcagcacccagaacaacccttaaatataagacgtactcagtaaagacaaaactgaaaaaagaagttggggcttaactaagcagcaaactttccccagttttaatcaaacagataatcactggctcttctgtagaaggcagaagtttcttccctggtacttccccaacagagtagaactgtcagcacagttcctattttgtgagtagaataagttctaattttttttattctgtgaaaagtgtagccattgaaaattttcaataggcatatgaaagcagtgtttaaggaaaattaatatggccatgatatgtgattcaggttaaagggagaatgatgtcagtgagtatggctggaactcaggtgcatcatccaggtgagagaaaatgaaagccattaggggagttttcagtgaggaagagaacagaggtacataataaaataaaacaatttaaaagttacatagtttaaactgatagaacttgattatcaataagatgaaaaagaaaggaaaatataccagattttactctatgatttataatcagaggaactcagagggaacattgttagtgacagaaatggtgatgtagctgaaaagacaagtttttggaggagataattctttccttcatctcctccgatgtgaatgagaaacagtggttggttttttaccatcttcctgaaaataaaaggctgtatctcaaaaaacaaaaaacaaaaaacaaaaaaaaaaaggaaggaagacaaatgcccagaagtgttaagacacatggccagcagagacttttccaaagtccttcacttggctggactaggttctaggccttagagctgactgtgggtggatgacagggaaagcagaatgacacggtttgagaaaagaaagggcaggcacaccaagtcactgctctgctactcagttggaacatgcctggatttcgtgcttattacatagagtatttccgtgcctgcgatgcaatcactatcacctctacctccacacacgtgaacctggtctcctgactttagttaggaaagaagagaacaatgcaactcacaagaggagaaggatgaggacaagtgtttaaaataatttttcaaagctgttggcacattttctttatgattattgtctggtgaacctagtgaaaataaatactgtattgagataatctgtgccgagcggatttatttccttttgttttgtcggagaaaggaggacaggtactgagttgcaccctggtttccgtacttcacggtactgttttatctaagttttaaaaaacacctcaaattcaactagctgtggcatttttctcagtgctcttatcactatgcccaatttaaattttttaaataaaacaggaaaagatgctaaacacattacaagttcttaaaattattccttaatatttattttgggtcaatttaaaaaggcttgtgaatccatagccttgagttaatatttagcccaggtgttagttaaattctaacttcaacagtcacccgcacttgtaaatcttgccctacgatggactacgtttcccaagagcaccccccgagttaatcacatgaagcgcattctgggaattgtagtctcggatgagcctctttctcccagtcttggactcacgcgctgattccggttgaacccaggggctaccaattagctggggccatgtccgtgagtcgtggtccaaccgagaaagctggtgtgggagcttcgtacaatgattggccaatgaatgacccccggggcggagcaatgggggtgggcggggagaccatggtgattggaccagaagcccgcgacggcgggcggggattggctgcgcgctgggtcagggaagcctgggaaggggcggaggaaggagactagagcaggaagagcagcggcgaggcggcggtggtggctgagtccgtggtggcagaggcgaaggcgacagctctaggggttggcaccggccccgagaggaggatgcgggtccggatagggctgacgctgctgctgtgtgcggtgctgctgagcttggcctcggcgtcctcgggtcagtatccgccccctcgggctgaaggcccagagcctccgccccccagcctctacagccggcggggccgtggggactccaggctcgggaccccgttctccctgggcacatctcgcactgggctgtcactcgctctttggctttgcttggcctgcgccaaaggggctatttaggaaggtggagtggggtggaaaaagaaggggcggtcaccctgcccacacctctctcccacgtaacaaactttgcgcgactcttctcacgaacgcggaattgactccaaaggaatgaatcctgatacaggagcccgagtggagcttcctcgaccctggggtagaggaagggtctggtctagaactctgggcttgggaattgtaagttaaataattgacaaacctggagctgtcactttggggcagaggaggatccatccagaccaggatgttgacagtagtttgcttaacacctgagatggtccctggtctgtctgtttaaaaacgaagacttttgatctcatcgtagccactttttacttttttgaaaccttcctgagaaagcggtgacctgtcacagtgtttctgagttgccccatgtttgttgacagtcattttatgatgtttgggaaaatcttggttcttataagatgcgttttatatagatacagaaatttgtgtgcttttgaattgattttccagttagctaatgtttattctggttctgcttttttcccccttttttaatgttttaatctgcctacatttgaaaatttccattttgagagtgttcatgaaaacttcgtgtttctaagtgttgataaataaaaattagtacagtaaaactttggaattttaatcagtttcagttaacaggaca

SEQ ID NO: 6416 - DNA, 6000 bp, Homo sapiens
gttttcccagcgtctggttctcttttctttctgtatgacctttaatttttattgcttgcttgcttttttcttcaccatcaaacatccaaaaatttctcccccttccaaaacatctacctctcctttagaacgatggtttcctaaactgcatgaagattttcaaggcagtgttctagtccaccagttctcaaccccattgtcagtatatttcctcttttaggcagaactccgttagagaagatttaatccggattccaccgctgctccactgctgctgtcctctgttcttttccacacaacctctacctgacttcactttggtgtggactctggagttgatccctctggtttcatatgcttcttttcctacttatatgtaagttaaagttgttagtaatctccgcctcccagttgtgctatgagttgttttattaattctcctcttattataggacttttaaaagaatatgtggagaaattaagttttaggtggccaccatctatcttacataagcctgcctacataagcctgcctgcctgccttccttccttccttccttccttcctttctttttctttctttctttctttttgagacagatcttgttctgttgcctaaactggagtacagtgacatgatcttggctcactgcaacctccgcctactgggttcaagtgattctcctgcccttagcctactgagtagctgggactacaggcgtgtgccaccacgtccagctaatttttgtatttttagtagagaagagtttcaccatgttggccagggtggtcttgaactcctggcctcaagttacctgcctgccttggcctcccaaagtgctgggattacaagtgtgagccactgtacctggccaggttttctatatttattaaagaaaaaaaaaaaaaaagactggccaaattcccaaaactatggcttctgaatacgattttccagtaaaaggaatcagaattatatagagaaatgactgagtccatgtctggggcaggaaatgtagaaggtgagcctagagtatcttgtcttataaggaaggaaggaaactgtcaaaaatgactagagtcatgtcaaaaagacagaagcgaactttggagggaccatacctgttaaaattagacaccttgagcatcaataaggataataaccataatgatagaaatacattaaatatatttaaatggaaacctgtgagttcataatgatagcaaaaatgaactttattggttgcctctataaggatgctagggaatcaattcattattttcaaaatggtaaacgaaggaaaagaatgaagcatttgtcttctcttaggaattgtacctctgagtaaacaaatagttgatgcatgaaaagttatctttataaaagtattccagctaataagcaaagaagaaatgataatacatcaccactctgcagcctctaatgaatttaacagatttaggcaataaatgatagatgctacatcagaaaaagagctaaccacaccttaggtgcctcctgatggaagtacccaacaccacctatgaagtgttcttgacaaaaaaattaaacctgcatctgatcaagcctctaaatctacttaacaatttaccgaacaatatgataaacttatgatgtaaaaagataccataatgatgcactcagcaaaatccaaaccatgggaaacacattacaactaacttcttctttaatgaatttcaaggaaaaagcgagagaaaaaaaaatgatggggtgaagggagaggtgaaaggaaaattacttgtagattttgacacctcagagatacatcaaccagtggcaaagtttgaaccttattgaatcctgattcatacaactataaaaaattttgtgaatgaggtaactgaggaaatataaacagtcactgggtagatatctgggacttactattatttttaggttttaaattgtattgtggttttcttttctttaaaaaaagtcattttctcttagaaatacatactgaaatatatacagttgtctaggatatcttcaaagtaatcctgcaggctggatgcggtggctcatgcctataatcccagcactttgataggccaaggcagatggatcacttgaggccaggagtttgagaccagcctgaccaacatggagaaactccatctttactaaaaattagctgggcgtggtggcgcacacctgtaatcccagttacttgggaggctgaggcaagagaatctcttgaattccggaggtggatggtttcagtgagccgggatcagaccactgcattccagcctgggtgacagagcgagactgtgcctcagaaaaaacaacaaacaccaccaaaaaacaacaaaataatactagaggaggaagtgagtgaaagagagtatagatgaaacaagaccgaaggtaggcaattacacaaaatagaatatatatgttataatatatatattatttacatatatataatgtatagttctctctacttttcccccaatgtttggcacatcccataataaaaagttattaaaaactgagggtgattttaatcttggatgactgaaacatcctcgttatcttagtctttgaactttttgagtctttaaaatttctcacataaaaaggataagaaggctgggcacggtggctcatgcctataatctcagcattttgggaggccgaggcaggcagatcacctgaggtcaggagttcaagaccagcctggccaacatggtgaaaccctgtctctactgaaaatacaaaaattatctgggcgtggtggcgcacgcctgtaatcccagctactcagaaggctgaggcatgagaatcacttgcacccgggaggcggaggttgcagtgagccaagattgcaccactgcactccagcctggatgacagagatgagactccatctcaaataaataaattaataaataaaacaaagacaagaaaaatttataaataaaattgttacatgacaaattgagttaaatatttacattaaatattgcaaggggttattttaccatttcacaagcaaaacactaaatttcccgtagaaaatgtttaacaacatgcccagataatttatagaagaaaaaaatgtcaaacaagcatatttataagtgttcagttgaaccaatattgaaaaaagtaaaacaagattttttaatgtatcaaattatttcagattatatctaattttcactgctgggtttctggaaagcaatttgtcaacatacattcaagagtcttaaacatgttcatatcctaaggaaatatttttaaatgtaggaaaataattttgttcaggattattcattaccacatttctcaaaaaggaaaacactggaaatagaaaaatattttatgtttaagtaaattaggtaccgttatttttagatctacaactgcgaagacttaaataaaacacttgagttacacgagaaaatggtcagactaacaatgactgaaagaaggacatataaatgcagaagaaacagactcgagaaatgtcaaaatgtccacagtggttatatctggttgttgatttatgcgtaattgatttctctatacttgttttcatttttcacacataataagccctgttatagccagcaaaaaattacaaaaaaagtcaaagtcatccttctttcaatcagcccattgccttgccccctatcctcctgactagacggaagcccagtgcataatttgtttttcaggcagaagaacccctttcattccactgttacagatgaatcacctactgtgggagtagtcttggtactcacatcaaagtgtaattcatcagtgactgtgattgaaaacagatcctttactctttcgtaagttaggaaacaaaatgtgggggcaaatgaggaaaagaaaactaagaggttgctggggagaaagaaggcaaatgtcacctgcttcatcattctttttagagctctcaatgtgtaccttcagtattgctcagacttttttttaatgtgtagcagtgttgctatggtaactgaaagctacatcttcttccataaaagctttattgccttccctagtgggaaacaggcaacaaaaaaagagagctccaagtttctgggaactgagtctttataaggaaatatattttgttgtgttttgcacactgtttcaggttcttctttaggtcaaggtcaccagaaagggtgagagaaatatatttctgatgcgggctcttccaggaatagattaaacccagataccagacatatttcaggatatgagggtaaagcaggttttacatggccatgtgaagggacttctgaaggacaacctgagtataaaacacgttttattatcatgattatcaaaaagtatgtgtcagcctctgtgaccattcatgactagtcagggcgctgggtaagacagaaaggttcaagctcagctcactcggtactcagtcaaaggcagccttagtgagcacatacaaccacatcaaggacagtcacacaacatgaatacggaggacaaactggcatgccatttggtctcactgtttccatgcgtccacagctcatttctaactttgtgctttgtgtatttgcttgtcttgtttacctgtcaataaggccttctctattttttttaagtcccagtcttccttaaagacccagttatgaagctcctcccctttgagagattgcctccttttaaaccttattatatgcagttagcatgagcttttagcatttatgtttttccccaggcattcaatgatcgtatgatcattgaagtgttttatagataatcatatgtaggtttctgatccttcctagataaatgctatattaaagatggaaggtttggagaacctccacctctcatcggtttttaaagaaaatggcctgtggtgctctgaaagaggcagttagttggaaattccaactgcctgtcctttagattttctaagcatgcttctgtacttggtagctgctgattggctgttaccaaaggtgactagagtgctaagccagtcaacagggaaaacttggctcctgactttgggtctttcttctcagtctatatggaagaaaactgagaaaaaatataaaaaagaagaacacaactagttgcgcatctcctaaagaggtaattacagtaaaaaatattaaaataaggaccctgctggagtatgaatttataatgtgatcactattccataataatggagtaactataaatgaaccaactgggggaggaaatagcttccttcaatggggcaattcccaatgtttatttagtgccagagaagagaaaatgcccagatacatgacttgtatccagtaattatgtaaaacttataataattacaaaggaatgataactgggggtaatttaactgctaagtaggtcagtaggggagtgtgatgaggaaaaagaagttgctgcagtgtatggagatatggaattcagaagtaatacttgtcaagtgcttattctgtatagaatatgttagatgttttaaggtatttttcatttaattctcacaacaacactgtgaagtgcctgttatccccattttactgaatagaatatgaactccaagaagttaaatagcttgctaaaaatcaaatatttcgatggacagacttcgtcttaggctaaagtctatgtttttactctaactatgagctgaaagttgaaagaagatagtatcaaataaggaaaagttgtaatattgaagggaaaataagaagaatgagactggaactatgccccaaagaattaaagaaaccagtaggtagcagaaattcttgagcttgcaggatggcagataagaaagcttgcagaacaagcttgctgacattaaaaccagaatttccaccacgtgcttcatactaactctctcgagtttgcacaggtgacccatgaagaggcataaagattctaataatggtgttgtatcatttaatttgaatgtttagcaaagtgatataagatttttctgg

SEQ ID NO: 6417 - DNA, 6000 bp, Homo sapiens
taggggtttagatgtttctctgctcttctcagtgagtctgggagcctttgttcttgaatcctgagcagtttcatgtgctgtcatcctctttggaccagctactcagcctgggtgagttgatcatgtggttggtggaaaaccttcttttgtttttggattctctctttgtttcctccttcacagatttcctttgaccccactggtgctattgcctcctgctctaggtgctgaatatttctcatttacacctctaatacaactgtgtcagccttttagtgctatgaagtttcattgattattggggtttggaggaggcagatgggtgttttgaggaagggctttgtgggagggcactgagaaatgagactctcatgattagttctcctggtggagcatctgtgaccacccattatcccattgttaccttagtttagtgggtaacagttatccaggtaagatgatgagggagggaaagaaaaaagaaaaaagcaactcttctcactacaaatagttcctagcttattcaactatgtatcctgtggattaatggacaaattccttagtaagctattcaagaccttttggagcctagcctttttatttttctcttttcctgaatatatactagactttgagtaacactggatctcctgaagcccactcagggaaacccttcaaagtgcatgaaagagacagagaagtgcagataaagatgatgaagaaggcataatggtgactctgtgcttgttttcaggtcaagatgtcagcattctgataaggtggccatctgagagacagaaagctatgtatccataaagatttttctttatctacttgggacaaacttaaagtttctatgaccttaataagctctttgataaattttcatgttctatgtctcccatagaatgcctacagcatgagaaacatttttttggtatgtttaatgtaatctatatgtcatcattcatgacagtgcctatcagagtaagtaaatccaggtgttagaaaaaaaccccaaatattagtggtttaacacaataaaatatatttttcactcacatcaccatccaatcaaagttagtgggcagtggagagagctttgttctatgaagccaatcaaggacccagacatttctcccatcttgtcgtattgtgagctttagcaatggttagcatggtttagtccaaggttgtcatggaatggaaagagggagacagtggggtgaaggctcacctgttcttagttgcctagatgcagaagtgaaactctatttctgctcaaattccattggtcagaactggccacatgaccttacctagatgcaaggggagtggctaggcaaagcagtttagcttcatgcccagggagaggaattgaggtttggtgagcatccatgacacttttgaaatgtcacttcctctctgaagcaagtgcctagtactgcacctgttacatggcaggcactcagaaatattttttgaacaaatacatgaaatgaatgaatatgtataggcttctgctgttatgttctaaggcagaaaatgggaaggaaataattttgagagaagcaaaaatctgtctggtacccccaatgtattcatgaccatttatttgtaaaattatttcacaagcactctaggaatttatactctttgaaagctgttttcatttattcaacaaactgttgagtgccttctatatcaagtgctatgctgtgtgctcaggaaatagaggtggaagtcatcattcctgcccattggtaactcacttggaatgcatctagagggaagtgggaaaagaagccagtaatcacagctatgatgtaggcaccatgatagagatacagatggattgtggtggttatgctgggaaatggcacctaattgagtcaggaatgggtgttgtggggtttcattgtctagaagaggtggtatcttggttggatgaacatgagtttgctagttgatacctgtaagagaagggtagagggaatggtgtgtgcaaattcgacagtttatggaactgcaattccttcagtaggtcaaaaaggtgtgatggaaatactgggagataaggctggagaggtaggcttgggctgagtcacaaagcacttctaaactgcattaaataaagaatgaataggggtttagagtaggaattatgcgatttgtctctatcaaatgaaagaattgatacacacagtaatatctaagcagccacgttatccatattgaccagtctatttttctccttagatcggcctcaaataatataaaattgctaaattaaaaaataaacaaaaacccgttcatagtattttgaggacgatccttttgtgggaagagattagaaataagagcacaaagaaaggtgtacaatatcctccattcaagtagccttgcctcagatagaacaggaaggaggcccatttcaaggaaaacaaaggaattggcttcatgattttacaagaactgtatctgtcaatagagaggattcttctaggaaaatgttttaagatggactagggaagaaaactaggaacaattaggggagctcctgctcttggtacttctgcatcagtgaagagtttgttaaagttgttcatttaaggaaccaagcatcagctcacttcaattagtagttattgagcattcattcctccttcattcattcagcacatttcaatgacacttttgtgccctgcactaagtcaggtgctgcaaggaagtaaaagttatggtcttgcccttgagaagattcaactaacacatgaatctagtgatttctaaccaaggatgtgctctccttaggtatcaagggaagctgggcactgtggctcatgcctgtaattccagcactttgggaggctgaggcatgaggattgcttgaagccaggagtttcagaccagcctggacagcaaagcatgaccctgtctctataaaaaaatttaaaaatttagccaggcgtggtggtatgtgcctgtagtcccagcacacttgggaggctgaggtgggaggatggctggagcccaggagtttgagacagcagtgagctatgattgtgccactgcaatccagtctgggcaacagtgagagcctgcccaaaaaaaaaaaaaaaaaggaacaaatgagagagagacagaatgaatattagtctaaaacgccttggagttcaaagttcagattcaaatcttgactgtatgtttgggcaaccactaactggttgtctgacctttaaatattttcaactgcaaaatgaagataataacagctacattgcaatttccaggattaaatgagatgactcatgaaagttttgtgtgaacagtgcacaactttgcaaacatttgtgatacattattaaatgtgaacgtactaggagttgaaagcagtggttttcaaagtgtttgttgaaacactaatgcccaagattggaaacaggcctttctcaagaaaagagttctatggtcaaacacatttgggagatgcaggatcaaagaaagtaaaacatggttcttatgcctgtaaaatgctagtatgcattgtgaatctcaaggaaaacaaatattttgtgtctctctcccccacattaatgtgatctggtgatctacccctactcccactgcagcatctctaggaccttgagatggacagaactcactctgggaaagactgctctccagaaggaaaagtatgaacctttctttcaattttacagtcccaccacccaggctggcaccgtggctcaatgcttgtaatcccagcactttgggaggtggagcactttgggaggcagaggtgggaggatcacgtgagtccaggagttcaagactagcctgggccatataataagacttcatctctacaaaaaattaaaaaattagcctggcatgctggctcgcgcctgtattcccagctacttggcggaggggctgaggtgggaggatcacttcagccccgaaggtcgaggctgcactgagccacgggcgcaccgctacactccagcctgggcgacagaacctctgtcaaaacaaaacaaacaaaaaatgctaagccattcttcatcagacagtctaggaaactcatttccaagcagtgttgagatttccaccaaggaagcccagagaaaagggccaggccccccgctttaccagggttagaggggatccctcatagaatcgggggtgtgaggtgctgtggtggatacatttaatattctttccaagacacccattgatggcaaggcagtagcagatagcaacaaaagcagagagcagggctgatcctcaaagactttatagactttttataaaaactctaaaagtcaagtaacaacatgactactccgcttctaagtaaagtgtgcataaacatcgccagaaagactgcccctgcctccccaagtcagagaagtttcctcaggccaatagcttcccctctcttccccctcctaccgcttgtctcccttcttctcccaaaacacaccccacacctggcggcattttacaccttcccaggaaggggctgccaagcgcggagtcgcggaggacgcaggcgcagcgcggctcaggtacgcgggaggccccgcccctccgcgcccagcccttctgcgccactccactccccgccctgccccgccctgcctcgcccctccccgccttgcctcgcccctccccgccttgcctcgcctcgccccttagcgcccgtcccgaggggcggggcggccctggtgggtggtgtgggagtgggtacggggagggaagtggaggggagggggtaagtgatagggtaggggaggccctgggaaaggcaggacctcgaggcgcggccgcgcgaggtgaccggagtcacagttcccgcaggcggcgacagcagagcgcccactgcctccagcaggtaaccggccgcggccgcgcggcgccggcccagcgcgggcgtgggacgtggagacccggaggagggcggcgggacccgggcggggaaaggcgcggcgtggcttggctcaggtgcgcttctcccacctggcagctcgctcagggctgtggggggtgcctgtgagggcggccccgccttgcgggctggaggtgagtgtcagttctgtctcttttgtctttaactttctttaaaatggggccgtggtggggcccaggggctgttcccacgtctcctcagcgacgcctgtgtcgcgggggcctgagagagctttaggccccgcgacagctggaagcgcggtggtctggagggcaccaggggtgggcgacggggcgaggctaggtccccgctggccaggtgggcggctctgcctagggggacccgtgaccggggacggtggagaccccagcccaggcggggacggccgcgcgccgggcgcccggctccctgctccgtgctcgggcttccgacggcgcgtccaggtggtttctgggctctggggaaagagaagcgaatttcctttccctggcggggtctgatgagaagagcttcgcagagggtttttacctgtgatgtttctgaaactttgtgaagtggcgaaagggtgttaaaagtgtccctttactgtggtgtttgcaaaccacaatctacccagctaggttttagatttgacttctatttcttccaggttttcctttgctatggttttctttagaggaagatactgtggatgaactgtgggctatagtgcacaccgatagacatctgggtatagacaagatagatgccaagccaaaaccattgatttctttagaacatttaaaatacagcatataaaaggattgcttttgtaattgaaatattattctagttctccctttaggtaggcagttaatagaaatttgttttccctgattaatattgtagaacatagcctggaaaatattgagaattagcaacaacaacaaaatccatttaccagtttcatattttgatgtgtaacttcagcatggttaaaaattgctttttctggaaggagggagtaatgttgcttgcctttgaga

SEQ ID NO: 6418 - DNA, 6000 bp, Homo sapiens
agcaacacccctgttagctccccatttctctccccgcccccccaattacatcatgatctgtcagtcattaacatagattcctggctgggtgcggtggtaatcccagcactttgggaggccgaggtaggcggatcacgaggtcaggagattgagaccatcttggttaacacggtgaaaccccgtctgtactaaaaatacaaaaaattagccgggcgcggtggtgggcacctgtaatcccagctactcgagaggctgaggcaggagaatggcgtgaacccgggaagcggagcttgcagtgagccaagatagcaccactgcagtcccgcctgggcgaaagagcgagactccatctctaaagaaaaaaaaaaacacaaaaaacatagattcctatggctccaggcaccctggttgccactctggccttgctgcccattatggtaattatgcccactttgtccggcatgacattatgccacctggcctttgccattccattgattgccactgatccaagagagtccatttccccaccatctcccatcattgaacccaggcttcagaagacagccaccactgaatttctcaaaggtgctgatgggctcattaggacttcttttttctgtttcaatgaagggaagattctctgggccatcccagggaacataggccagtggtggattctcaggtcttatgagtctaatattcacacctctgagccttctggtccttttcttcttattgtgccaaaaaaatgttctggcatctcgcgtatttactgtaggctgttgtcattaaagcaagtactatcttgcaagtttcctgcttcaatgaggtcattgtcatccccaggccaagaagagctgttctgttcttcttgcttctacctttcagaggattcaaggagattggggtccagattttcaggtttgtttacccgaaagtttccattccaggtcaccagctccaatcctttctttattagagctctgacttggacataagacatctatgtggctgcacatttagtctccttttcagctctgccacccttataatgagcccccaagcttaattttcagtgcaatatgtcttgtagatgtcaggagcgtccttaaagttttcattacaaagcatgccttacgctggtagatagcttccctgagtctatcattttctccttgcaatacctccaataccatcagaaaaagccacttaaccccaaatgcaatggccatttgatctcataaagccttattttctacctgcatctcattccaattagccacaggtgaagttttagaaattgtaatatcactgtatgccagctatggcccagcagtggagaccctattgtagatagaagacaaatccaacattccatcctaaaggtctactttttaggacaatttgtggtagcaactgtccctccattcagttgctaccacagttgctgtcctccagaacaggaacaactgtccctgttccttaggagacagagtattaagcaataatgctgcttgctaatactttattgagggataaaatcctagggcaacagacacaaggcaaaaagtgaagcagggcaggagggaagctaatagaaagttgtgcatttttgtgagatagggtcttgtgatgttgcccaggctgttcttgaactcctgggctcaagggatcctcctgcctcagtctcccaagtagctaggactatagatgtgtgccaccaggttgtacattattgagctggtcatatcctcagaagtaaaaacagccagttgctcagttgcacctgctggacatctgccgacaggccaaatggaaccactgcactccatatgctgggtcccttccacctcttgtccttcactggtcaaaatgtgtcccaagctttaactcccctgtatttctgagtagatgtatctggcccctgtaggcagacctcatgtggccgtggtgtgggttaccaactgattgaaaagggtgagaagagccatgttctctctaggccgctcatggcataagaggcctgtgacagagcctggtcttcaccctaagggaggtcacaggggcgtcagcaggatgtggggccaggttgcagggagctgaaggcccatgggacgtaaccaactcatcattctgctggaggctatatgatcaaacagcaaactgtttatcatgaatgcaggatgagggcaaactcacaaggccctgccaccaaaaggtttgctgagggacatcactccttggtgccgggctcctcgaagttatctattgggaaatctagcacctattgttcaaaggatgcagcctcacaagcctgctgtgaaccaattgacaattactggacaatcacaccccctcccctttctcactatctcttttgcctaataaatatggagagctgtgtaaaactcagggcccttgtccagtagaggcaaggcgccccctgaccccttcttccaaatacactcttttatctcttgtcttttattcccacgttcgccccgctttgttcagtccccctaggtccgtgcaggctacaagtggcacactgaacagtgacagaatcgggcaatctacaccaggtgaccctcgagaggtgcatagattaggtccactacagcaatattgaagaccagattagacaatgcaggttttccaatgcacaaaacttacctaagttctcccaacgtcgtgagcctctagttgggggttagtatttctgaacccccagtgagccgctgtgtgattctggctcaggcacaaaggtctctgaactgttcacacagggcaattacacttacatcaaagagttgtgagacctgaattaaaatgcggtgtaaataacatttgtaagtggcaatgagctccatgtgtaaacatcaggagctgttgtcaaatgtaaagattgtgctgagcaaaataccacgacttgttttagccggacaggcattaaaatatccagtgttattttgacctcagctgaccaatagctgctccatttctccaaactgtagatgagtcacctaggaagtccctaccccttcatcttcttgccatcctccctccatcctatcccacccccagtgagatatcctcttgttcccttttctacccagcatccagagttctgtctggcccccagcaggtgcccatggaggctacatatggaatgaaggaatgaaggattgaataaatgtctccatttctttgcacaaagagttaccaatgcttgagatgttcccctactcccaggaagtcaccctctcctgggagcctttactcaacccgccctccattcctgtcttcccctttctcggggcagctgtgtgtgacatgccagtgcacagtggaatggttggttttatccatctccctgacaggcccctgaattcttaggggggaaggaacaaggtctcattcacatttgtccctgcatcttgctggttgaggtgcaatctgcagcctcggggcggcgctctggcatgaaggaggccgctaagacgttgttctgaaagctggcttgcaaggtagtttatactctgcaaaccagcgtttatagtgtgtgtttacatgagtggcttaagggtgtccaaataccgggaaaaggtgctcagtaaatgtttcttccatgcatgcactgtagtatctgaccctcagctctgtgtcttaagcccctggttctctcatccaacctaaaaataggattgtccaggccttgagggccttctggaaggcgcccccatcagtcaaagcgcttgcaaagtgcttccaccacaagagcagagaggccgcgccatgcctgtgatgctgctaggcacagcttgtctgaaagagatgcaaccaggctacctcccgaagaaccgacttgttgataatcttgcctcaaacagaggagtttgcagatggttgaggaagagcagtggtagaaatgttctccccagggccgtcacaactccttcccagccgcagcctagtgttgcaagagagtttctgctgctgggactacaaaggagaggacaaggcccatggccgggagaggggcggcctgcacctttcagccccggcgcccgggagagcctgcggggagtgcggcggggagagtcctcaaggatggagcgcaaaaaagggtctcaagtcagtcctcgccacctttccgcagcctcgggagaggcttgggggaagcgcaggcaagggccaaaaccccatggaagtgggaatcctcggcctccagggtgaataaataattaagcgcccaatacacaatagcctcgctagatggagacgaggaatcactgcagcggcgctggcggcggcggcggggggagcgcaaccccgggcgggaggcgggagaggctctggctcggctcacgtctgttttcctttttcgtggattatttatttcgcctccacccacggctttgctgccccagcgggagctccctgccggcgcctcccgccgctgcctctcgcgggccagcgtgagggtagtagagagctcgggcaccccagtgccccgggcagccgcgcggcgccaccaggaaaggcggggagccaacgcgggcccggggagggctcgcgcggccggctccaggcggcgtggaggagactttccccgccctctgcctccgcctcggcggccagccctggccctgggagcggggtgccgcccctcccgccccgcgcgcggctaggcgcagtccggagccaccgcgccctgcgccccgtgcgaggacgccgctcctggtcctctgctcagcggcccgggaggcccaaccggcgcgcaaacttttgctccagcgccgggcgctcctccccggcatgtgaagcccccgggcgcccgcgcagccgccaaggtgaggacggaggccccgcctagagggcgggggactggggaggcggctggctttaaatgggggctgtccggctgctgggaaacagagctgccgcggggggaacgcggacctcttttccccgagcccagggtcggctggggccgccgccaggcaaggtagcgtgaggcgttggaagggtgcgggcggagatggaggcgtgggggaacccacgcccgggagcgggagatcggggctgggcggaggcgtgcaaaggggcagcgcacggaggtgcctatgttgcagtgtgcgcaatgaggccggctgggcagtgtgggtgcaggcagcgtgagatttcttggggccgtgcatgcagggtcagcgagggtgcaggcaggagtcggtgggtgtgcacggggatcagtgtgtgtgcacggctgtttctgtggttgtgcgcgcaggtgagtagtgcccgccgggtttgaagtgtgctcacagtgagagtgagttgtatgggggttaatggggcgcagtaagtgtgcttggctgtttctggaggtgtccatggggccaaggtatgcacgcagtattctggagctgtgcgcggagctaaagtgtacacgcggggctctggggatgtgcgtaagaagagtgtgaattctgggactgacgaagagtcagtgaaggtgtaagctggagtgtaagtgcaggcttggtttactagggtgcccctgggtgcggggcgtgcccgtccgacccgggctgggaggtatattggtgcgcggcggcggaagtgcctgcgcggtgtccgcctgaccctagccttgctctcctgacagttcgccccaggagcgggcgccgctggccgagatgctcctccgggacttggtgctgcgccgtggctgctgctggtcctcgctgctgctgcactgcgcgctccacccgctctggggcttcgtgcaggtgagacgcgccggctgcgcactggctgggagggcctcctgggtaaggggcgagctgtcccttccctcctgagaccctggcctcttgcagccaccccactgattggttctcggaagagcttgggaaaagaaaagctgctacggtcccctataccctacccctgaaaagataagaaactccaaagagaggcttcgattgtggccta

SEQ ID NO: 6419 - DNA, 6000 bp, Homo sapiens
attgatgtttcgttttgtgtggctgatatttataaatgcaattggtatttgcaatattgttaaattcacttaggtctagcagttgtttgtagattccttagtactttctacataaacaacaatgttgtacattaataaagaaagttttacatctttctttccaattttgatacctttcttatttttttcttctttcttcccttcttcattacactggttaaggcttctatcatgatattaaatcgaagtggtgaaagtggatgtccttgcctgcttccaatctgaagtagaatgcattcaatacagcagcactaagcatgatatttgttgcttttttctatagaaaactttagaaggttgaggaagttccctttattcctaaattgctcagaatttttaatcaaagcatgtattgatatgcactacaatattttccccttattctgtatatggagtaaattaattgattttcaaatgttgaactcaccttatattaacctcatgaggtcatgatataagtctcttttatatatttatagatttgatttgctagtattttgttcaggatatttgcatgtatgtttgtaagggatatttttctgtagttcttttttaatgcctttgtcaggttttggtatcaaggtgacattgatatattcggaatatgaattctttgtcagttatgtgtatggcaagtattttctcccactatgtggcacgaatttttattcttgtcatggtgccttttgttaaacagagattcttaattttattgtgctcagataattaataatgttttcctttaggtttaagtgctttttttgcgtttgcttgaggcttacagtctttatttgcatattccaggaagtcagaaaaggtccagttgacactactcagggtgtggtagaaggcagctggtggccgggctcggtggctcatgcctataatcccagcattttgggaagccaaggtgggcagatcacttgaggttaggagtttgagaccagcctggccaacatggtaaaacctcgtctctactaaaaatacaaaaattagctgggcatggtggcacacgcctgtaatcccagctactcaggaggctaaggcaggagaattacttgaacccgggaggcagaggttgcagtgagccaagataatgccactgcactccactctgggcaacagagtaagactctgtcccctccaaagaaaaaaagaaaaagaaaaagaaaaaaaggcagctggtacacactgaaattttgggttatccttgaaagcagctttgataaacactgaaggctatttgggtttttagattaatattcaatttattgaaataaattaaaaatctagtaatccttaagttcttagctttaattaaaatcctaatattctatttatacatctaaggggacttttacaatttagttgagcaaattctccaaagtatttaaggttacatgtatattaacataatctagtttccttttgtgtgtgcatgtgtgtgtgtgtgtgtgtataaatatataaacattgtcaattttctttttaaacactgcatatgtctctaacaagcaaagacttcccatgaacacagatgaattttatacatttaataaaataaacataattttgagtgttaagttttcttaaacaatatttgttaacaaaattgtttttaaagtagaatacctttcaactttataatcataagattaagtctcttatggaagtacatcattaaaattggaattataagtaatctgccccatacgccaagttcttatacacacgttaaatactcaatatgcacaaattagtcctaaaactaatgccaaaaatgttaatgccattggttttgtttattttgttttattttctccataagtaattataaacacttctaggtttttaacaaaggcagtagtttttagcaggcagtagtttttaactattaatactaaggcagcaggctaaggcagtagtttttaacaggatggtactgccccctagggggcattttggaaatttgatggtgtgcttttattagtcagcaattggcgagaggatgcttgtatttagctcttgaatgggaacgaaggcctgacaaatgaaataggtaagacaatcctgcacagctaaaagttaccctgtataaatgtcaaagatctcttcatacaagcaaaaagctcataattatttaggcctagaacttaaacatgttttacgtgtttttggcatagttttaatacagattgaatttttaggaattttgttatcttgtaaatcagggagaaatcgtactttgatttgttctgaactttaccaagagttattcaccatttcggaaaatcatgtcaccggcagcaatgtacttcagcctgtatttgcagctccctcattcagggtgattagatgtagatatatgtatacaaatatatagatatgtttcttaggtccttgttttgaaacatcaaatataaaaaagtaagcattggccgggcacggtggctcacgcctgtaatcccagcactttgggaggctgaggagggcggatgatgaggtcaggagttcgaaaccagcctggccaacatggtgaaactccgtctctactaaaaatacaaaaattagctgggcatggtgacgtgcacctgtaatcccagctactcgggaggctgaggcaggagaatcgcttgaacctgggaggcggaggttacagtgagccgagatcgcgccactgcacttcagcctgggcgacagagcaagactccatctcaagaaaaaaaaaattaagaatttaccattgaatattgtatcatcttaaatccaaacttatatggttgcaaacaactcattctttcattataccttttggtgtaatagtgcttgagcatgtacatactgaaatatacactattttattacaagtaattttcttgtatttctcttttgtttgggcaataccttgtgtgtaactataatagaggatgttatctatgaatttcatttcaggatagtagagagcattacaaagtgtttttaatcttcacaaaaaatgtgtagccctggattaacaatactgctatgcacagtcagattttaaatcagataataaatttataagattgaaacagtgtgatattgttgccagaagagatagctttttggaacagaacagaaaatatccaaacagatatactggtatatataccagctaatgagttttgaatataaagatggaatatcaaatcgaaggtgaaatgtaagatgatttaataatggtagtggaacaactggctaagacatatatggatacagaaaacactatatgtaccaatctaaattccagacggattaaagtaaatcttaagtagcaaaccccagaagaatctaaagaaaatacaagtgacagtgtattgaatagctagtagaaatggccttttctaaagacaaaaataataaagtaaaatattggtaagtttgcataaatattaaacacttttctattaaaaaaaaaacaccaaaaaggcaggaatgaagtgtaaataaaaatttgcaacatctatgagaatggatgaagataattaatatatcattaattcctatataccaataaggaaaaaaatacttcagtagaacaaggatccaagaatatgagaagataactcacaaaataaggagtacatgaagctaatacacttaaaaatagtttagtctcactagtggtgaagagaaaagtatattaaaataagtcacctattaaatcaacaaagggtttttgtgttattgtttcttaacgacaaagctaattgttagtgaggagtagaaaaaaaatagattctctcacatactgctgggaaaatgtaaactgatgacaatagttttggatgccaacataacaacacaggtatcaggtgctgtaaaaaatgcacagtttctgacccagcagttccacctccaggaatatacagaaaacacttgtgccccataatgttagcacttcatgctaaaataacttatcagagcaaaaattagactttaaacacttaaaagggagggctgatacgttgaacccaaggggatggaatatttaatgacaaatatcatattgaagttctggaaaaggcaaatgggcggggatggttgccaggagcagggcgtgggtgactccaaaagcgcatgagaggattgatggaggagggggcggggcatgtaaaaaaaaaacggtctgaatcagagccgtcaaagcctcccagactcacagaagtgtacactacaagggtgaattttactttgtgtaaatcacctacaccttaataaacttgactttttaaaaatcttgatgaaggatattaagcagcctggggaaatctaaatggttgattaactaaagtaagtaatttgcaaggcagagtgtgaagggaaattggcaagtggtggagggggtgtttacatattcaggggagacataggctgggagcaaacgtgccagaatgtatttatattagtgtctctctggaagttaaacatcgtttattaaattaaacatcatttttctccttgcattttgtttgtttctttgttattgttgtgttgtttttggttttggtttttgcagcaaacagctcttctgttattggcggggttggagtggggggcggtgctacagcaatttggaagcggggctcacttgctatggcttccaggttctttccagcgcttttctcttcggtagatccatcaagccgggacaggcgagccggggagtcgcgaaggctcccgggcgagcggggtggggcggggggcggggcctgcgtctctctagggcagagtaggcgcgtccctactggatggagggggaagtaacaccccaagaacgctgtcatttcctgggccaagttgggacccggacggcctcaccatgatgagtgagtcttgcttccccagggggctggcgggctgggctgggggcaggcttccccaaccccagcccaggaagggacagggaatagcttcattccctgacttcatcaaccagctgacctactgactccctctccctcccttcctccctccccttcccttcctccctccgctccttgcttccctccccctccctccctttctgcccttctctctcctctttctcccctttcccatctccctctgccttcccctggcactctctctctagaacgggcagctgctgctgcagtgggaggaggtaagttacccggatcgcctgtctccaggccctcacctagcctggtccccgggctgctgggagaacgcagagatgaggcgctgggctggctctcaccctccacttccgaagctgcccgagtagcctgagtgagccacagcatcaaaatactccagggaaaagctcactcccattcctgacccagcttctcttctagtccttatgtcgaataagcataggaggaagatcgtttgaaagaggatttgcagctaaactccacgtggcttatttcacatttatgcgtggacacacacacacacacacacacacacacacaaatttgagaccaatgaagggtattgacttcctcagcatcacacagcaagttagagacaaaccagggccatggctggtccttctatgacatctttgcttcacctggctccacactccaccttttcttcaccagaagaccactaagttgccatctctgtattgctcaagctgacagtctccggaaactgtcaaggaattcctaagcggggggcggggggaagggtcccttctcctgagcccacctctgcactcagcttctctctccccacagccctggcagtgggggctgtgcccgtggtgctcagtgccatgggcttcactggggcaggaatcgccgcgtcctccatagcagccaagatgatgtccgcagcagccattgccaacgggggtggtgtttctgcggggagcctggtggctactctgcagtccgtgggtaagtgtcctagacaggaccaccagag

SEQ ID NO: 6420 - DNA, 6000 bp, Homo sapiens
ctgggactacaggtgtgcaccaccacacccagctaatttttgtatttttagtagagacagggtttcaccatgttggccaggatggtctccatctcttgacctcgtgatctgccggcctcagcctcccaaagtgctgggattacaggcatgagccaccgcgtccagctgagcctggattctttctatgtctcagcatctctctctgctaccagcctttgcgttatatcccacaggattcctggaggtaggtagcaatgggtaagaaaagtttagcaggcaaaacctcagcagacaggctgacacccagcattcccaagcacagatgagaccctgactctcttgaggagcttggcactcaatgagtattaggagttactgcttggtgaagtttaaatatttgtttattcacgtatgcaactaacatttattgagctcctactatgtgctcagcacggtgctgggctctggcgatgcacagatgaattagacagctctgcttgcaaggcattcttgaggagtttgcagtatagtgggtgtaacagacatacagaagtcctagaagcaaaagtgtgtggacagggcgttgccaaattcctcagccagctgccaggtactgctaattccactgcctgaacagctggagaatccatctccatgaccaccactccggcgaaggccgccactgcctgacacctgtatcaccgaggccagcagggccgcctgacagcctgcctcactcctctgatcacttctccacaccacaactaaagggacaatctgatccctgtttaagtcctccaaaagctccttgatgtcctttcgataaggtctaaaaagcagaggcaggctacactgtagagagttggactccctcctcacaggtggattctgggtcttgttcacagttgggtgctagcacagggccagaccctgggtgaccaatgattccagggggtctttatgatacagtgcagtctggtgacatcataatgcaagccccctgcccaggagaggtttttggtccatttgaaggacaatcattggtcaatccagctaggatccactatcatcacttaatcggacttaatttgaaatttctaaagatttttatatgagcactctgatttaaaggagttaagactttttaaaaaatacaacataaacatatgactaataccaattacgaagcgtcaatctggcccatagcatgagcccttatgcagtcatatttgggagagatgtgggtaggcggtaagagctacaggacaaagattggttttgccttgctctgcgatcttggatgggttacttactagctttaaaccccgtctaaaactgatccctgcctccttggcctcatgaagtcactgcaaagaccagatgaacactggctaagaaagggctgtccaaaccctaaagggttgtacacatgtgagggcttgaggccgtgaccagagaaggcagcatcccccttgccacagcccccaacacactcctctcccggaagtggctgggagggtgtgctgggcttatcttcattgtcctattcttccccaaagtgggtctgggatgaggagatgcaaacctctacctgggtttcctgccagaattcatcagttcccataagcagaggcaggaagaccattgggccatccatcatgagacaggttgcagggaatctggacctgtctggaccatgttttagaagcccttacatgggaagagatgttagacttagcgatctttaaggttcattttggggattctctacaattctctgactccaagtcctttccctcagcagaaatcggttgtaaacaatgacaaggattctagcagaattgggcaatttctataaactcagtttctggaaactcccaggaagccaagccttcaggcagaatacttctccttcccccaaagaagtgcaaaagaaaaagagtactgttgattcatgcaagatgccaaatacctaattccttctgaaagtcacacacccttctctcccagccagaactccagatccaggaggctgcacacacccagaggaagggacatatcatagattggtatgtacctggttcccaaaagcacgtgctttgcctatcgcacatatgcaaacttttttaaaatcacctttccaggagcgtactggggccttggacatgaaggtcaactgtttttttcactttggtcccctggtttctgggttcaggcctatagtgagagtcattcattcatccatccatttaatttcgacacctctccctgtgccagacacagagcagcccttgttttcacgtacttcacaatttattggggaaaactgtcaagtaaacataattgtagtacgatgcaatcaggaaacagaattgcagagttcatggaatattatgtgattgtacttaatattacgggaattgtacaagacaggcacccagctgagcctagtggtgttggagaagtctctgaggtgcacatgattaagcaggagtaagctaggtaaaggtgaagtgcagggagcaggggaagggcgtttcaaaggggacaaatgagcaaaggtctggaagtgactggatgtggccaggacctgaggcagctcagcactgctgggtcaaaaagtgtagagccaggattgaggggcacagatcaatcacagatgacttagtgtgccccacagaggagcccagagacactctaggaaacaggggtgatattgacacatgagttcaatgaatattcaagtaccttttagaggccagcctcatgctcaatactggcttctattcctttttgaaaaacacctaaaattctttccaccttactgaaaagcaaagaagttctttaggctgagagtcgtccaacaactggtatacagttggtgctcaatcgatggtgatcatagtccctccctgccagggagctgttgctgactgggtagtgttccccaaatgatgtggctgtccattcccaggatcagacatctttgcatcatgaaaaatggcccaaccctgtagctaacatccacagggcacattgcttaaagacagattccctgcaacctctctcatgatggagaagaaggctgattctcttagctctctgctttgtaaagaaaatggttttcagcacaacttcaccccacagcaattatggaaaataaattgaagtgtaagaacagggagatggctagcagatggggcaaaattagcctggctgctactaccaccctggctccacaggacgcagaaagagatcctgctccttggagtgtgaaatgaccacaagattaagaatcaaggcagcagcaaggaagctcctgcctcaagcccaagcaccaaggagcccctaatggggcctccacttctgtctccactgatcccacctttccccgcccaaactgctgtccctgtgggggttcctctcctccttctgggctcagctccaaggtcagtctttagagacctctgctgccctccacccgcattcacagttccttaacccaaattgactttctcctttctggagtccactttagaaatctcctttccttgtttaagggccacacgatagcccctgccccaatggatgactggagggtagactcaccctccttcagggccctgcctcaagggcacaggtctgtccttcgggggacctccatagttactgggtaattagtgagcagccgggtttccgggattcattgctgtgaacagagcagcgatgcacacaggcccatgtgtttaaatgcccagtgagccctgtccatttttttccccctcttggaacactgaatatttaaagccattttctttgtggccttagttgtcacagaaagggcccaagcactgagctgggagcagggggctgggacttcctgctcctaagtcattcctcaaccttgggcaaattcggtaactgtagggtctcacttttaaggagtgtaaaccacatggtgggcaccaaacaggataagatcctggaattctctagagttcaacagtggaggtggggagggaggggaccggaaggcctgtcctggcattttcagtagtctccacaggaagttctgtcctggcattttcactaatttccagtgaccccacagagggtcacttggagactcagtggccagagaccccacagcgtaccccagctcctaggagttggcctgcttcttgttccttcctagaagctggagtcacattactggaccggaaaaggctcctagtatctaaaccaacgaagaaggcccttctttcacagcccccccgcactttggagactcccacaactttacctccacactagtttgccccccgacccaggccctcgacactccccacgcagggctcccaggattcggggatgggcagggctcgggtcctggtccctccaagtgggggctgcctctccagagtggacaggggacccgcggagggggtgtcttatcccggacgggagggagacgctgcctcctggaccaggtactgggacccacgggcccacccccagttgcgtcacccggcccaccgccccctgagacatcacaatctgggggccgggacccgcgcctcatcacagccggtttgtaaccaaacaatccaacctacaaacaccccggaaagaaaaaaaacacaagctggcctgacccagcctcccgcccctgccccgccccgccccgcccctcgcccctcgcccctcgctcctcagggcccccgcccccgcacgggggagtgagagcgagcccgccgccccgcacccgccgccccgcgctcgctcgcgccagcccgcggcgggggcggccccgaccgcgccgcccgcccctccccgccccgccccgccccgcccgcgcccgcgccccgcccgcgcccgccgcgactccagctccgcggcgccctcgccgggtgcgtgccgctcgcgcgcccgccagccaggctctccgcgcccgccgcccgcgccgcgctggcccgggctctcccgcccgcgcttcatggctgcacacgagtgggactggttccaacgcgaggagctcatcgggcagattagcgacatccgagtgcagaacctgcaaggtaacgcagcccaggctcgccccgggatggctgggcgctcggggggcccggggcgccgctccgacacttggcaactcccccgcgccgcccccgctcgccggccgctcgttgttcctgtcacttgcctcgaggtgggaggctggggttggatacccgcccccaagccccagggcggccagccgcggccaggtttacagttgcccagggggtggggcgccacacgtgtgtgtgttgtggggcgagggctcgcattttcattagggggacgtcaccaccccctccagtcaccgctgcgagtttggagaagtttgtacgtgggctcttgggggcggtggcccaggttagggaggggaggagacagtgcgactctgtgtgtgtgtgtgtgtgtgtgtgtgtgtgtgtgtgtgagttcgcgcacttcctaagtaccttcgaggcaaggggaattgaatggtgggcggcgcttcagggggtgagttggggaaagcggggccaggggtgcggatcggatcggtggggtcaggcaagcacccaactccagcggccactttgcttagggagctgcccctcccctgcaggatcaggactctaactggggagagggcgagagccccacccttcccccacgctggcccccaactccgaccctgcctgggcacaggacactgggaccaaggcttctacctgggaggtagctgagaagaggtgaaagagaaactccagtggtggagagcggctgggtatggcggtgccacacatgaagtgtgtttctctttcaaaagaatttattcaatgtggaaacttagaaagcacaaaaatatttgaaggaaaaaagtcacccataatttcccctccacaacctatccacccaacagacaggtgttcttcatggaactgtatctccagcttcttttttttcata

SEQ ID NO: 6421 - DNA, 6000 bp, Homo sapiens
ggcacagcgtggcgacctgccccctgtggttccagctattcaagaggctgaggtgggaggatggcttgagcccaggaggttgaggcagcagtgagctgtgactgcaccactgtactctggctgggcaacagagcgagaccctgtctctctctctctctctcacacacacacacacacacacacacacacacacacacacacacacggcaccaatcccattccctcataacctaatcacctcccaaaggccctgcttctaacaccatcacctccggggttaagacttcagcatatgaggaacaaaacacactggggcctacctaagggtggaggggaggagagagaggatcagtgggcattaggcttaatacctaggtgacaaaataatctgcacaacacacccccatgacatgggtttacctatacgacaaccctgcacatgtacccctcaacttaaaagttaaaaaaaaggacttcaacatatgaactttggggggacacacacattcagaccatggcaggtcagccaagccccttctgaagaggtaagcattgagcaggaacccaaatcctgtttgtttatttatttatttattttgagacagagtctccctctgttgccaggctggagggcagtggcgtgatctcggctcactgcaacctctgactcccaggttcaagcaattctcctgcctcagcctcccaattagctgggattacaggcatgcaccaccacgcccagctgatttttgtattttttttttttttgagatggagtcttactcttgtcacccaggctggagtgcagtggcaagatctcggctcactgcaacctccgccacctgagttcaagcgattctcctgcctcagcctcccgagtcggtgggattacaggtgcctgccaccgcgcctaatttttttgtatttttagcagagacggggtttcagcatcttggccaggctggtcttgaactcctgacctcatgatccacccgcctcggcctcccaaagtgctgggattacaggcgtgagccaccacgcccagccagaacccaagttctagaggtaacgacgccaggccaggcagaagcttccaacatggcaaaaccccatctctactaaaaatacagaaaattggccaggcatggtgtcgggtgcctgtaatcccaggctactaggccccttcccaaggaccccagggactcagaggagctgccagtgccaaggccctgagaggggcacaagcttagagggtgggctccaataagagggccagagggcatgaaaggtgggaggtgaggttgtagtctggttaccctgggcctcacaccatggcactgagctcgagtattccaatatgagacaggaggcgactgacagcgcgccggccccaccaatctttggccaggagtttgcaacctgctcaggtggctcccatcccgagtctacacctgtgcttgctgccagagcccttctgtgcactctcccctgcacagcctaactcctgggaaggtctacacagctggtgcctcatcctctccccctcaacttgccctctggcagcctgagttgcagccaccccccccaagtcctggcccaaacagctcctgcagggggtcattcagctccaagattccagggtggggacagagacttgcgtttcctttttactttctggcgtttctgatttctccacactgaacctgtcttgtgtgagaataaaagctgtacacagggaaaactccaacacaccctttccagtgagctggcttgaccctcggtgccccgtgacagtccctccggccttgctgtcctgtgctggccttgggtctgccctgccccttaaaaggctggggtcctcagggctgcacagagccctgcctcctctgggatgggaggtccagggctctgtggaacatgggagtttgagaaagcacattctgtgctgtaaccttatcctcaggaaatgaaataaaacaatagacactgaacccaagtgtccaagatgtaggcatacggattcatttacttggcaccaactttttcactcctcctttctggtctctcctcagccctgacatggaggtcagggatttgtgtctgtcttgtccccaacacagggcacagggcagtgcgccgactgagtgcatgattcccaggcagcagggaaacagggtgctcaggaagatgtggttttgcaaagtttagtaacccagcagcacacccgtgtggacgcatccctttccagtgcctgtcctcaccccctccccaatgtcccccacccagtgtcaactgtgcaggccctgggcacaccaagatgaaggggacagacctgggacctgccctcagggtacttccagctgaaggcagccccctgtcacccacaagggagctgaggctcccttggcgggtcaggtcaggcaaatctgtcccagagcccagtcctccactgtcccccacatgttgaccttagtccccaaatccaacagccctcccccgaccacacacacacacccagaaccctgccctctccttgcaaagtgcacagctaagggcccgcactcctcatctcccaggcctggcacgatcccactgctgccctcacacggcctgcctcagctctctcaacaaaggaccctccctgcaaggaggtttttctttttgaaatagggtcttgctctgtcatccaggctggtgcacaatggttcgatcatagctcactgcagccttgacctcctgggctcaagcgaccctcctgcctcggcctcctgagtagctaggactacaggcctgcaggcatgcgccaccacatcctgccgattttttttttttttagagatggggcctcactatgttgcccaggctggcctcaaactcctggcttcaagcgatcctcctgcctcagcctcccaaagtgcctggattacaggcatgagccactgaacccagcctcaaggaggtttctgaagctcaactatggaatacctactgtttaccaggctactaggccccttcccaaggaccccagggactgacagctcagtgcaacctgccccaagcataattttcaaggcatgtgcattctctcaataacaaagcaaaacaggtcatgcttgtctccttatccgtttccatcattttctcactactgccacatgctgtcaaggtactggatttccctcccaaacctcctcaaccaggaatggatgtgcagggatttgtgctttacctcatgagccctccagcatcccaaggacatcctgttcctaaggtaagtgactacatgtaggtagtccagtgtaatcactgtgtctgcaggaggcctccagccacctgagtagccccacagccagctcctgcccttttgggtctgggcttctcttggggcccccataccactgcttttctggcccatgggccactctcccccatccgcacacctgcctccctgaggcaaccaagtgggtcagagaggctgtcgatattcaaacccaggcctccagacccctcgttcagggcccaccagccatcacgagccctggactaggagtcagcagacctagggtttgggtctctgcttaacattctacttagactctaaaaggaaactaacatgagcactggggacccctgcccctagcaccaggctgcactactgacaacacctacctgtgtgtcctagtaccaaatacacagaacctttcgacctgcacctccaggaggtaggtacccactggaatttggataaaagaaccatgtgaccctaaacctggaaacgtggcacacggtgtggccttgcctgcctgcaggccctaaagaaggaagctgggcccggcctaaggctgatctgactcctacagcgaagagaaagcgcctggcccgtccctgctcccaggctccaacctgacagtctggacctccagaggcgctggggaagggctggtgggaagtcaccgaatgggacgctccacagggaccagggcagtcccttgccactgcgaatgtcagggactcctggggggccgagtcagactcggctctcattcatccccgcagcccatggataccctggtgacccagagccaagcaccctccgacttcagcgcctgagcgcggcccctaccgagcccctccggtctcgccccgtccggccgccgctgacggaggcgctgcgatctggcccgactccactctgcagcccagtccaggaacctccctctctccacaaccttccgcggctcccgcgacccgcagtcctcgggaaggagctgtggcccgaaggcctgctgcgccctttgcccatggcccctttcccttttaaggttccctgctctccgcccaaatcccagcctcaggctccgcaggaagcgcccgtgcgcgtccgacccccagaacccggcgggttcggccaggagtccggaagccccggaggccaccgccgccgcgggcgcgcaggcgggacgggcagaggctccccacgggcgattcccgctcgcggagtttcgcaactagcggcgtcccagtctgcgggcctcggaacgtcccggcgctccacggccgttttcgcggcagggtccgcacggcacagactagggcgctgaggttctgcggcggcgccggactccgaacccagggtccggttcccgacccggtccagaccagagccaccccgcgtactccgggtgggggagtcctcggctcaaccccgccaccccgcgcgtcccctcccgccggacctgcgcacccagcgcgctctttgtctgaggcgtccccgcgccccgcccgcgcgcccaccacgtcccccgcgccccgcctcccgcgcacgcccggccaatgaggcgcggcggcgaagcgcagtgcccggggtgttgtccgcgccgtgcccgcccattggcctcactcggcgcccccacccgggccctgccggcaggcacgaggggcggggcgcgcggcccgaggtgagggaccgcgggccggaggggatccagcgagtcagctgccgccgagggaccagcgcgggtctagctgctgccgccatccccaccatccctgaccgcgcctgcccgggctccgcgccaggaggagcggccaggcccagccccggcaccgcgcgctcggggaccccgacggcgcccagcccggcgaggggcctcagggggaggacgaggaggaaaggcggcctcgccggggacccggccatggcgctggacttcttggctggatgcgcggggggtaaggaggcggcgggccgggccgggccggggcgaggcgtccggggagggaggtcggcccaccagcacgccctggcctcgcggcttcccgctggcgggggtcgccgcgtctgtgaatggggaccacagttctcttgcctcgggcgggtctcgtgggcgtaaattgacttcaggcccgggctgtccgcgagggcaggtgtctttattctctctgggcacgctcggacgggaggtctggggcgccggggcagcaccgtggctgagcggaggccaggactgccgggaggatgccccactgccccccgcgccgaggtcccgggctcatctccttcccctcccccatccccatccgttgcgcactgggagcagggtcccctcccccggccgtatatttcgggactgactccaccccgtcccgcgcagccatccagcggggttggggctacggagccgaccccctactcggctggccttggagggcactgaaccactctggcgccgagtcacgccttggaacgccgccccttcctacgcggttttgtgagctgttgggggcggaaggggggtggtgggtgggtcgggcgagccggtgtggggcaccttctccgaggcgcggtcgcggctctggggttcctcccatgcagttgtccccgggagggcccgggcgggcgtgcagtccaggctctcccatgccccgaccgtgggcgtcgggcacggcacttccctgttgggcctctggcttctctgcttttaccttgagggttaattt

SEQ ID NO: 6422 - DNA, 6000 bp, Homo sapiens
ccctgccctttttgatatacactttacctattcttggggccatgtttcttatctggatatctcttcagtttatacctaacttcctacacactcacagttgcctcttcttttctccacaggtggttcagaatctggggagccttatattccaggtgtctttttcagacagtttctacctgtatcacccaaggcaagtggcagtgtttagaatattctaaatgtggaatgtggcagatggaaaactatggcttgagctttgcagcccagcactgagtgttagaagataaaagaaatttagcggctaggactttgttgtattcttgggatgtagagatgttgagtctgtcatgttccttgtcttggtcctcaggtgcagtttgatgtagtagtgtcagctttttccttaagtgaactgcccagcaaggctgaccgcactgaggtagttcaaaccttatggcgtaagacaggtcatttcctggtgagttaaaattccttgttctccttaagtcttgaagcagcttcatggatttcatgcctttgctcctctcattgtctttattcttcaccatttttctccttcatgggtttctttatccctctttgagggtctccatcctgattatgtaatgcctatttctttttaggactccttctccctctatgattgctcttacacagctactgacatttatactttcgtgtaattcaagtcttctgcatattttccccttttgtgaacaggtactggtggagaatggaacaaaagctgggcacagccttctcatggatgccagggatctggtccttaaggtaaggcttcttcttccctcactcccccacccatatggcaccaattactgttactctcttgaaaacgaaagagactgtcatgtattgacaagggtggctctcaggaaactgggcgtatgaagtcattatgatacagagcagtggttggcaaatgagagcctgtggatcaaatccgacctgccacctgtttttatataagccatgcttatttgtgcctctgttgtctgtgactgctttcacactacaaacagcagagttgagtagttgggacagagatagattttgcctactctctggccctttaaaagaaactttgcggactcctaatctagggcattgctgagctaagaaccttgtcactgggggagagtatgagccagtgtataatcataaatttaattgtcctggagtgggatttttttgagagtggaggttgctgacaagggagagcaccgtactatgtgccaagttcttgcctttctcctgcagcaaagagaaagttctttgtttggagtattaaagatgcagccagcttaattcaaaggacatagtcaatcgttattagaattgagtgttaaaggagtcctcagtttactgagtgcagagattgaattatgaaaatagacccttggcccagctttatttcttttatttcctttgatttcagggaaaagagaagtcacctttggaccctcgacctggttttgtctttgccccggtgagtattacttctgcctgtcccaccacacggatctgaacttaggcgtggccgggaaatgtaagatggtaaagctaagccactctccactactttgtgttcctatccagttcctacctaatgattcccctggctcttcctacccactgctcctgtcctcccttctccctggccccttttgactctattattctcagtttttaagttttgtgattgatggctcttttgtcttacctcatttttttatgtgttcacagtgtccccatgaactcccttgtccccagttgaccaacctggcctgtagcttctcacaggcgtaccatcccatccccttcagctgggtaggtacctggggatattgcagcaggaagcaaacatcctggaaaaacaggaagaaaaagaatcagagttaggaggagttggataatttgtagaatagcctggagactttagggcctacatgtatatgatttatacattgtaaaaaaggactgcaggaatggggaagaagggactgtacaaacttttttcccatatctttttcttctaaacagtctctatgttccttatcttagaacaagaaaccaaaggaagaaaagttctctatggtgatccttgctcgggggtctccagaggaggctcatcgctggccccgtatcactcagcctgtccttaaacggcctcgccatgtgcattgtcacttgtgctgtccagatgggcacatgcagcatgctgtgctcacagcccgccggcacggcaggtatggggggtgtgaccaaaatcagtgggatgtggcaggaagctgcagcccacgccagcatctgtttccacagggatttgtatcgttgtgcccgtgtcagctcctggggagatcttttacctgtgcttactccgtctgcgtttcctccatctacggctcaggatccctctgagagttgatgaggatgtgtaacaagtattttcttctatcgtgcctgccagggctgaagctgcctggtatccaggaggggaatgctggtatccccatatgtctgtgtttgtttgagatttttaataataaataataaatttttgaagaatggaagtggattttgtgattcttaaaaagtgtagaagctgggcacggtggcatgtgtctgcatttccagccactcaggaagctgaggcaagaggatcacttgagcccaggtgttaaggctacagtgaactttgattgtaacactgcacttcagcataggtaacagagcaagacgtcctcccttaaaaaaaaaaaaaaaaaaaaaacatgtaaaaggtatagttaattatcctggcctatcctgtaatgaagagcttcctcagatttttggtgccaggcttcccacacaaatctcaagctcgccctctcctattgtggcagttcagagctccataagctcttcgctgtaatgatgaatgtgtaagctgatcattaaagcagaagtagaaaaaccagatttccataagccctttgctataatgatgaatgtacaagttaaacattaaagcagaagcaagaaaaatggataaggaatcgggggaaactggtgcctgagtacgaaagccagaatacaaaaaaagcaagccctttaaagccccacctatactttctctacctcagatctagctgagtgataaaagcattcctgcacatacaacccatcccaggaccaacttaagattaagaaacttctgtctgcaagtactcactcactatggtgggatcagctgcaaagcgaactgtcccatgctcatgttgatggttttctagatactgccaacatgttagctctttctggtgccgatgaatttcaaacgcgaacagacacccttgatgtgggtttgctaagaaaatagaagaacaggaagaaaagttgccaggttcagacatcccagggaaaaagaagcgtaaacagcattagcaatcagtgactgatgataatgctgcaataatgggaatggttttatttctaaatcaaatcgtttattgctttgtttctaaaaaacaaaaaaaaaacttctacctgcagacccctagtttagattaattaggaaacattcccgcaggtagtcatagagcttgaattgtatataaaagctaaagaaaagcttgtaactttgagttggtctggtgtgctactccgacctccctgtaatcagttgcagaaataaactcccgtctttcccagtctgtctgtctgcatctcattaccggaccacaagaacaagcagcaggaccagtaacactgtaagaatcatccagtaacactgtaagaatactgcttctaccagaggccaggacttccctaggaaaataatctggagtagcaaggaaagctgcctccagagctctgagaactggctcaacaggtctcagggttgttatgtgggccacctgaataggggaatcagcagctgcctggcctcttgtactaacgccttcccttctgtctttcccagggtccctcagctaccctagagtatgtatgggaaatgccccagacatttccatcaagagtgattcccatcagaactgaatcttctacccccacctctctatatccaggtagaatcctcccattcactcagttcatttctgttttcccctaagccttgctgtttcagggctagagcagcttcctttgtcttaaaccttaaatgtctttttttccacagttcttaccaggaaacaggcacagttagaagttgtaacagtataaatgttgtaataccagacatctcaactcattcctctcaaaactgatcccaatcaaaagagaaagaaaaaaaacaaatcaacttaccactagacatttccatgcctggagctatttttctggggttacaggaaagggtagttccctcatgtgggtactagttcccacagagtagcaccagcaccacctctcagccccacctctttacctccaggtggccccaaatctctgaaagcgggtggttcaagtatcagcattgcaacctataagacttgggatgaggtggagagggtatggaaggcttagatcaaacgtcctgagtgagacaggaccagattgtccccagtacaaaatagctgggaagcagctaccatagactttcctattttggattagaccaaccccaagcacatgaactaagactatccgtagctcttggattagtcatgccattgaagaggaggagaagacgccactgggctgtgcctggcagggagtctggagtttctggtttccaagctcaggaaggcgtgaaccaggggaggggcctccatgcagggggagggctagaagctggggcaggatctgtcagctctgcaatgctgcagaagcagaagcaacacagaaagaagataccaacagcctcctgaaactcacgagagtggacactccagtgttgaccacctaagataccactcctgctccaaagattacagctcccttgtcattctgactcctgggcttaccctacaccccagagatggagcaactactaggaataaaacttggctgcctgtttgccctgttggctctcactctgggctgtggccttactcccatctgcttcaaatggttccagattgatgcagccagaggtatagccctaccccatctttgttccatagcctgagtctcacctcaaccctgtcctgataccttgctctgattctctcaccatccccaaccttgggatattgagtgctgcctgctgctctttactcacctttgtctgtctcctcagtgtcaagtgggttgtaacttctgctttttattaggtcatcaccggctagtcctcagactcctgggctgtatttctgctggtgttttcctgggagcagggttcatgcatatgactgctgaagccctggaggaaattgaatcacagattcagaagttcatggtgcaggtgagagcagagatttcaagccgcaggtctatgaggccaaaatgataaacaggacaaagggaagagagcgggaaagtgatggagccaaggacatgggtggaacgacaaggaaaatgacagctcttgtgtgggatggtgaaagcaagtcagattaggctttaaggaaaacagaattgctgaagggacagcacaggaagctgtgctgctccatcccacatctaatttctgctgctttcttcttagaacagatcagcaagtgagagaaattcttctggtgatgctgattcagctcatgtaagtacctcccaccatcccctatctggagagtgaggagaaccagagaggcctttcatatccagacccttttgagaggaatacatgaggagtaccaagaatcccttctgctccctagctcagacatcgtagaggaaaagaggagcaaatccaatccttttgagtttatagaatgccagggaaagcccttgttttactctttcattctttccctggatcctctgatatacctcacatcatttgcccatgtttttaac

SEQ ID NO: 6423 - DNA, 6000 bp, Homo sapiens
agtgagccaagattgtgtcactgcactctagcctgggcaacagagtgaggctctgtctcaaaaaaagaaaaaaagaaaagtggacagagaccaaggaacttgtggaataccattaagtagaccaacatatgcattacgattcccaaagaggggttagagaaaggggcaaaaagattatttgaagaaatggctgcaaacttcccaaatttgatgaaaggcactaatctacaaatccaagaatctcaataaactccaagtaaaataaatccaaagagactcacactgagacacattataatcaaactgttgaaagacagagaatcttgacagcagcaagagagaagcaactcataatgtacaagtgatcctcaataacactatcagctgaagtccaatcactctgagggaaaagaaaaaaaaaaagactactggccattttctcagcagaaaccctggatgccagaacgcagtgggataatacatttaaagtgctttaaaaaaaaaaaaaactgtcaggacaggcatgctggctcacacctataacccccaacactttgggacacaccaaggtagctgtgtagatcactggagcccaggagtttgagaccagcctgggcaacatggcaaaactttatctctacaaaaaaacccacaaaaattagttgcacctgtagtctcagctactcaggagcctgaggcaggaagatcacttgaacctgggagatcaaggctacagtgagccatgatcacaccactgcactccagtctgggcaacggagagagatcttgtctcttaaaaaaaaaattatgcgaaatctactctgcctgtgttctataaagggaacaacaaagcctggatgacagcatatctgtttaccctacagtttgctgaatatgttaagctcattattgatacctacccctcagaaaaaaagattcctatcaaaatattattgcaggctgggcacagtggctcatgcctgtaaccccaacatttaaggaggccaaggcaggaaaatcacttgaggccaggagttcgagaccagtctaggcaacacagcaagactcagtctccattaaaaaaaaaattactgaccattgatagtgcaccttgtcaccctatagctctgatcgagatgtacaaggagattaatgttgttttcatgcctgctaacacaaaatcttttccttagcctgtggatcaagaagtacttttgactttcaagtctattatttaagaaatatattttgtaaagttatggcggccatagatagcaattcctatgatggatctgggcaaagtcaattgaaaaccttttggaaaggattcaccctcctagatgccattaagagcatttgtgattcatgggaggaggtgaaaatatcaacattaactggagtttagaagaagttgattccaaccctcatggttgatgttgaggagtctaagactttatggagggatgtaactgcagatgtggtagaaacagcaagagaactagaattggaagtggagtctgaagatgtgactgaattgctacaatctcatgataaaactttaagagatgaggagttgcttcttctagacaaagtggttttttgagatgacatctactcatggtgaagttgctatgaacattgttgaaatgacaacaaaagatttaaaatatcatataaacttaattgacaaagcagcagcagggtttgagaggactaactccaattttgaaagaagttctaccgtgggtaaaatcctttcaaacagcatcacatgctatagagaaatctttcatgaaaagcatagtcaattgatgcagcaaacttcattgtcttattttatgccaccccaaccttcagcaaccaccaccttgatagtcaacaaacatcaaggcaagaccctccaccagtaaaaatatgacttgctgaaggctcagatgatcatcaacatttttaagcgatataatattttcaaattaaggtatgtacattgttttttaaacatgttattgcacacttaagagactacagtatagtgtaaacataactttttctttttttttttttgagatggagtttcactcttgttgcccaggctggagtgcaatggcatgatctcggctcactgcaacctccacctcccaggttcaagcaattctcctgtttcaacctcccaagtagctgggattacaggtgcccaccaccacgcttggctaatttttgtatttttaatagagacgggtttcaccatgttggccaggctggtctcaaactcctgacctcaagtgatccacccacctcggcctcccaaagtgctaggattacaggcatgagccaccacacccggcctagtatttttttttttaagagatggggtcttaccatgttaccaaggttggtctcaaactcctgagctcaagcgatccacctgcctcagcctcccaaagtgctgagattacaggcctgagccaccatgccggcccaacataacttttatatgcactgcaaaacaaaaaaatccctgtgactcactttattatgatattggctttattgtagtggtctggaacccaacccacagtatcttccaagtttgcctgtacattttagctatctattattaaacaacttagtggcttaaaactacaataattttatttatttgcttgtaattttgcaatgtgggctcaaatagcctttctttgctccacacgcagtcacctgaggtggctccagtgggctggagaatccactttttaaatggccttcttcacgtggctggcaaaagttggtgttgactgctggctgggagttcaactgaggctgttggcccaaacctcagttcttcttcacatggttggttgggcttttcacaggcagtaagtctgagaagtcaaacttctaacacagcagctggcttcccccgaatgcaaaaacagaagctatcaggccttcttaaggcatagtcccaaactggcataacatcacttccaacgcattctactattgattaaagcaagtgacaggcccaatcagactcaagagaagagaactcctaaaggtgcaaatattgggaagcctggttcatttggggccaccaaagtagcagtgtactgtaagatagtcaccctgccaagtgttctgtagctgtatatttgtaattacttctaattgtattgagttttaaaagtaatctctaaaaaaaaatcagtgtttccatatcaaaaatctattgatgtttataatagcatccaacatatgcaagtgttagctcataccactaattattactaaatcagtattatagttctttgcctcctattttcgccatatctgtcaggtacattcataatcgttccaaatgagcagtcactgaaataatttcaggttattgtatctttctgaaactataatttgttgtttagaaagtaatctgcatattgagagactttgtaagggttcaaacataatcaaactccacctttctgaccagtaacttttttccctgaagatgaatgcttttaacttcaagaaacagaacacccaagcaacagacttagagtctaaacagtaaagacctttaatcatctttttttttttttttttgagatggagtctgtcgcccaggctagagtgaggtggctccacctcggctcactgcaacctccacctcccggattcaagcgattctcctgcctcagcctccctagtagctgggactacaggtatgcaccaccacgcccgcctagttattttgtttttttgttttttgtatttttagtagagacaggatttcaccatgttggccaggctggtctcgatctcttgacctagttatcgagaccacctcagcctcccaaagtgatgagattacaggtatgagccactgcacccggccaagacctttaattaacttacacaacaaagtctggagataggcagttccaagcatggtacagcagctcaatgatatcatcaagtatttgggtgttttctatctttgccctcaaccatcttcagcacgtgagtttttctttcctttttttttttttttttgagacggagtctcgctcttgttgcccaggctggagtgcagtggcacaatcccggctcactgcaacctctgcatcccgggttcaagtgattctcctgcctcagcctcccgagtagctgggattacaggcgcccaccaccacgcccggctaatttttgtatttttagtagaaatggggtttcaccatgttggccaggatggtctcgacctcctgatctcgtgatccacccacctcggcctcccaaagtactgggattacagacctgagccaccgcgcccggcctgcacgtgagcttttcatctggaaacttgtcccctcatggtcagtcctcacaccaccccacttacagaagaaaaaaatggaaaggtgaagtctcctctggaagcttcgtctttttatctgggaggaaaatatttcccagaagctgccttcttttaatttctgtcagactctagactaccctcaaatttcactggacctgcgattacaatattacctagcaataagaatcaaaagaatcgaacatcattgagtgggaaaaatcctctgcaagtacagccaagccttttctgaggctatttttaaacttacaaatcagaggacaatcgcgacattagaggaaaattacccaggtttacgccatcactaacgatgatagcttacgatgatagctaacccagctcttcaacttcctttcaatctccagaaaaggctctctgcgtgctaatggtaacgtggctttacagatttttacccacttcaaatatggccgccaagctccgttctcttttaccgcctgatctgcggctacaattctggcttcatgcccgcctccaaaagtgcttcctctcgaggggttgtggttcttactgcgcaggcgcaaaagcaagtcctcttccgggcaaaatggcgatgggactaatgtgcggacgccgggagcttctgcgcttgctacagtccgggcgtcgggtaaggatgccccggggcagagcaccgggatgctgccctgacccagtgaaccaggccccaggacagctcgtgctaggggtatcagcagacgctgacctgctcaccgggacctgaatgtcatgacctcgggtcatgtgaggacgcgctagggttagtccccgacactatgggcccagcagcccggtgtcagcttctggaattggcttggctcctggcgagagcacctcggcctcgttctcagggccctccgatgtgggtctgcgataactgagatgcggggaacccaggttcgagcttcgctctgcaggcaccacccgctgcatgccttcgggctagcggtctgcgcgcggtgatagcaatgtcctcccctgtagtggccgagctgcctgcttcttggggagttagcataatgaatcccgtttgcacccacgcgaggacttctgctcccggtaaaggggctccatcatccttttacacgctcaggtccacagcgtcgcagggccctcgcaatggcttgggaaaccgctgaccacacggctcctattcccagcagccccgtgctgctgtcgcccacactacctcttccttgcggcttccggcccccgcagcctcagtacctctgctatctcttttgcagaagtccaggtaagaggcctttcgttcctgcaatattaggagtggtgtttcctggttggtttcatattttgttttgtttgggagcagggggaatatggagcagagttcttgtccacgctccacacagctctccaaaatgatagcatctctgcttaggatggattttcaattcagtggggaaatgattgaaagtacaacaggagagatgttatatttggttttctgagctgttttaaagaaaagcaattgtttcatgttaatatatggcaaaaatcatgatagtgatattcaaatggctgaagtttggaaaacagtgataaaagaaataacttcccagcatgaa

SEQ ID NO: 6424 - DNA, 6000 bp, Homo sapiens
ttttaatggggtctcactctattgcccaggctggggtgcagtggtgcagtcttggctcactgcagcctcaacctcacgggctcaagcaatcctcccacctcagcctcccaagtagctgagactacagatgcacaccaccacatccagctaatttttgtattttttgtagagacggggtcgtactatgttttccaggcttgtctcagaactcctgggcttgtcatttatagttatcccaatcccaatctgcatgagattcgagagattagcttcaggatccctgaagatatcaaaaatccctggcttccaccttcacagttctattcaatcttctcattaatcttgggagcaaagagagagttagggcgtgggaccaaggtccaagtggaagaagagcctttttatggccaactctatggtatcaggcccaactaaggccctacaacaataaatgtcattaatagaaaactcttctgagtctgggtgcggtggctcacacctgtaaccccagcaatttgggaggccaatgtgggtggaccaccagaggtcaggagttcgagaccagcctggccaacatggtgaaactccgtctctaccaaaaaatacaaatattagccgggcatggtggcacgtacctgtaatcctagttacttgggaggctgaggtgggagaatcgctttaacccaggaggtggaggttgcagtgagccaagatcgtgccactggaccccagcctgagcgacagagtgagaccctgtctcaaaaaaaagcaaaaaacaatcaaacaaacaaaaaagaaaacttctggctggcttgttacagtggtgttcacaactagttgatcacaatcagttacagatttctttgttccttttccactcccactgcttatttgattagcctttaaaaataatagggccggggccgggcgcggtggctcacgcttgtaatcccagcactttgggaggccgaggcgggtggatcacgaggtcaggagatcgagaccatcctggctaacacggtgaaaccccatctctactaaaaatacaaaaaaattagccgggcctgatggcgggcgcctgtagtcccagctactcgggaggctgaggcaggagaatggcgtgaacccgggaggcggagcttgcagtgagccgagattgcgccactgcactcccgcctgggcgacggagcaagactccgctcaaaaaaataaaaaaataaaaataaaaataaaataatagggccggccaggcgcagtgcctcacacctataatcccagcaatttgggaggctgaggcaggcagatcacctaaagtcgggagttcgagaccagcctgaccaacatggagaaaccctgtctctactaaaaatacaaaaattagccaggagggcgtggtggcacatggctgtaatcccaactacttgggaggctgaggcaggagaattgcttgaacctggaaggcggaggttctggtgagctgaggtcgtgcactgcactccagtctgggcaacaagagcaaaactccatctcaaatcaaatcaaataaaaataatagggctgaatgcagtggttcatgcctgtaatctctgcactttgggaggtcaaggcaggtggatcacttgaggtaaggagttcaagaccagcctggtcaacatggcaaaaaccgtgtctctactaaaaatacaaaaattatccaggcatggtggcaggcgcctgtaatcccagctacttgggaggctgagaatcacttgagccaggaaggtggaggttacagtgagctaacattgtgccactgcactctagcctgggcagtgaagtgagactgtctcaaaaaaaaaaattaaatataaacaaataaataaataggctgagtggagtgtctcatgcctataattctagcactttgggagaccgaagcaggaggatcacttggcccaggtgttgaagaccagcctgggtaacatggtaaaccccatctccacaaaagatacaaaaattaggccaggcacagtggctcatgcctgtaatcccagcactttgggaagccgaggtggacggatcacaaggtcaggagattgagaccatcctggctaacacagtgaaaccccgtctctactaaaaatacaaaaaattagctgccatggtggcatgtgccttagtctcagatacttgggaggctgaggcaggagaatcgcttgaacccaggaggctgaggttgcagtgagccaagatcgcgccactgcactccagcctgggcgacagagcaagactccgtctcaaaaaaaaaagatatgaaaattagcccggcatggtgacacacgcctgtagtactcaggaggctgaggtgcgaagatcacctgagcccaggaggttgaggttgcaataagccaaaattgtgcaactacacaattttgtagagtgagaccctgtctcaaaaaataaattaattaaaattaaaaattaaaattgccgggcgcaatggctcacgcctgtaatcccagcactttgggtggccaaggcgggtagatcacctgaggtcaggagttcgtgaccagcctgaccaacatggtgaaaccccgtctctactaaaaacacaaaaattagcccggcgtggtggcacatgcctgtaatccaagctactcgggaggctgaggcataagaatcgcttgaacctgggaggtgaaggttgcagtgagccgagattgcgtcactaaactccagcctgggcaacaaaagtgaaactctgtctcagaaaaaacaaaacaaaacaaaacaaaacaaaaaactattttatatcatttgtagaggggagaaagtggttaagatcagaatgtgcactctgtccagagccagattccctgggttcaaaccctagcttcatggccgggcgcagtggctcacacttgttaatcccagcactttgggaggccaaggcgggcggatcacctgaggtcaggagttcgtgaccagcctgaccaacatggtgaaacctggtctctactaaaaatacaaaaattagctaggcgttgcggcgcgcacctgtaatcccagctacttgggggggagggggcgggggagctgaggtgggagaatcgcttgaacccgggaggcagaagttgcagtgagccgagatcgcaccactgcactgcagcctgagcaagactctgtctcaaatatacatataggaatagtcaatatactttattgtttagggaataatgacagggaaataaattatgtacatattcaaaacagatgcggctgggcgtggtggctcacgcctgtaatcccagcactttggggggccgaggcgggtggatcacctgaggtcaggtgttcgagaccagcctggccaacatgatgaaacccgtctctactcaaaatacaaaaattagccgggcatggtggcagcgggcgcctgtaatcccagctactcgggtggctgaggcaggagaactgcttgaacccgggaggcgcgaggtggaggttgcagtgagagatcacgccactgcactccagcctaggcgacagagcaagactccgtctcaaaaaacaaacaaacaaacaaaaaaaaacagatgcaattccactcaattcccccaaccccacccctgataatattttccatctacgatcagttaaatctgcgaatgcagaacccaagatatggagggcccactgtactagatcttgggcaaaatacttaacttttctgtgcctgcatttctcggaataccttggaaattggaagtaataatagtatgtacctcacagggttgtttagaggattaaacccgcaaatgcttgtaaagtgttaatgtatttagtatatactaaaatagttcctaagtatttagtaaagtgcttacttagatctgtgcctgaaaagtggaaaaatctaaaattgtttgctatttgttgtgtttattttttcactgaaaattctgagcttcaatattgtttattaatgttatctatcagtgccacaggaaatcggtaacctccagctcacacaaattagaaacaccttctgtgactgataataatagttgctaccagatatggagcacttcctgtatgtcagggaacttgctctccttaaatgttagcaacaaccttaagaggaagttgcactatcataagcctcattttatacctgaggagaacagagaggttaagtaatttcctggaggtcacagccagcaaatggagaaggcgtacttattcatttatttaccatttattgagttcttcctgtgtctcagcaggagagaagccctgtaggtgcaaaggtaaacagtctaggccccagcctacgggaagtttcagtttgcagagaaggggcggggcgggggcgggaatgacgaataaatagttaccgtaccgtgtggtaatagctgtaataaagtctcactccgaaaagtgctgccggatctcagaccctgggacaagaaaagtactgagagcttagggcccaaaggaaagacatcacagttatggaataagcagacgtcctttgacaaacgtgtgacaaacatatgacaaacatgtcctgtaacgacaaacgtgttacaccccaaggattaaacaaagcagggttaaatgtggaagctgaagctgcaagtcaagggcccgtctgacaagtccggcagggccgggaaaggggttaaggcgagcaagtgggtgtggcccgtgcgttgattggcaggggtgggaccgggcttgtcacccgccccggctactccaacccctgggcgggcgggggtaccgcctgggcaagggccggggcgccgggccgagccacctcttcccctcccccgcttccctgtcgcgctccgctggctggacgcgctggaggagtggagcagcacccggccggccctgggggctgacagtcggcaaagtttggcccgaagaggaagtggtctcaaaccccggcaggtggcgaccaggccagaccaggggcgctcgctgcctgcgggcgggctgtaggcgagggcgcgccccagtgccgagacccggggcttcaggagccggccccgggagagaagagtgcggcggcggacggagaaaacaactccaaagttggcgaaaggcaccgcccctactcccgggctgccgccgcctccccgcccccagccctggcatccagagtacgggtcgagcccgggccatggagcccccctggggaggcggcaccagggagcctgggcgcccggggctccgccgcgaccccatcgggtagaccacagaagctccgggacccttccggcacctctggacagcccaggatgctgttggccaccctcctcctcctcctccttggtaagaaccgaaacgataccaacccccagccttctgtcaccgggccagcagctctaactccctccagtgcggccccgcactctatcctgcctgcccattccccccagcccctgccgccagccccagcactgccggccccaacccccaggaagtcttcagctgctccgctgggccctggtcctctctccggcttcccctagatcaccccaccaaccccacaaggccctgctgccggaccttccttccatggaagtcccacgccgcagccctctcccgccccccactccctcttccgattaactgcccggaagtcccggatggctcccttgagttgctcaggtgaagaagaaaactcctaaggagtgtctcacgctcctgccctttctcgttcctcctctaggaggcgctctggcccatccagaccggattatttttccaaatcatggtgagttgagggaacctctggggctccgtgggcttgggaatgagggagcagtcgagaaggactctctgttccctgaattccatgggacctaccaaagttttagaggggagataatttagcctttatttatagataaggaagctgaggctcggtgtggaccttcatctggtagttgctatgtactattttattttttctgggaatatctatgcttgatcgtcctaaccagg

SEQ ID NO: 6425 - DNA, 6000 bp, Homo sapiens; identical to SEQ ID NO: 684

SEQ ID NO: 6426 - DNA, 6000 bp, Homo sapiens
gctgcggggcgcccgctggggctccgggcggcacggggcgcgggtgggccggctggtgagcgccatcgtgcttgccttcggcttgctctgggccccctaccacgcagtcaaccttctgcaggcggtcgcagcgctggctccaccggaaggggccttggcgaagctgggcggagccggccaggcggcgcgagcgggaactacggccttggccttcttcagttctagcgtcaacccggtgctctacgtcttcaccgctggagatctgctgccccgggcaggtccccgtttcctcacgcggctcttcgaaggctctggggaggcccgagggggcggccgctctagggaagggaccatggagctccgaactacccctcagctgaaagtggtggggcagggccgcggcaatggagacccggggggtgggatggagaaggacggtccggaatgggacctttgacagcagaccctacaacctgctgcccttccctgtccctttccaccccccacccaccctccagaggtcagtgttctgggacatttggggacccttctttgactagagtttggatctggctgggtaggattactatacacttggggcaggcccaggctcctccaaactgagggattatgagggtggtgatggtccctgttaaggactattgtgtgcttgcaagttggcatgtacccatgtgccagcattgcttacttgttgccaatagctgttattgtgaaatacactgggaagccattagatgatgacttaagtgtgcttcccctggtggttcttcatgcctgagttgtactgaagccacctagttccctgctgggtcaagccaggctgggcagtgccagccttcagtggcatcttgacctgccctcctcagcccaggtgccctggttccacaggccaacccatagaaccactctggaaataaaggagaaaatggaaggagaggtatgggagcttggatgaggggtaggaatgggatccattctctgaggcttataaaagcctctgaggaggaaatggctctgaaggggaaaatgaatctgtggggtttgaaaaggaagttttcctgcctgtcttgtatttggtccagtgagtatgagacaggcacacaaggagtggacagtggtgtaggggccctgggagtctgagacttaccttgccccctgaccatctgatcctccctgcaaaggccacctgacgtgaaaaggagccaggagcaagcactcagtcagggaagtttggaggttggccattggggtatgaggaatggcaggaatatttagaggacaggaataatttttcagagaagtgccacatattctttttctctttgccaagtctgggctccttctaagatgctgctagctattcctagcccgttccccaatacttctctgcccccaccttttggaatccttatctaggtctaaaaacggttctagatcctgacccctttgattgggggatgtagaatgggattcttttcaggggacatccacaagtacacatctgtggtcactaaggtgaccagctcatcccagttggcctggaactttcccagtttaagcactgaaaactccttgtcccagccctgccggtttcccaacaaactgagatggttggccgctcaagtggctaccctgaccatcaccccaggctctactttagcgactgctcacacctccctgcttcccagacagaagtcaaaacagcaaaagaaacccagtccccagggtcatgctagggctaccaaaactgggatgaactagcacctgtgaactagaacagcagggagtatgcttagagtgcctggtcctgggtgtggggaagaaaggccatcaaggtagatgcgggtggggaacagcttgagagaggaggcaaggacaacccagtttctgtctgaaggggcctctggttgaccctggagtttctgtccccaaacacaggcctcacgggattctttctgtcctcatgcactgggcagaggttccttaacttcctttgttgcacattgccattctctcacatcccgtgcggtcaggaagcccttcctgaactctgacttcagttcttgctgcggtttctgcccatttttttcatatcctctgacagctgcgaggtcatctctgctctggcttttctccaagcagaacaagtgggggctctggaaaggttaagggacctcagtggccaccattatactttgcatctttcctgagaagtgagagttgaaagggaagcaggaaggcccatggtcagattgaaggaaggactttttagtttcttttttttttttttttttttttgagatggagtctcgctctgtcattcaggctggagtgcagtggtgcgatctcagctcactgcagcctccacttcctgggttcacatgattctcctgcctcagcctcccaagtagctgagactacaggcacatgccactacacccagctatcttttgtatttttagtagagacggggtttcaccatgttggccaggctggtctcaaactgctaacatcaagtgatctgctcccctcagcctcccaaagtgctgggattaccggtatgaaccaccacaacctgccaggaatttttagtttttagcttttgcaggagacttcaaggaaaggagacattcctctgtccaggaaacgggtaaggggaccatttctgcattgctggtttcccctcttggcagggtgggcatgaggcatcactgttcctgctccctcactcctgctcctcatgctcagcctgccagctcggcctcaactttgtgtgtctaaagtggaactgaatagtaggctgtgagaagataggaaagaggtagtgccaatctccttgcccagatcataaatccagactcagcagggtaaccacatgggcaagcacaaggtaggtgcttggggaaaggggaagtaattggcattctgtgtgataccaaggagaccatttggattttggcttctaccaaagagaatggagaattggttgacctaaatggaaccagtccctttaagtaaggggaggaaagggggtgctggaagatggccctcttcccaccacctagatcatagcttgaactgaagccaaggacagagtgctgcccccttcggcatttactgatgtgccctctttaaatcatgatgttatctaacccaaacccagacccaggacctagtcacagctccaacctacacttcctattaatcttaaaacaaagcaaaacaaaacaaaaagatatcagcattgtagcctccaatctgagcccatttcccttctctggctaccatacctccttctcctatatgataccattcactactttgttcaattatccagtctagacctgcatcttgaggccacacccagccttctcactccccacacccctctttcctctctcactgctccttcctggtctcttctcatctggccccacctctaaggagtcctcctgccttctgggttgccctggaaaacagactatcccccctcctagtgaagggagtgggtaggggtttcagccccaccctcaggaagatgcgtcttccctgtcctctgctctgtggtacttcctctctggctgatttagcaaacagcacctagacctggggccaggcctttggcagtgggacagatccagggataggctacaccaccctgccctgaccctgggattggcatcagcttccaaccagttcctgccaaagcttgtaagtaagtttcctgggagcggccgtggttgtggtggtggtgggacagtgtgcagccatgaaagaaggtgcaaaggaatctccaaagaaagcctgaccagcgtaaaaagttgggaggctttgtccttgtcacttgtccactaaactcctcccctccctgttattcctggttgaccctgggcatctctggggacagtaggcaggtgattgggaaagttaatgggattgaggggctgagggcctggcagggggcaaaaagactggcctttcaaggggtgcagcattggtaggaactctgtttggttctgggctttagggtctcctaaggggaggagactgaaaaggtctggaaatgctgctgctgctgtggtcactgtatattttgcaattgggtctgtggacaggaaggggccgcatgacccagttaggaaactagtctttgtactcaaccagatccctttaagttgtcagtctgcagcgatgggggcagtatatttcagggggacctctgatgctgctgaccctggagatagactagagttctcagcctaggtgtgtccatggcgtcaggaaacccttggtcctctactctcatgcgtgtgtccgccctcactctccaggtcctcccgacggccatgaacactacatcttctgcagcacccccctcactaggtgtagagttcatctctctgctggctatcatcctgctgtcagtggcgctggctgtggggcttcccggcaacagctttgtggtgtggagtatcctgaaaaggatgcagaagcgctctgtcactgccctgatggtgctgaacctggccctggccgacctggccgtattgctcactgctccctttttccttcacttcctggcccaaggcacctggagttttggactggctggttgccgcctgtgtcactatgtctgcggagtcagcatgtacgccagcgtcctgcttatcacggccatgagtctagaccgctcactggcggtggcccgcccctttgtgtcccagaagctacgcaccaaggcgatggcccggcgggtgctggcaggcatctgggtgttgtcctttctgctggccacacccgtcctcgcgtaccgcacagtagtgccctggaaaacgaacatgagcctgtgcttcccgcggtaccccagcgaagggcaccgggccttccatctaatcttcgaggctgtcacgggcttcctgctgcccttcctggctgtggtggccagctactcggacatagggcgtcggctacaggcccggcgcttccgccgcagccgccgcaccggccgcctggtggtgctcatcatcctgaccttcgccgccttctggctgccctaccacgtggtgaacctggctgaggcgggccgcgcgctggccggccaggccgccgggttagggctcgtggggaagcggctgagcctggcccgcaacgtgctcatcgcactcgccttcctgagcagcagcgtgaaccccgtgctgtacgcgtgcgccggcggcggcctgctgcgctcggcgggcgtgggcttcgtcgccaagctgctggagggcacgggctccgaggcgtccagcacgcgccgcgggggcagcctgggccagaccgctaggagcggccccgccgctctggagcccggcccttccgagagcctcactgcctccagccctctcaagttaaacgaactgaactaggcctggtggaaggaggcgcactttcctcctggcagaatgctagctctgagccagttcagtacctggaggaggagcaggggcgtggagggcgtggagggcgtgggagcgtgggaggcgggagtggagtggaagaagagggagaggtggagcaaagtgagggccgagtgagagcgtgctccagcctggctcccacaggcagctttaaccattaaaactgaagtctgaaatttggtcaaccttgtgagtggggtacatgtgctgtgggtatcggggtgctcgtgggcgccctggtggggcccctctcggtagttgagagtcacgtcctttagttccccatgatttacaattttggaagggacacaaagaaacatagacttcccccatcccagatgattccgagtacatagtctgcagataatacttagcaaaacgcagtctacagactcctaaagcagcttgtctaggaagaccacccatgtgggcttatcactccaggttctgtgacccgggaccttctgagaaaacagcactgctgtgaaatatcttccttgaagcctgtgataagtctccttgt

SEQ ID NO: 6427 - DNA, 6000 bp, Homo sapiens
cagtaaaaaatggtcaaaatggtctggccgtggtggctcacgcctgtaatcccagcactttgggaggctgaggtgggcagatcacgaggtcaggtgctcgagaccagcttggccaacatggtgaaaccccatctctactaaaaatacaaaaattagccaggtgtggtgcacgcctgtaatcccagctactcagaaggttgaggcaggagaatcgcttgaacctgggaggcagaggttgcagtgagccgagattgtgccattgcactctagcctgggcaaagagcaagactctgtctgaaggaaaaaaaaaaaggtcaaaatggtaaattttattttatacatattttaccacaataaagaaggtatactaatacactactttttttaaggattataaataaccatactcctttattttaagttcagtgatactctcacttcttaaaattttttttaatttttaatttttttttttttttgagacaggttctcactatgttgcccaggctggtctcacattcctgagcttaggcaattcacctacctcggcctcccaaagtgctacgattacaggagtgggccacatgcccggcctcacttcttaaaatattcgggttaataaacattcttcagaaactcaagttattttttaaattgtttaacaaattgcttgagcttcctcactacaggatctgctgaagagaggcacaagaagtacctttagatcaggtacgatggctcacacctgtaatcccagcactttgggaagccaaggtgggagtatctcttgaggccaggagtttgagaccagcctgggcaacatagtgagacactgtctctacaggaaatttaaaaaagctgggtgtggtggtttgcaccatagtccagctactcaggtactcaggatgctgaggtaggaggactgcttgagcccaggaggtcaaagctgcagtgggctataacagtgtcacggcacaccagcctccagcctgggtgacagagtgagaccctttctttaaaaacaacaaaaagtacctttaaaaaaagtaaaaatagggccgagcgcggtggctcacgcttgtaatcccagcacttcggaagaccgaggcgggcagatcacgaggtcaggagattgagaccatcctggctaacacggtgaaaccccgtctccactaaaaatacaaaaaaattagccaggcgtggtggcacgtgcctgtagtttcagctactcaggaggctgaggcaggagaatcgcttgaacccaggaagcggaggttgcggtgagccaagatcgtgccattgcactccagcctgggcgacagcaagactctgactcaaaaaaaaaaaaaaaaagtaaaaatatattctttagccagtgatattggctcttgtttacaaaattatccaaaacgttctttcaagtcttcctgattttgaaaaatagagtctcaactgatatctctaaaatttgaggctgggtacagtggctcatgcctgtaatttgaacactttaggaggttgaggtgggaggatcccttgaggccaagagtgtgaggctgtagtgagctatgatggtgccactgcactccagcctgggtgacaaagaccctatctcaaaaacaaacaaaacacaggaaaaaaaaaatcaaaatttagattgcaaatggctccacaaaacaaatcttgagggcaaagatgttttagtaattttacaattgccagctctaggcagtatgtgacatctttctaggcactcagtgcttttagaataaatgaccttgtgctgaggaatgtgaaaaaaaagatgtaaatcggtgctgttttattgacaaatgggatatgaagaatgaaatgtgcggccgagcacggtggctcacgcctgtaatcccagcactttggaaggcggaggcgggcagatcacgaggtcagcagatccagaccatcctggccaacacggtgaaaccccctctctactaaaaatacaaaaaattagccgggcgtggtggcgggcgcctgtagtcccagctactcgggaggctgaggcaggagaatggcgtgaacccgggaggcggagcttgcagtgagccaagattgcgccactgcactccagcctgggggacagagcgagactccgtctcaaaaacaaaaacaaaaacaaaaaagaaatgtgcaacatagggtttagatgaagtgacaggagactcagcatattatggaaattattatcttgattttgtgtatatagaaataaagctgtatccggctgggtgcggtggctcatgccagtaatccagcactttgggaggacgaggagggcagatcacgaggtcaggagttcaagaccagcctagccaacatagtaaaaccccgtctctactaaaaataccaaaattagctggacgcggtggttcgtgcctgtaatcccagctactccaggggcaggagaatcacttgaatccagaaggcagaggttgcaatgagctaagatcgtgctactgcactccagcctggcgacagactgagaatccgtctcaataaataaataaataaacaaagctgtgtatctggttttctatactttccaggtcaaatctcactagcagatgttcctgttatcttcagtttgacatcttatctaaaatgactcctaaaatgtgtaataatgttaattataatatctaaacctactgactctaacatcacaaagaattttaagaggtcgaggttaaaaatctaaaattgtaagtcatcagctaacaatgacatttcaagtcatgagcttggataaaaataaccatggaaatcaccattcagcaaaatacaggcatagtggccaggcgtggtggctcacgcctgcaatcccagcactctgggaggcccaggcaggaagatcacctgaggtcagcagtttgggaccagcctgggaaacatggtgaaactccgtctctactacaaatacaaaaatgagccgggcgtggtggcggacgcctgtaatcccagccactcaaaatcgctcgaatcagggaggtggaggttgcagtgagctggatggcgccactgcagccccgcctgggcaacaagagtgaaactctgtctcaaaaaataaatacacacacatacacacacacacacacacacacacacacacacacacacacactctcgcatacaggcataggatagtttgctatagttaacaaacataagaatatcctattttcttgagctttcatcaggctttactttgccagaatacatctatcccatttttcagtaactagatctagctaccacatttcctcagttttaacgtgtgtgtttaaagagacagggtcttgcgtcgctcaggctggagtgaagcagcgggatcaaagctcactgcagcctttttctgtctataaatcttcaacacttggctgcgctgcaatctctctgagcctgcccgattcgtgaatcattctttgctcaaaatgttaaatttaacttggctaaggtttttcgtttaacacttcctactaacgctacagcctaaaacctctcctgcaaaatgctttttcaggtggcaacgtaccaattctaacaagtttgtgggagtaatggggaggagggctaaccctctattttctttcagaaaaagggttaggcacaaggagctctaaaggcttgtccgaagtctgctgaaaactcacaaaccactcagaaccaggtttcccacacccaattaattccaagtggtactgtatccgattacccccattttccaagagatagtttattttttcccctcttttcccctccccactacactttccacttagccctttttgaactgcaaaataacctctcaactcccctcaccagaccattctctacagagcaaattcatctacgagatccaagacgcaactcccaccgccaggcggtcgcctcagaagggtaagcagaaagcatgcccacttggccacttttacaacttatttctgctcagaaatgcaccaactcaactacccggtagataaggcaccagctagcagagacctcttgctcatttcctcttgtaccttataaaatgcccgcttttttgctccaaagacgaagcgggctggcttcagaaataaaatccctcttcttgtatactagggctcgctcttgttaattggtgtctacgtgtggcgagcaactaactctcttttccgttagagcactcaaagccctggtcaatctaccccccaagacagcagagaccagcacaacgatcccaaggaaggctgttggcttcaccccgcttaagtcctcaaagtcagcgcctgcagcatatccttgcccccaccacctgcctctagctctggtcacttacacttacggttagttcgcatccactgtaacagcgcctggcggtcggcaggagccacagtgcgaagcggccgcagcatcactgcctgcctcgcagtgggaaattttaccttgctggagcaagccgcgcaggcactggctggcattgcgcatgcgcaagcagagaccgccccaccctccgcggaacaagcctccggtctgcaaagccctaagccccgcccctctacggaggtctcacgtgcgcctggggatccctgccttcagtcacacctctatctctcatctttccgctcttagctgggagtgctccgcctagtcacttttcttaaggtggctcgtcgaggcctgacttcttccccgaaatcacgtccctagacagcctcctattttaccactaactttactcctgcagttattcagcggtaggaaactgaaaccaaaaaccagtgtaagcaagtaaacatctaaactgtttcaggagccgcgtagaaggaacgcggcggtgtgccccggaagcggaagtagattctcctatagaaaggctggactacgcggagtggtgacgtttcctcattgggcggaaggttcgctggcactccgttggtcttccagctggtgggagttgacgacgtggtgctgggcgttgggaccctactttatctagttcgggaagttgggttgtggggtcatacctgtctgtctgctcccagctttcttgggtttcttccgacggcgtggggcctcgctaaggaattcccggcccctcagggccacggctttagcggtgtcttttgcggtaagtgtctgctttttcccgccccagactacggagggggagcgaggggcagccccagcgctgctcaggaggcgagagactccgggggaagtcggcctccgtggccaccggccatcgttaccgagactgagtttctgtggctctttatctcgtcttccatgagaagttttattaaagatgcgctgtgccccttttgagttgtcttccgatttacctgagccaaataagatgtaggcagttgcaggcctgagtcttcgttttgctttcctgagcaagaatttagatgaagctacttccccgaaaatccttttacttgtacgagacttttatttttcctatgtgtttgtagtgcttaacacaatgtcctgcgtgtagtagacgttcaataaacgaatatggaatatcagttgaatgccaatgatgatttaagatagactgatagctctctctgtaccatttgacgctgctgaccatccatttcttgaaactttcccctgctgcctttcttcatgctatcctcacctgattctttcacatgcttaatttaacaaaatatatacttgttcttggctacaaggatacagaaatgaataacactaactctgccattgagaagctaacgcacataaatacacattatatcaagatgggtaatgagaaacactagttgcatataaagagctgtagaaagctgtgggagagctaaagtgctccttaggtgctttgtgaccctgagccagtttctattccaatctagcctcaatttcctcatctacttaataggcttgttttgaggaagaaaggagattaggtaagaggtttggtttggtttagtgcctagaatacagcaa

SEQ ID NO: 6428 - DNA, 6000 bp, Homo sapiens
atgatcaatgaatgagtcatcagtatgacaattgttgatataggacatgcaaattgaaattatttagaataatttaagtgtataaggaattaatacacatgatgatattcctcagctagtaaagctctacttataaggagctcacagtttatttctttgcatctacattttataatctagaaaagaggaaagtactatccatgggatgccttgacaaaataaaacaaggtgatttggggcaattttgtaggtactgcactagatgctggggatagaaaaataaataaaatgcaagcccctggtctccacaagcttacaaatttataagagggtacagacaagtacacaaaaagccacagtacagtgtgataaatataataatcaaagtgtgcacctggtacatgatagcacaggagagtatagcttgtaggagaaagttacagtgagggaagaaaatcagtctgctcaagaatctgcaacttcctaaattggaacatttcattttcccctttctggaaaacatctccttcttttctatctataaatgttcatatcacagaggcataggaaagatggtaaccaaagagggctggaggacaggtaacttgtagggagaaaacaagctcttcctaatcttttcaaggttttagacatgtgaacctaaaaagtttttaacaagacaagaagattgttgagtcctgactattcactggctgcgttttttgcaaattaaagtgatctcatgcccatatcagttttcctttttctttggaaatatttacattaaattgagatctgaggggaagatagcgctctaactgggatcctgcttttaatataatttgaaaatagctgcaaccccaatccaccttcctggtggcccagaaatgccaccctttttgtttgtttgtttgtttttgttgttcatagattagttcacaaatacaataattagaaatacatgactgggctgagcacggtggctcacacgggtaataccagcactttgtgaggctgagacaggaaaattgcttgagctaggaattccacaccagtctgtgcaagataggaagaccccatctctacaaaaaccttaaaaattagccaggcatcgtggggcacacctgtagtccccagctactccagaggctaaggtgggaggatcacttgagcctgagacatcaaggctacagtgagctgtgattgtgccactacactccagcctgggtgatagagcaaaaccctgtctcaaaataataataataataataataataataataataataataatttaaaaataaatacataactgaaaagatttaataatgctgcatagcttatatccatctcaatccctctctttgtctttctctcatgctttttaaaattgaagtaaaactcccataatataaaatttataattttagtcatttttgaagtgtacaattcagggatttttagcatattcacaatgttatgcaatcatcaccactatctaattccagaacattttcaccactcaaaaaagaaagctcatacccattaagcagtccttcctctttcccctctgcccccagcccctggcaaccactaacgtaccttgtctgtatgtattgcctgccctgggcatgtcatataaatggaatcatgccacacgtggccttttgtgtctggcttctttccctttgcatagtgttttcaagcttcgtctacgctgaagcaggtattagtacttcatttctttttatggttgaatactattccattgtatggatataccacaatttattaattcagcaattgatggatatttggattgtttctaatttttggctattatgaatagtgctgctatgaatgttcatgcacaagtttttgattaaacacctgttttcaattttgaggagtaaatagaagtggaattgctggctcatatggtcattcttttaaacttttaaactttttaagcaattgccaaaatttttttctgaagttgctgcatcattttttattcccaccagcaatgtatgagtgttctaatttctccacattctcactaacgtttattttttgtttttaaaaatgttcttatagccatcctagtgggtgaaaagtggcatctcaaaaaaataaaaataaaaagcattctcacgtcaggtcttaagttttcttcttttgtatatgaggccacaaaattgagagaaattttccctaagatgagctgaaagtgaatttaatgaaattctgaacaacagagctgtttttcactgactcccatcacacacttcccaaagagcaaccatgatcaaagccaaggcatctaaataatgactgttgaaatccaagctcccagaggtacagatagtcaggtgtctttagtcagtgattggcagaggcatctaaggcattatatgaggcttggctagtaaaatgctcttctgggattctgggacaatacccactctcttttcttttaacttaatgaacatttattttctctccatatgtgctgtatttgtaaaggaaaaataaatataactaaacaccaattgtacattccactttaaagaaggcaatttgttcaggtaaaataatgggttaaaacagtttcagccgtatgaaatttcaaattccatcctagcacattcctcattaataattgcacacattcctatgaaagtctgtcatttattttagtctttgattgctatcatcaacacactacagaagttattctttcctgttcaagacaattagttttgggaactaaaacacatgcagtatatgtaagtgattacctggataaagcaacagggcattaggaaatatacttttttgtttttaatttctgcatccatttcttcattctggaccggtacagatagcctccatgaggagtttagcctctccttggagtaaactctactgagaggaggaaaactgagacttacagtacagcgggcacagcctggttgaggagaaggagaaactaaggaaaaactggagacagcaaagcttgaaggaggcagagcactaagctgctgcgggtcactcttcctgtgaacaggctagtttcaaataaaggcttgcagggatcttaccgagcaaagcaacgtttatgaaaaggaacagggaagttgcatggagtgtgattcttccttccacaggaacagttggaaagccaaagagaccctagagtaagaatggtggtaagtcccagggttcgtttaaaatcctgataacggaacatacattctttcttacgggaaaaccgttttgattcttaaatgaagtcagtgagcttcaggcttgcctacattgatatctcctaatggtttgggcacgtgacccagagccagctcacaaatcaagcctcagaaagagctgacatcctagctcttcccggaaaaactcgaatgtcgccctgccgttcctggggttggtgacaggtctggtcatcgcacggcggcagctcctcacctggatttagaagagctggcgtccccgcccgcccaagcctttaaactctcgtctgccagaacccgccaactctccagggtacaaagtacagcagggacgcgggtggagcccttccaagcggcgcagccttatctttcccgagtgaacacctaggtggattcccaacaccgcgcctggcacgtttctggagggagtctcaagctcctccagagctcccagctgcgcgtcctcgtttctgcagtcgatattcctgtgggagacacggggggctctgagcgctacgagctttattaagagatttgcgaatggttcactcaggtccctgaacactcccaatagcctaagctgcctgctgtgttatagcgcagaagcccctaacgcacggtggttgtcctttcttctcataacgctcgcagcttagggccagtttccgcgattctaagagtaattgcgtgggcacctgtgctggggccaggcgcaaagaagggagttggtctgcgcgaagatcgtcaacctgctaacagaccgcacatgcactttgcaccgaccatctacgtctcagtctggaggttgcgcactttgggtaaggagggcccggaacttccctggcgggtctgagctgcaaggcaagcgagggtgggaagagggaatttagggttctggactgcgggacgggagagaagctggggtctccagagaaaagggcagcaatggagggaaactgagatgaactccagacatccatgttcatggatccgtttgagtctttgctttgggtaggagaggagtggaatgagacagaatctatacctttggttcccacccgccctccagtaaggccgaggaactctcttggttcctctgagagcaagaggcagatggtgctgcgagggaaccccggaaggagccactaaagttgagcagagtgcaggactgggaaggaaaaaaatggggggcgggggggacaagccacctatgtgctctcctccctttctccaccccacccccttttttcgtagctgctgacgcgctggtggtgcctattaatcatttaccagtccagagccgcgccagttaatggctgtgccgtgcggtgctcccacatcctggcctctcctctccacggtcgcctgtgcccgggcaccccggagctgcaaactgcagagcccaggcaaccgctgggctgtgcgccccgccggcgccggtaggagccgcgctccccgcagcggttgcgctctacccggaggcgctgggcggctgtgggctgcaggcaagcggtcgggtggggagggagggcgcaggcggcgggtgcgcgaggagaaagccccagccctggcagccccactggcccccctcagctgggatgttccccaatggcaccgcctcctctccttcctcctctcctagccccagcccgggcagctgcggcgaaggcggcggcagcaggggccccggggccggcgctgcggacggcatggaggagccagggcgaaatgcgtcccagaacgggaccttgagcgagggccagggcagcgccatcctgatctctttcatctactccgtggtgtgcctggtggggctgtgtgggaactctatggtcatctacgtgatcctgcgctatgccaagatgaagacggccaccaacatctacatcctaaatctggccattgctgatgagctgctcatgctcagcgtgcccttcctagtcacctccacgttgttgcgccactggcccttcggtgcgctgctctgccgcctcgtgctcagcgtggacgcggtcaacatgttcaccagcatctactgtctgactgtgctcagcgtggaccgctacgtggccgtggtgcatcccatcaaggcggcccgctaccgccggcccaccgtggccaaggtagtaaacctgggcgtgtgggtgctatcgctgctcgtcatcctgcccatcgtggtcttctctcgcaccgcggccaacagcgacggcacggtggcttgcaacatgctcatgccagagcccgctcaacgctggctggtgggcttcgtgttgtacacatttctcatgggcttcctgctgcccgtgggggctatctgcctgtgctacgtgctcatcattgctaagatgcgcatggtggccctcaaggccggctggcagcagcgcaagcgctcggagcgcaagatcaccttaatggtgatgatggtggtgatggtgtttgtcatctgctggatgcctttctacgtggtgcagctggtcaacgtgtttgctgagcaggacgacgccacggtgagtcagctgtcggtcatcctcggctatgccaacagctgcgccaaccccatcctctatggctttctctcagacaacttcaagcgctctttccaacgcatcctatgcctcagctggatggacaacgccgcggaggagccggttgactattacgccaccgcgctcaagagccgtgcctacagtgtggaagacttccaacctgagaacctggagtccggcggcgtcttccgtaatggcacctgcac

SEQ ID NO: 6429 - DNA, 6000 bp, Homo sapiens
gcaatacaccagctaaatggtgatttgggcccagtgcagtggctcatgcctgtaatcccagcacttcaggaggtcgaggcgggcatattgctcaagcccaggaattcaagaccagcctgggcacgaagacaaaatcctatctctacaaaaaatgcaaaacttaactgagcattgtggtgtacgcctgtagtcctggctactctggaggctgaagtgggaggattacttgagcatgggagattacagtgagccaagatcatgccactgcactcaatcctgggtgacagatggagaccgtctcaaaaaaagatgacgtgaactagggcataaggaatggaaaaataaccaacttgaaagactcatggaaaatagaaccagtattaactttttcattctgttcattcccaccgacctacctcaagtcagcctctccaccagaacattgcaataatcccagcctcgtttttgtgaacaaaggaaagaataaaagttactggagaaaagccctctccagtgttaatgtaattgctgttttgggcttgttagcagggtctctgtaagattatttcttacaaaataattaccttaccgcgtttgtcttcctaaaatgtttatttggggcattttttttttcttttttgaaagttcagatactcctgagtagatgcagttttttttgttttttgagatggagtcttgctctgtcacccaggctggtgtgcaatggcgtggtcttggctcactgcaacctccgctctgcctcccaaattcaagtgattctcctgcgtcagcctcccgagtagctgggattataggcatgtgtcaccacacccggctaatttttgtatttttagtagagacagggtttcactatgttgaccaggccggtctcaaaactcctgacctcatgatccgccctcctcggccttccaaagtgctgagattacaggcaatgagccaccacgcctggccatctaatttttgtatagtagagacagtgtttcaccatgttggtcaggctgattttgaactcctgacctcaagtgatccgcccacctcggcctcacaaactgctgggattacaggcatgacccactgcactcagccgttccaggtgttttataagcagcatttaatctttaaaaatcaccctacgagagaagtaccatgaacccaaatcagattttaagcccaggctactgtattctagttaatttacttttggtctttaaaaccaagaattccctaagtattttaggattttctaaacttgtaggttggtgagggattgtccataaatattacaaaatagctgaattaaaacattctttaaaaagtgatggtaggccaggtgaggtggctcatgcctgtaatcccaacactttaggctgaaatgggtagataacctttgagcccaggaatttgagaccagcctgaggaacaaggcaaaactccgtctctataaaaaatacaaaaattagccaagcatagtgctgcatgcctgtagtcctagctacagctactaggaaggctgaggtgagaggatagcttgagcctaggaggccaaagctgcagtgagctgtgagtatgccactgcactccagcctgggcaacagagcgagacccgtctccaaaaaaaggaaaaagtgatggtgatgtatttaaaaataaactcgtatacatgatttttacatttttttttacaatcaaatgcagctataatagtcagttattgggattatgtgcaaaccatctgttactcctacacaccctagccctttgcattcctctaactactgtcattcccatgtatcttagtcaacttaaattcatatacaaaaggcagaatttgacctcttataacccctaccttttcccagtttttcacttgatactgaacttttcttgcctttcataattacaaggctcaacttttttcattgtgaatttcaaccttcttgttttcagtcataactcctaaaccttcctaactgtcaagttctggccaagcacagtagcacactgtaatcccaaccctttgggaggctgagatgggagaattgcttgagcccaggagttgagaccagcctaggctcaagaattgcttgagcccaggagtgagaccccatctttaaaaaaaaaaaaaaagaaataaaattagccaggcaaattcgccaggcatggtggtacccaactactccaaggctaaggcaggacctacagagctacagagcctgagaggccacagtaagccatgaatgtgccactgcactccagtgcgggttacagtgacagattgtctcaaaaaaaaatttttttttgagtacctcccagagtgttctaagaggttcaaaaaacagtttatgctatcttggactttcactagattgagaactttagtgtgaagtcaattttgaactatccttttatattcaaggccacagtctctaacagtactgtccaaaagaactttctgcggtggaaatgttttacatctgtgttgtccaataaactagccacacgtggctgttgagtactaaatctgactagtgtaacaggaaacacattacctggctagcggcccctactagacagaatatttggtcagctcttactatcccccaacttccatcctttgcccaacccagcctgctatacacaagcctagcgttatcttgttccttctcttgcaaaatcttaaagatccttctaagctgctcaatgtttatgaattcattcaacatttgaaattgaccagaaaacaaaaagtagtaaagtagtattttcccttcatacatatataaacttgttagtaaagtttgaggtgggactacactaaacatggaattctatttataagtaaaaaccacaaaaagtttgcgtaagaatatcactgtatttattttccctcgggtaacttttctatggcttcaccattttctcttcaaaattgaagaaaaatatcccaaagtttagaactggatcacttggccctttctcttcttatctcctcccagttcaaaatgcttgcatctcttaatggccagcatcctcttggatctgcagttaggctcaacacattccagccttagcacaatcttctttgtggtcttagccttcttccggaaaattggctttgtctgcccaccatagccactctgcttccgatcatagcgcctccttccctgggcatacaaagaatccttgcccttcttatactgtgtcactttgtgaggctgatgcttgccacacttcttacagaaggttcttcgggttttaggtacgttgaccatctttgcagcagggctgttttgtctatatgatgaaaactgtagtaaaatatttaaaataagatagcagacgttaaacattccgaaaagtgaaagtgctatacaagtatatacaggaaaaccgtacacataaatgagtaatatataaatccaccacgtactctttttccatatgaataaacgcacatacaagtacatacctttttgaaacacttcgtttaaattactggaggactaatttgtcgacctaaagaactgaggcaaggccgagcacggtggctcatgcttgtaatcccagcactttgggaggccgagaagggcggatcacctgaggtccggagttcgagaccagcctgaccaacatggagaaaccccgtctctactaaaaatacaaaattagcctggcgtggtggtggtgcatacctgtaaggagaatcgcttgggcggggtggggaggggcggaggttgccgtgagccgagatcgcaccattgcactccagcctgggcaacaacagcggaattacgtctcaaaaaaaaaaaagaactgaggcacaattcatataagtagaatgtttatttggggcaagtttgaggattgcaacccagagcacagattcaaaatgccctgagtagcagcagttgcaagtgggtttttagaggaaaaaatggcagttcctaaattgtctaccaagaatttacattaaaataacacaagcgattgattggctatacatcattcttttcatgacaaattccaggaacgcggacataatgggtgaagcagctagtcaggaataaaatgccaggcattaagtggggaggtgtctgaagtcccatactgctgtctctctgggcccggcaaattttgcacatctcaaataattaacaatgctccgagccattcttcttttctcatatagaacaagactcacgaaaaccgacagcagcagctttaggaggcccaatacagtccgttttccgtacgaaatgagtttaatttattgtgactgctccaaaagaaaagtgcggttcatctaattttcttccgaaaaggaagttaaggaccagagtttctttgacccccttccccccacccacctcctccattttccagctctagagaatggctggggcagcgcgcgacgttgtagctacggttacgacccgccccgttccttctacgagaaccacatcagcgtagtatcacttttcccctccgaagcacagtcacccgtcagcagcctcgagggctgacgtgtccttatcaagccggcgcgccccgcgattctatagccgccatgcctgagacctttttcctgaagggagaagcctgctctcgaactaaggccggcgagggccataggtctcgccttccctttcctaagaaggcctagtcctacccaggattctgagcaagggaggctcctattggagccgctacagcctcgttcttagcttaccgagaaacagcgcccgacacctggcccttcgcagctctcgcctttcgcagctctcgcctaacaggaaagggaagaaacaggcggaagtgggaactgcacctgagcgacagtactgcaaaccaataggcagccggccacggcggtcaggcgccttcggtcgcgtctggaaagcaccaaccaacggtctaaggggcgggccggaggggtgtgggccggagggccgcggtgtgccgcggggcagttgcgggttgtcataacggtccccgccggagtgaggcgaggccgcgtcgctcagttctggccgtctagggcccctgtaaggatgagagcgcagaggacgcagggccgctggaggcgcaggtaacgaagctagggtgcggttgggaccgcggctgagctttttccgggacccgtggtgctgaatggagaggacggagacgaagccgagccgcggctcctagcggcggcgccgatgctcgagctgtagctgccaggcgaggatgtgtggagcgcaggcggcgcggggtaaatgagaggtctcgggccccaggacccccggggcccgggatgagttagcgagggcagccgcgggggccagttccgaccgtgacaggccaaggcgacggccgccgcccgcccgccccttccgtgcagaagcagctgctcctttccgcgcccgcccgcctgcgctcccggccctggagaccatgaggttccgcatctacaaacggaaggtgctaatcctgacgctcgtggtggccgcctgcggcttcgtcctctggagcagcaatgggcgacaaaggaagaacgaggccctcgccccaccgttgctggacgccgaacccgcgcggggtgccggcggccgcggtggggaccacccctctgtggctgtgggcatccgcagggtctccaacgtgtcggcggcttccctggtcccggcggtcccccagcccgaggcggacaacctgacgctgcggtaccggtccctggtgtaccagctgaactttgatcagaccctgaggaatgtagataaggctggcacctgggccccccgggagctggtgctggtggtccaggtgcataaccggcccgaatacctcagactgctgctggactcacttcgaaaagcccagggaattgacaacgtcctcgtcatctttagccatgacttctggtcgaccgagatcaatcagctgatcgccggggtgaatttctgtccggttctgcaggtgttctttcctttcagcatt

SEQ ID NO: 6430 - DNA, 6000 bp, Homo sapiens; identical to SEQ ID NO: 691

SEQ ID NO: 6431 - DNA, 6000 bp, Homo sapiens
ggcatgtagggaatagtttggtagagaggaaggagcttgaactttagagtttcagtcccagctctgccacttagtagccatttgaccttaggcaagttattttattcattctttctattttttcctccttttgcacacttctttgctgtgaattatttcctttcctaagcctgctttctcatctgtaaagtgagcataattacatcccatgaggttgttataattggcaattatatatagtatatgaaaagtagctactagggtggttattattattcagatacattataggttaaataatgcctatttatatttagaccctatgaggtggttactctgttatatagttatatgctattttgtagtttaaaaatattttaaaatacattatctcatttattaataattctcacactcttagagctaactcttggcctccactaactagtgaggaaactaaagctctgggaagtgaagtgacttgtccaatgtctcattactagaaagggacagaaccgggaggaaaatcaggttttgtagttgcaaattcaatacctaaaaaaaattcttataaggaagtgtataaaaaaaaatcacaaaatcaagcatccaagtggcttggattttttctttcaattgccaggtgtacttggacaaaaatgtacacatttcaatgctacattctttctgttagaaaaatttacatgaaactggttgatagccagtataatattgctgatttaaagttacatatctattattatgcaagtgacaaaaaacatatcataagcaaaaattgcgtataaatgaaaattcacattttaatagtttgtatacctgaagatttacaccttgggagtcaacatggtattggggcacgtacatgggaatcggagtcaaagagctctagggtcaagtagcagtttgtgagccttgtgtctttgcactagttagttacccgtgtgagcctgatactacaatatggggttgtttcgaagaccacatgagctaagatacgttaaatacctggcacagtgcatatgcacaaatactagtttctctgtcctcatttaatccattaatttccaattcactggcagcctttgaggatgggagacattaaggtggttttaatcatgttaagtaatgttacataatagctttacctctctacctacttctgcccaaatttcccttgaaaggctccagggatgtcttgagactgtatgaacaaagtagaaacttccttctgcttgaataagatttcttgcagctatttaaaagactggaagaaggctgttccatttatctattacatgacgaattataaaaaattacaaaaattattttatttgtatggggtcagaattctgtggggtcagaaactcaggcagtgcttggttaagtgatatttttgctccacatggtattaactggggtcgcttggtggcatttagcttgtagcatggatggtctggagttcaagaaggcttcatttatatttctgtcatcttgatggggacagttggaagatggtgcagctgagcccctctcccacccaatgtagtctcagggcctctctacatggtttttccagcagggtagatgaactttttacatggatctaagagacagtgagtggaactgcctgtctcgtatagcctggacccagaagttggcaaagcgtcacttctgccatattcattggtcacagcagtcacagaaccctcccaaattcaagagggaggtctacagatcccacctttcacgcaatgagtggcagataattttcagtcatctttaatctgttatgacagcacatgcttgaagacacaggtcaaaagagcacagtgcagacctttatgaagcacctttctgtgacagatactttgctagaatagctaatgacttctagatctgcagctgaagaagtttcgatgaaccttccgtctccattacttgggtgaaagtggacctggaatcctccagctgcttccattatactttcatttctgctatccctgatcttgtggagtcaagagatataatctgttactcacgcattactcaaatctctacacaagtcaccacttatgggaaaactaccctagtcaaaacaggaatagccagcttgttctccatctgcagggcaggcatgtattatttgtctttaaaactttccccaaactcagaaaaaagagttgttacacgcaaaaaattcagaagacagtcttcagtaaattgcaattttgttaaattaaaaaaaaataggatgtgtgctctttaggtaacagtgtttagactttatagttttcaataaaatttaatttcttagttgttgcaactagaggtacctcagatgctgggtgtgttgctaatcctttttaacaagttagttgttggtttcagtgacactggagggtagtaaatagcagccaaagttaattatatcgtaggttaattatatgtgttaactatagctaattatattatactacactttaaaacctagagggttggtgttaattcataatagggcttgcctattatgcataacactagagaagcatagcatttctagtgaatcttttttttttttaagacagagtcttgctctgttgcccaggctggagtgcagtggcaccatcttggctcactgcaacctctgcctcctgggttcaagcgatcctcctgctcagcctccccagtagctgggattataggcacctgccaccatgcccagctaagttttgtatttttagtagagctggggtttcaccatgttggccatggtggtctcgaactcccgacctcaggtgatccacccagctcggcctcccaaagtgctgggattacaggtgtcagccactgcgcccggcctctagtaaatctttttgttttgatgtgaataaatagaaagcttataaaaaataaagcattcaaccacttccctttctatagtcaaagttcaaacgccagaaaagccgaaataggtgatacaaagtcatcctttagtataagcagtagtatgttttgagaaaatcctaaactccactcattgtcttacttacaagtgcaccgaaatattattgcctgtaaatgacattgcggttttactggtcaggaaaatgaatgatataaatttttaattctaacctaaaacctgcgttagtactaacctgaggaaataacatggttgtttgtaagctaatcaagagcccttaaactccattacataaatgatacacttaccctttgtattaagggactaacggcttcgcttttcaacaaagctggatcttctggcacacgctcagaagatagccagtacttcagagacagattgctttgagggcactggaaccgctgaggggcagagtaatcctaatgagaaagaaaaaagaggacgcctctggagttaaaataagacaatgcatctgtggagaacacggtgactgaagactggcagaattctcaatatctcaggccactatacactgcgcagttttcatttgtattttggaggtgctctagaaaacttagaaatgattagaataaaaagtatggatacttttaaccagcccatgtacaggaaattctgttggtgtagaaacggttctgctgttcattccttaactgcttctgttcccactttgtcagatgtagggcgaggtggtggtggtgagtcctaattttttctatctctatccacagtctggaatcgttaggattattttaagccttcataacatttgcggacagcttggagtgttttgtacatgtagtggggcagtgcctggcctcctgtgagagattgatcatcggtaaacaatccacacgaaactcacttgccagtggacggggaggatcgctgccatcctttcagcaaagagcaaacgaataaggagagatccgggcccatccctcctcgcgcagcagtttctagatttttaccccggcttcataaatggctaccagctggcagtcacaacactttcataatgtttgcacacaactcatttgggtcgctttcttttctttcctttttttttttttttttttgagagaaacggagagtcttactctctcgcccaggctggagtgcagtggcgagatctcggctcactgcaacctccgcctcctagattcctgcgattctcctgtctcagcttcccaagtagctggggctacaggcgtgcgccactatgcccagctaattttttgtactttttttggcagagacgggttttactatatgttggccaggctggtctcgaactcctgacctcaggtgatccgcctgccttggcctcccaaagtactggggttacaggcgtgaaccaccgcgcccgaccattatttgggtcgctttctaatttctttctccgtttgtagctagcgttgcccgaaggagatttcagagagatcccctggagaaagggacgggggatgtcgttttccagtaatttctgggggaaatctgggatagtcagggggtaaatctagtgccgtttgctgaagttaaaaggcgtggggagccaggtggtgccctggagggagggccgcgcgagacgagaccaaccttcgggacaggggagagcggggctactgaacgcaggggattccgctgagcctccagcccctgagcgtccaccttcggcccagctgggggacgcggtctcgggaagaaagcccggaatcccgagccggccagccgcgagcagcgagtaccggagcgcgtgggcaggcgcgcggaggcagaggcgggccggcggctgtccctttaaggggccggtctcccggcgccgccggcccagacgccaggacgtgccgggtccgccccgccccgccccgaagccgcccgtttcctgccgagcggcgcgacggcacctgagcgactgcggcggcggcggcggcggcggcggcgcctcggagcgggcggcccgggctgtagtgccggcgccgccgcgtcttcccggtctcctttcccggccgcacagggtgagggagagcaggccgcaccgggacgggcgccggcggcggggagcgcggggggaggcggcgccggccgcggggtcctggggcaggcgggagggccgcgccgggcgggggggcgcggccgcggggcccggacgccgcccgctgggtaggcctcgggcatccggttgccgccgcggggctcttgttggggccgggacgccgcagggggcgggctcggagggacctcctcggcctcgcggggccgctctgggcccgaccccggctctgtcgcggcacccggggcgcggccgagggacaccccccaccctccccaaggacgactctcccgaaggcgaggtcgacccgagcgggccctggggtgaccgaggcacctatttttagccaagcctgagggcccccgggagggaaggcggattaccgcctcctcggccggtggacggaggcagcgcgtctccggcggcgtccccgggccggagctgggccacacttacgccatgctggagttccagtcctcgccgctgcctccggcggtctgggcgctcgcccccttccccggcgcccctcccgctgccctttgcgagtccccaggtcagggcgggaggcggttgggcacggaaagcagcatgaggggggactttggaaaaatccatggaccactctcgacaccggcgaagttatcccttcctgtccccgaggggtgtgtcctagcgattcggcctgaccccttcagtttccaaaagtgagatttttggccttggggacctcgccggaaaactacgcgggaagtctagagaagtcgtctggctctcagccatacgtctggtgtgggatgtgcagccccgcatgctggcggtgaaggcgctgggtgcactagatgtgggcagccccggacgcgggcagcggcgtcccagccggccccagttgcaccttgactaggttaggttgaaagtaagctgttcagtgttggcccttctttcctgtgggaggaaggaggaatct

SEQ ID NO: 6432 - DNA, 6000 bp, Homo sapiens
cacgtggggatctttgacttccacccctgcccaaaaagaatgaggtccccctttccctcccttctggggtagtatcagaggcagcctagtgagagtcaggactttcaccactgtccaaggaaaaggaggccatctccatacccccataaccatgtggtgctagtggaaaccacaagtggaatagtgacgaggactcctttaccttgcagcagggaggcagcagtagaggcccggcaggtaggtggaatgtccacctctgctcagcaataatgaggagccatctccttggtttcaacagaagctagatgctggccataaatcccaggaagactcccagagccaaatttagggtaccatagggccatggatctatgtatttactttccgtcaatctgatgttctatatctaattgagtgttccctggcctctgtgatgttcttcgaatgtgtcaacttggcttggctacattcctcagtttttcaatcaaacacgaatcttggtgttgctgtgatggtattttgtagatatgactaaagttcataattagttgactttttttttttctccaagcagagtcttgctctgtcacccaggctggagtgcagtggcatgatcttggcttactgcagcctctgcctcccagtttcaagcgattctcgtgcctcagccttttgggtagcgggaattacaggtaaacaccaccacacctggctttttttttttttttttttttttttgtatttttagtattgatggggttttgccatgttggccaggctggtctcgaactcctggcctcaagtgattctcccaccttagcctcccaaagtgctgagtttacagccatgagccaccatgcccagcctcatttgtcttcaaaaccgtgagattatcatagttaatctggtaggcctgattcaatcagtggaaaggccttaagagcagggatatgggtcccctgatgaagaaaaacttccagctgtggacaacagctttctgccatgcccaggagttccagtcttcccttcctgatggcatgtgctacgggcttcagagttacttagccagccctcaaaattacattatacaattccttgcaataaattgtatcatacatatctcctactagttctgtttctctggatgaatcccaaattatttacatatttttctgctttatggtttgtattatagtggctaactctaagccatcatagaatgatgtagagcacaaacaataaatcaatactcgttatatgtcttattggtctgtctcaggatcaagtccaacgatcacatgtttacacatcatgtgtaaagagagacatcatgaggtctctctctttatctctaacattttctatcttcaacccttctcttctgtcctcctcagtcccatcctctccaataacctgtacatctttacttcatcactatgtctctccaaatactcccttgagttacaaacaaaacaagacattcaaaaatcttcatttgacacttcgatccctgtgaattttcatgctatttctctctttcccttcactgccaaactttttgcaaatgtattttattttcatgtcttccatttgctcacttcttagcccactagtaccttgtttctgtagatactactctactgaagctgacctcttgaactttcaaggttcaaatacctccaggtcaccaaatccaaccatgcagagcctgctagttgcccctcagtatccattctccccttcttcctttgtaatagaattctaggcaaactgtccagctgaaaagtctatttcgcagcatcctttgcccctaggagtgacctgttattcaattttggccaattagatatagcaaaattgtggaatagcatttaaaaaaatagtgcttttttaaaaaagctggagcaggcctttctcttcccatcctttctttttcttcctcaagaacagatgtaatgtctggagcattagcagccaccttggatcagtagatgaccttgagaatgtgagctgagtgggatggtgcagaaagatatgaggacttcagctgtgtccctagtggaatcagggagttgccaagccagtggtagactgacttcctatagacttctgacttcttttatataagagaatgattgttttaatgtttaagacactgtagcaggatctgtcactagtagctaaatgcaatccctaacggatatgccagtgatctctgattgttcatgtattcatttattacataaatatttgtttagcaccaattttgtgccaggcatcattttaaatatggtggaaattagacaaagtccatcaggtttgacaggctatttagacatagaaatggagaggtcgggggcagttgggttttttaaaataatcggtcgctaaaaaagagaagcagaggaggtctaattttgagaaatattgccccatagttgccctttaaagcttcaatatgatcatctcgggaaagaagacagaaagagagaaaagtctagaacagcccaggaatacttcagcatttgggggaccgacagaagcagagccagggcagggaggccattgataaaaggaaaaccaaagagtgtgctatcaatgaaggccagaaaagaaaatacttccggggaggaaggaatagtcagatgcttactgagaggtagagtcagacataaacagagaactggaagttcttaatcttcaaaggaaaacaaccatgaagctaatgaagcttaggcctcacagttcctctctagcccaggtgtcttccaatatcttgtgcctaattctgtatctgcagttttatatcagtttacttacatataattctccaagttttatacacttgagcttcacaaaatctagacgtgcctctcttcattgtcctttacctctctgtaacatcctgaccacatgtacttcatcgacttttcttctttagcttctggtgatgcctcattctcttacactgttctctccccttctccagccattccctaaatgagaatatgggctgacattagacctcaaccttgttctctctacactatccccttatcaagttagtcatttatatcatccttacacgagcaactcctaaatttgtacttccagcactgatctctacctcccaaacatggacaaagaattattcccctccaaaataaaaaaattttaaataaaactcatgagcaaaagtgaaatgcataaaaagggaaagaagtatatgcttgacccagtcaaggttactcattggcatgttctttcagcaaagaaatagaagacagcctatcttaactatctattgctgataactaacaaattagcctgcatttatcaacttaaaacaacatttattatctcgcggtttctataggacagcagtctggatgaggcttagttaggtcctctgcttcagggtcatccacaggctgcaatccaagtcttgacaggagttatagttatctcaaggcttatgtgggggaaggatccacttcctagctccctcacatggtgttgcctagattcagttcctctaaggttgttggactgaaggtctcagtttcttgccagctgttggctagaggcggctctcagtttcttcccatgtggacctttccacagggcagcctacaccatggtaggtggcttcatcagagagaacaagtgagaggacaagagggagtgccagcaagatgaaagttagtctttcataacctaatcttgaaagtgacatccatcacttttgccttattgtattgatagaagccaatccttaggttaagctcacacataaggcgagcagcttatacaggaagtgagtgaggaggcagggttatctgggaatccattttagaagcactctaccacacagcccctctcctccaggaactcacagtacagctgagaaattacctggaaaaggctggaaattgtataagtacctggaaaagactaaggtgtgctggccccatgaccgtcaaggtaggtatatgttactctatagtttagtcactgtgtctctatcaaattgcgcgtaacacgtttgagattgtcactggttttcagtgtgtctttgagatacattttatgcgggttgctctcctccccgcccactccaggataattgctttaataataaaacataagcttaaaaagcttaactgcgctgttatgtagttgtccttattaacggctccgattctttttttttgcgttacagctcattgtaaaatatggtgattcaatttcattttccactttgctgtgttgaaagctccagcaaaacactcctcttcattaaactaggagacacctttatcatggtttgagttatctgcatgaatacaggaactcaaatttcccgactcatctacagagttttcattatgctatggaatgaaaaaaaaaaaaaaagacgcactagcatattctaatctctctaaaaattactcagtgatttaataagtagcacacagacttattgtaattagtcatagtaacgtagtaaatcgtaataaatacataattgtgattaatgtatttattggcttactttgcacatacggtaaatacaccaccctttttttttttttagcacaggtaggggctcctggctgatcgtggcccttttgtgcagttccaccccgcaccgtagggggcaggagcagcccttcctcgctcgcggttttcgacgctgctttggtctctgtcagacccaaccaagtcagtataaaaggggggaatagccatggagaaggtaggcctgtggccgggcttgctttttaaagggaatgctctcctggtgattaggaaccttaaatcacattataagtaggtgaacgccaatgcgtggtgcactgcgggaaaactcgcagggcctggctcaagggaggcctggcattttctcctccccgcgctcaggcggagaaaggtgcggtccaacccgcggaggctcgacccggaagccgccgtggccgccgcacaagctgcgctcgtctctcggctggggagctccgtgtcgcaccgggttcttgggctggccgtgtccttctccctcggtcgccactggcccatgagtccccatggcgacggcaggggccaggcccaggggcgggcagtccgagtggggctgcggcgctccgggggcatccgcggcggcgtggcggtgttcgccgccgtggccgcagtgttcaccttcaccctgcccccttcggtaccggggggagactccggtaaagtactcgcagggttgccccttctgtccctctcccctggtcccagaacgggcagggtctgcgtctggcccctgctcttggcattcggtctggtcagctctgggcctccatccacccccctgtgcacagcgcactattgtgtgttccagagcccacttctgtttccattcctgtcgttgtggtttctttagttctcaggttttcgagatggggcgtattgttggtttcgcctggtggggcttatcgacctctccacttccccagatcttttatcctggtcctgagtatttactttcagtcttttttagtccacagatattattcacggtgtccttattatgtttcaaacaaaagaacagtagtggcgaacagataattgctagtgttccagtgcggttagacaatacacaagttaatgaataaacagcatattcactggtgataagttatggagacagtaggagggaaatatgattgagagtgggggtaagtagtgggtccttccgaatgactattcaggaaagacctctgaagaggtggtgttttagttgaaacctgaatattgagaaggaactagccatgcagaatatttgcaggagaactcttaaaaaggtggaagccaggtgcggctgtttctatgaaaaagaaaagcatgactcattggcccttaaatcacactaattgttttgtatttgatgcaagaaacaagatccatgttttgtttttggattcaataatgccatatcatggccagtaattttgt

SEQ ID NO: 6433 - DNA, 6000 bp, Homo sapiens
acaactatcctacccagtagaaattctctcagttaacttgcacatggcacttccatttatatattcattctaaaggaaagtgaagataatattcacaaaattctaaatggttagtacatttataaacagagaacttggcaggcaaatgccaggaaaggggcatctacttgaggttgctaacttcagttatagctttagaaattaataaggcatcatatccttggtcactgtcagcaggttaactgatgctccaatctagtgtaaaatgctgggaaaaagactatgaaatctgcatcatcaactatcaataatgtttgcaaaaataaaggagaatcattgtacttaattcagatgtgtgtaatttaatttttgtagaatcaaattgttaagtacgcctgtggttggtgtttggcagacacaccagacaacaaaacgtaagcatgtcctgagaatgaccccatatggcagacacacctcagtgtaggtttggtcttcccagcatggccagcccagagattcatccttatctatgagaacatctgagccccatcccatcctatgggacctgggccatacaggagattgaggccctttgttttgggttaaaggaaggttgccagatggagattgctagggggagggtgttaagtgcaaacgctatctaaactgcatgctttctgcacttggttgcacttctgtccagcccactgccactgtagtgctctgtatgtaagttcccttcaataaaccctatatatctcatttgctggctctgggtctctatttggcctcttgaacctggtgccatccatactgaagtgaatggggtctggcatgacagatgtttacagttttgttaccattaaaatttgatctttcagtgaagttaaaatttttacaaaatgtaacataatttaaaaaattaaagtctagctttttaaatattccaatttactgatttccagtctactaataattctactgtgttctttcttaaacacctgtgtttttttaaacaattatccaaaataagtttccagtagttacaatgttccaaaataatatcaactggaacacctctaaaataaagtctcatctgtgaagttattgctgtggaataatagtgaaatttaagagctatacaagaaaactaaaaattctttatcataaccaaaatttgaaactattcttttatcatacactccccatcagtaattactgtaaatttttcagaactgcaatttaaaagaaatatattgtatcttagagtaaagcttgagaccaaccaatcgcaaagctatgattacattatatattgtttatttgatggttctatttatgattgtttatgggatatgaaagtttctatattaaagaaagtttcaatatgaaacactgtaattaactattgggcacgtcctgtctttaatattctcataactcataacttgcccaacccaaatctcacgaacatgctcagacactctaaaatttctactcatcacatgtcctttcacatgatgtttgatgcatatcatgatctatgatacagtgactttcaataagccatataagtcaatctttttattttatagtccttttcttcttcggttttcttcttgtcccattaagatataaaccttgacattcttttccaatcttattacttcaacaatcttttaaaaaaaattattgaatattctacatcttaacttctctcccaaggtcaatatgtaatataggtccaattctgtatttccaactgggcataggcacctgaatatcgcatcagccccttacacacaggtctcaaagtagattcattatctttcttcccaaagctattattcctcctgtgtttctttaaaggcacccggaactgtgagcatgattttgccttctctttggcccatacctagtgctgcagctctgcattattttcagagacttctggccagtggtctctgggaacaaggcagagtgagggtttatggtgtgggttttgcttttgttttactttttagcaagagaagttaacttgggtatgaactgaaaacgggcattaccattacacaataacacgtatgtcatgataatgcctggctaaacatcttctctggctgaagcagcagttccagatttttcacaatttgtttcattttatgtgaatcagcagggtaggaaaaaatacacgaatcttgaagacatacagatacggactcaactccagatgtcatcacttattttacttttctcaagctcagattccttacatttgaaataataataagctacctcataaggttaagattaaatgaggtacacaaagtactgattctatgtatgctctaagtatgtgttgaatgaattaaagaataaatgttcccctacctggaatacctcttctcccagctaactctgtttttgtttttgttttgtttttttttttttgagacaagatctcactctgttgtccaggctggagtgcagtggtgcaatttcggctcactgcaacaacctcttacctcagcctctgagtagctgggaccacaggcgcacacaaccacacctggctaattttttgtatcttttgtagagacagggtttcaccatgttgcctcaaactcctaggctcaagcgatcctcctacctcagcctcccaaagtgctaggattgcaggcaagagccaccacgcctggcccagctgtccactcaccctttaaaaatggattgcaaccatccttaatttccccagaattatgtgtcccactttgtttctgaagctcagcgcatacctgtttatcacatacactgtaattactgatgtccttgttgttcaagttatgtccttgatgtccaagttatattttggtaaattccttaaggatcatgttttatttgactttatatctgcagcaattagtgtagttcctgacaaataggaaccactattcccttcactatttcaataaatgttgaatgaatattttatacacagctaaccaaagggcttgtaccatatgccctactaattttattctaagaaagcacgatgttcaaatatatttgaaaaacagcagatatttcaacaataaacatgttaattctgcttgggtcatatgtaatgcccatgagaagaacaagcataaatacagactctctacataaagataatagctcatccttactaagcacttaagctgtgccatttactctgctaagcaatttacaattatttgatttaatccaatgacataactctctgcgggttaagttctattatttgccttattttacaagatatggggaaactgagcactagagaaattacataacctcaagatctcacaagtagtaagcagtagtgccagggtttcaacccagacttcctgactctggagcctccactcttaattacatgaaactcagacttcttggcggtaagtgatgcttccgagatgcttaatgtggtactctgacccgcaatgagtgagcttcaatgagaaaaactatggatggaccaacagcacgttttcccatattctatcaaatcgtgaagataccaaactatgaaagggtctacctgcaaattaagtccttgaagacaagtatatgtatatccggggttttcttccacatgctttcaacacactacacttttgctctggacacaatatcttaaaaataaataaataaagctttggcttttaatatgaacacagtaattatttttctattacgacctgaaaacctaaatacttaaatacaaagtcagcatttccaagacagccaagagccaagaattaaaaaaaaaaaaaaattaaggccgcatttatagttttgaggaatggagatccaaacaaaacagtccacaagtcatcttggacgctgaagtgtgcagaactgctagggcatctacccaatcacatgggggaattgcgggtaccttgataccgacaagttagcttcaaagttcccttacccgagcctctaaatcagctgagaccaatcattgttaacgctctccggggccgtcttgaggactcccagttggcaatctggaacgtgtccagaacttggtggggcgggggggggatcatatttcgtggagaatgggggaggtgagccctgggtatagggataactttttaactagcgttaattggggtctttgcggccaggctgtaaagattcccgccacactaatatgaatcagccatggccttttaattggaacgccggaactctgccttgttttattaatatcttaataacacgtttctataatggacatgttggttccttgtattttaaaacgcagccacaaactgaggcgatagcgatcacgttatgcagtccccaatcgtccaagccgaataggctgcatgaagtatcactcaaaaacattcattaccgtcggtgtgttgagtggtaacgccagtgtgcgaattcattaatggaaatcacgggaccccgagcggttggagatctgccacacccctctgcctgcgttaagacagcctgacccgacctctggtaaattaatgcgcaaaatggcggttgcacgtctgtttccccaccccggcgcacaatcctgaggaaggacgtcacgtcaccagggcaacgacgctcttgcgtaaaggcccggcccaagggaacgttcagggcgtctcggctttccccgctgctgcttctgctaggcccagtgcgagaccagagcacgagcgactcccgtcgtccccggccaggcagatgttggcctagtcctggcgcgaacgaagcgcgctatttccctgcttcctctaggccaagcctgctttacggcagggcccgcctcgggagcgagcacagaccggggcagcgaggccagccaggcgccgacgaggtccccgaacgcgcacgcgctccgttcagctccgggtggcggccgccggagtagacgttagccatggaaaccgagagctggcccgggcggggccgcggtgagctcgttattcggccgccgcagcttttctgcctccgcattcgggcactaaccaacctcccggcgggagcgcccagcccgagtttacctgcaaaaatgcggtccctgggatgccttcgcgtcttctcttccctcgggtgacttgaggtacgttcgttgtccgacgtccacctcgggacttcttcggcatcttaatgtccaagcctgtgcggagagccaagttgttctaggggctttcattgccacaagaaacatatttttcgtttttcgttgcaaaacctttaagtgcaattattgcgcttaatgaactcagtcattagagatagtaattcagtgtgattttaactttcctttgaaagactactttagcctgttgaattgtagcattttgtttctaagagactcgtacgaaatggaatatggcacacccacccggagctgtgtccgttaggtagaactgtactctcgcaatatctccaactaaacctcttttgtccgaattgttcaactcatggccccctgaacgtgaagcgctccttccccactgatctcgacctctgtccccacaacctcttgtctctccaggaccagaatttactccagtgaatcggaagttgttttccatgccgctgaattggttatctgctctgtatccatcatttttcacttactcattttttactatttttaggtgtttgttttcttcattaaatcattcctgcagttagggcaaagactgcccttcatgttatttggtatccaccgccactcacgccaaatccccagacctttagcatagcatccagttcagatgttgccttttcacgaatttaactgtttgtagcatctgttggctgctcctaaatttcctacttaaagagctgccttctaattattaactgctgtggaaaataccaatcagggaagctttttcttttttaagagctttattgagatgtaatttacattcaatacaattcacccatttatagaattgtgcaacccttaccacagtc

SEQ ID NO: 6434 - DNA, 6000 bp, Homo sapiens
tcaagtgattctcctgcctcagcctcccaagtagctgggattataggcatgagccaccatacctggcccagactttctttttcctaaaacattaggttggtaaaaaccacaattacttttgcaccaacctaatattttttttcctcctcttctggctgggcgtggaggtggctcatgcctgtaatcccagcactttgggaggccgaggtgggcggatcacttgaggtctggggttcaagaccagcttggccaacatggtaaaaccctgtttctaccaaaaatacaaaaattagctgggtgtggtggcaggcacctataaccccaggtacttgggaggctgaggtacgagaattgcttgaacccaggaggcagaggttgcagtgagccaggatcatgctgctgcactccagcctgggagacagagctagactctgtctaaaaaaataaatcaaatatttttccttctcttcttgttctttatcttctatctctgttcttcctctcccatttgtttccttccctttttccccttgtctccctccactggatccttccagaggatgctgcatcccactggcgccagtgctaaacactgctgatgttggcaaagcagtatttttcccagtgaccttggttttattatttttaattccctaggtccatgtcaatgttgtaatacagtcaattttacagtccacagaaatgatagcgctgccttgagaggcatatggcaaaggggtcacagtgcagagccccagctctatggcagagagcctcacccacctccctgcctccacatcctcaccatggaaataggagcactgttggtacctacctcgtgagggcggttctggaattactcaaacacatcatctaagatgctttgtacagggcctggcacattgtaagcacttgtcagttcctgttgcacagcatcctccaggccctgtttgcagagttaattgcttctggtactttttttttccttttttttttttttttttggcagggggggtaggggggttgggacaagagtcgtgctcttttgcccaggctgcagtgtagtgacgtgatctcagctcactgcaacctctgcctcccgggttcaagcgattctcccacctcagcctcccgagtagctgggattacaggttcgcaccaccatgcctggctaattttttgtattttcagtatagatggggttttgccatgttggccaggctggtctcaaactcctggcctcaagtgatcctcccacctcggcctcccaaagtgctgggattacaggcgtgagccactgtgcccgaccgctttctggtacatttcttaatgtcctgtgaaacttcacctggaatgggatttgctgggaattcattttgtagacaagggaaggatgcagtcttgtcagatatggtgacttaaggatcatcttaaaggatttaggtttcctaatatcgccaacagccacatgggtttaaatcctcaatactggtaggggctgggcatggtagctcacacctgtaatcccaccacactcagctgagttttgaagttctgttttttgtagagatggggtctcactgtcttgtccaggctgctgaggcaggaggatcacttgagcccaggagttcaagactaacctggacaagacagaccccatctctacaaaaaacaaaaccccaaaactcagctgagtgtgtggtgcacgcttgtagtcctagctccttgggagtctgatgtgagaggtttgcttgagcctaggagttcgaggccgcagtgagctatgactgagccaccgcattccagcctgagcaacagagcaagaccctgtgtcaaaataaaaaagacctatagaagcattagtgcttggggtaactattagcatgtgctggcagagaaggtctagtgcctttaccttggtgctaagagtccctccagattagtggctttcccgtgccctttctcttctctgggctgctaatgccttccttccccttattagtaatattactgataaacaaattgtacattctctgatctcacttcagaggctgtttctgtgcactgaagatgtacacacagtcttaattcaaaagagatagcatttatgtgctgccacattaaacagattgcaacagtattactattgagtttgtgttggctctgtgcaaccctcatggtgcccaggaacagatgaaaccaccagagacttggagcctcaggttcattcaatggtgtcccagggaacggggttggagggcttattcccagaaggcctctgaaatgtaagagctattaacaaggagttataagtcatttttggtagctataggcccaggcaatgggtagagatcaagatgggataaatggtaagatcagtagagtattgctcagataaatatgtaagctattttactggcacactgtatctagtgatattaacatgataagctataggtaggataatttctcatcagattgcagaaatacatttatagcctatttcctgttatataatgaaaagctactaatggggtagtagacaatgatatgggtaatagcttaaacagccttcgttgtcacttacctgaattcaggaatgacaggtttctttcatgcatgaggtactggatacattaaacacacacacacacacacacacacacacacacatatggcattgagttctagtcatatcctaaagaaaaactatggtgcgctatgttatttatagtactatactctgtgtgagtgactctgtgtgtatgtgtgttggtggaggtcagggatgacttgtttgtaatataccttaaggaagtctgtccgaatttgcccttcaaatactaaataaattcatctctcacctcaaactgcctttcagttcccttttactaattttgtttaaaagaaaggcaagtgaaggccaggcatgggggctcacacctgtaatcctagcactgtaggaggtcaaggcaggaggatcacttgagctcaggagttcaagaccagcctgggcaacatagggagacgccatctctacaaaaaaaaaaaaaagaagaagaacctgggcatgtggtcgcatacctgtggtcccagctgcatgggaggctgaggtgggaggattgcttgagccagggattgtaccactgcactccagcctgagcaagaccctgtctcaaataaaaataaaaataagacagctattttaccctgtcttcacctaaataagctcatcttattttttgcctgaaactcttgcaaactcccaggtctgctagttttgagaaaccttggatctcaataaggaatagttctcaattgcttataagcataatggatttcttttggcttaaagttcaaaactggcaacaagcagcgctagcaacccatagagagatacgcagaccatttcgatagacgtgtttgctgagtgaacaaggctgactgaatttttttttttttttgaggcagggtctcactttgttgcccaggctggcgtgcagtggtgcagtagtggctcacagcagccttgaccttctgggcccaagtgatcctcccttctcagcctcctgagctcctgagtaactgggaccatacgtgcaccaccatgcccagctaattttttagatttttttgtctccctatgttgcccaggctggtctcaaactcttggactcaagccatcctcctgccttggcctcccaaagtgctgggattacaggtgtgagctactgcgcccatccctgaattcttaattacaactaaactagatgcttatggattttcctgttttacaactcttgcctcttttatctgtaattttaagatcttgacagcttatatttggctttgcttttgtgtctcaagagttctttccttgataagcctctgtggaaactacagaatcttacaaatataaaacatttccggaaaaaatacaaaaatggacacctgacatttacactccctaaggtcgtgatcctgttgaagaaaggagatgaacgcggctgcttttcagtagttcttcacttcaccttaccaggttcttcatctggatgctatgctatgggggccagaggaggaggctgggattgtgatggatcctactagattttacagctggagctcccaggaatgccctcatagggaatgtcctgaagggaatcatgggtaacttgtaagctacctcaacttatttttggaactatgtaaggtataagatggatggagctgggttcctgtgcctttctcaccttgtccgcatagagatgcagctgctcctgcaggccaaagttctgcaccaatcacctccacctgcttcccactgggagacaaaggtttgaaagcctgtttggcgatgaaccacgatgatctgacactcaagccactcctgagaaagtcgggtttctttctgtttccatttatatatgtaattttcgcttcaaacaaacatgacctcgctattctatgcacagttttgaatcctgcttttaaaatgcgatgtctgccttgtctttaaatattctgagggggaggagaggagatgtgtaatgcgactgtctataatttgaaaccggacctcactatttagcgtctcagaaaacgcggggttcattgccctggtcccccccgccttcccccgccccccgaaccttccggctggctctcttgcggtccccgcctcggcgctgatgtggtctggcagtggagattggcgcccgggcggagcacgatgggcttccccgcggcaggcaggcaggctgctgctgcaggtgggtcccggcgcccgcgccgccccgcgcctccggcggtcgccccgcccctgcccgcccgctccgctccgctcgcattggcgctgcctgctgtctgtccccgcgcggtggggagggggcgcacccggcggcgggctctgcagagggcgccttgctccgggtgcgaccgcggctccctggaggcctgggcggcgggccccgcgagcgcgccgccacctcgggagcagtgttggccaaggaccccgacgccctacgtaagtaaaggcagggcggggagcctgcgggggaggagggtcgggggcaatgtccggtccgcggaccgcggagtgggcaagaggtgcccactggatacggggtatccgagccctctgaggtgctgggagtaagaacgcgggaggtcgcttgtccgctggaatccgcggccagggcgaccctcatcaggtctgcccacctatccccttcgcgttacagcttgtcttagaagcatgggttgccggtggcttttttccttctttatccctctttgagaaatgtgattttgggtttctggccattacattataattctgcagacagcctgaagctgggttatctgttccacgcccccggcattttcctttttgagtactttatcctgcgctctgtctcctgccataaggggcgtcaagccagaattcgagattccttcctccaggaggaagcttcgtggtccgtatctggtgctgggaaagatgcattgctttcctcgggtactggctgctcaagggaaaaaggaaagggggtgttttctgtgacatgagacttgcaattccatcaggaaatgagcacagggactttaagatttcctgaggcgataaagctacccttgctggttaagagcgaatcatttgcagtctgacattctgcaaagttttattgtctacagactgcattattttccctcgttagttaagtttctgtttgggtattcgttttatttctagtatgtgagatacattcaagtgagcttctcaaacgattgtctttgcgcaatccaggttagtttccaatgacagactcctaaacatctcatttcaatatttctattatgtggtaatacagcctctgcttaacaaaaatgctcaggtgctgaaaactcacaagaggtgagaagatttaaacagttatcagcttaggttctagtgctcactgaaacattgtgaggagaaacactgtcaaatgttcatat

SEQ ID NO: 6435 - DNA, 6000 bp, Homo sapiens
gccaaacatctactgttttttgattttttgataatagccattcttgcaggagtaaggtggtattgcactgtggttttgatttacgtttccctgatcattagtgatgttgagcattttttcatgtttgttggccatttgtatatcgtcttttgagaattgtctattcatagccttagcccactttttggtgggattttttttttcttactggtttgagttctttgtagattctgtgtattagtcctttgtcagatgcagactttgcaaagattttctcctgctctgtgggttgtgtgtttactctgctgactgttccttttgctgtgcaaaaactctttagtttaattacctctgagctatttatctttgtttttattgcatttgcttttgggttcttgattatgaaatccttggctatgccagtgtctagaagggttcttccaatgttatcttctagaatttatatagtttcaggtctcagatttaagtccttattccatcttgagttgatttttgtataaggtgagagatgaggattcagtttcattctcctacatgtggctagccaattatcccggcaccatttgttgaaaagggtgtcctttgctctcccctctcccctctcccctccccccccccgtctccccagggtctccctctccctctctttccacggtctccctctgatgctgagccgaagctggactgtactgctgccatctcggctcactgcaacctccctgcctgattctcctgcctcagcctgccgagtgcctgcgattgcaggcgcgcgccgccacgcctgactggttttcgtatttttttggtggagacggggtttcgctgtgttggccgggctggtctccagctcctaaccgcgagtgatccgccagcctcggcctcctgaggtgcctggattgcagacggagtctcgttcactcagtgctcagtggtgcccaggctggagtgcagtggcgtgatctcggctcgctacaacctccacctcccagccgcctgccttggcctcccaaagtgccgagattgcagcctctgcctggccgccaccccgtctgggatgtgaggagcccctctgcctggctgcccagtctggaaagtgaggagcgtctctgcccagccgccatcccatctaggaagtgaggagcgcctcttcccggccaccatcccatctaggaagtgaggagcgtctctgcccggccgcccatcgtctgagatgtggggagcgcctctgccccgccgccccgtctgggatgtgaggagcgcctctgcccggccacgaccccgtctgggaggtgaggagcgtctctgcccggctgccccatctgagaagtgaggagaccctctgccaggcagccgccccgtctgagaagtgaggagcccctccgcccggcagccaccccgtctgagaagtgaggagcgtctccgcccggcagccaccctgtccgggagggaggtggggggtcagcccccactcggccagctgccctgtccaggagggaggtgggggtcagcccccgcccggccagctgccccgtccgggagggaggtggggggtcagcccctgcccggctagccgccccatccgggaggtgaggggcgcctctgcccggccaccgctactgggaagtgaggagcccctctgcccggccaccacccggtctgggaggtgtacccaacagctcattgagaacgggccatgatgacaatggcggttttgtggaatagaaaggggggaaaggtggggaaaagattgagaaatcggatggttgccgtgtctgtgtagaaagaagtagacatgggagacttttcattttgttctgtactaagaaaaattcttctgccttgggatcctgttgatctatgaccttacccccaaccctgtgctctctgaaacatgtgctgtgtccactcagcgttaaatggattaagggcggtgcaagatgtgctttgttaaacagatgcttgaaggcaacatgctcgttaagagtcatcaccactccctaatctcaagtatccagggacacaaacactgcggaaggctgcagggtcctctgcctaggaaaaccagagacctttgttcacttgtttatctgtggaccttccctccactattgtcctatgaccctgccaaatccccctctgcgagaaacacccaagaatgatcaattaaaaaaaaaaaaaaaaaaaagaaaagggtgtcctttccccacttgtttgctttgttgaagatcagttggctgtaagtttttggctgtaaataaatttctgagttctctattctgttgcattggtctatgtgcctatttttataccagtaccatgccattttggtgactatggctttatagtataatttgaaatcaggtagtgtgatgcctccagatttattctttttgcttagtcttgctttgactatgcggactcttttttggttccatatgaattttagaattgttttttctaattctgtgaagaatgatggcggtattttgatggggattgcattgaatttgtagattgcatttggcagtatggtcattttcacaatgttgattctgcccatccatgaacatgggatgcgtttccatttgtttgtgtcatctatgatttctttcagcactattttgtagttctccttgtagaggtcttttgcctcctcggttaggtatattcctaagtattttattttatttttattttttgcggcttttataaaaggggttgagttcttgaattgagtctctgcttggtcgctgttggtgtatagagaagagctactgatttgtgtatgttaatgttgtttccgtaaactctactgaattcttcctcagttctagcagctttttgaaagaatctttagggtttttgaggtaaatgatcatatcgtcagcaaacagtgacggtttgacttcctctttaccgatttggatgccctttctttctcttgtctgattgctctggctaggacttccagtactgtgccaaagaggagtggtgagagcgggcatccttgtcttattctaattctcacagggaatgctttcaacttttccccatttagtattatgttggctgtgggtttgtcatagcttttattacactgaggtatgtcccttgtatgccaattttgctgagaattttagtcataaagcgatgctggattttgttgagtgctttttctgcatctattgaaatggtcatgcaatttttgttttcaattctttttatgtggtgtatgacatttattgacttgcgtatattaaaccatccctgcatccctggtatgaaacccacttgaacatggtggattatctttttgatatgttgttggatttggctagctagtattttgttaaggattttagtgtctattttcatcagagatactggtctgtagttttctttttcagttaatgtcctttcctggttttggtattagggtgatgctggcttcatagaatgaattagggagggttccctctttctctgtcttgtggactagtatcgaaaggattggtaccaattcttcctttaaatgtctggtagaattcagctgtgaatccatttggtcctggactttttttttttgttggtaactttttaattaccatttcaatcttgttgcttgttattgttctgttcagggtatctaattcttcctgatttaagctaggagggttgtatttttccaggaatttatccatctcctctaggttttctagtttatgtgcataaaggtgctcatagtagccttgaatgatcttttgtatttctgtggtgtcagttgtagtatctcctgttttgtttcttattgaggttatttggattttttctcttcttttcttggctaatcttgccaatgatctatcaattttatttatctgttcaaagaacctgctttttgtttcatttatcttttgtattttttttttgtttgtttccatttcatttagttttgctctgattttggttatttcctttcttctgctgggtttgggtttggtttgttcttgtttctctagttccttgaggtgtgacctcagaatgtcagtttgtactctttcagtctttgtgatgtaggcatttagggctatgaactttcctcttagcaccacctttgccatatcccagaggttatggtaggatttgtcgttactgtcattcagttcaaagaatttttaaatttccatgttgattttgtttttgacccagtgatcattcaggagcaggtaatttaatttccatgtgtttgcatggttttaaaggttccagttggagttgatttctagtttacagtcatatatagctcagttgtgagaagaagtttggtctcaattttattaacctgtatattggttttacttgagaggagcaatttcacaggacataatggaaaattgaaaaggcactttgggcaactagagtttagtgggacaaagttcatagttgtcaaaatcattttctctttagagttgaaggcagtatggcatggtttacaaagattaaactgattaaaagattataatactcggattgaagacaaccctaatagacaagtatgctatcaggctcaaatagaatggatcaagcaaatcttgtaagggctttagtcttttactgtatatgtttatctaaaaagttttttcccgcaaagtgaacatataatattgggttgtattaaatgccattttgtcctggtcttactcttgtgttatataatcataacattgagaaaatgctattgtttctatttctgtagtttctgatgaagtccatttttaaaactgcacgttgctgatatatattcattatgagtccacattttaccataatataagtcattttcctagacttttgggtgattttatgtggaagagattatctttagaaaatttatgttgcgatttctgatgagctcatgttaaacaggcacgatgagtgagatctgtatacttcaagccttagttttttaacttgtttggagcagttggaagttggcagttctcatgtaaagtgctgctagttagagcaaatagcctctgcagaaggatatctccgagtttaacttgaaattatctgtctctgatatacgaaaatggattttgttttctgcatagccccaaagttgatattttaagcaaaattaagcccatttcaggtgaataaagtatgtaaaaagaaataacagtaaagatttatttatatttatttatttattttgtggagatgggatctccctattgttgcagtctgcttagtccctagctcagctaggtctgagttcttgttccacaaccaagaagaataaggcgtgtggacaccagagagtgagtagagtaggatttcttaagcaaaaggaaaggtctcagcaaacagaggggccctgaaagcaggttgccagaaacgggacttacttctggtcttttgtgtggcagaagccaggaagtcgtcgtggattttgcccaaataggagaggtaaagctccctcctaggggtgttgcatctgcccacgcttggagttggccagagtgacttcatcttggtattactcatgagtgcctaagccaaacccacaggtgctaaaaccacaaagttaatgtcatgttaatgacataatgagcttggtcaagttaacaacatttaggttgatttattgcacctgcgcctaagttgggtcagtcgtttctgagcaacaccctggcacaaggtgaagttcgtaaccacatttcttctggttagctgcagaagcagtgtaggtgctgtcctacagttgttcctgtgaacattgtccttctcccaagaccctccgtctctatctgcctaaccagcccctaactgcctcctctctcactgtgttgcccaggctggtctcaaacttctgagctcaagcagtcctcctgcctcagcttcccaaagtgttgcaatcacaggcgtgagccactgtgtccggccagaaagattttttggtttgcccccgtgttt

SEQ ID NO: 6436 - DNA, 6000 bp, Homo sapiens
cctctaggataaggactgtcacacagatttcagtgcctatagcacaatgcttagcccattaaatgagtgaatagttgttaaagccaattaggttgaataatactaacctgtactgaattacactggtgcagatagtgggaccttccattccatatgacaactgtataatgttcttagctcagggatatactatatttagctagatttatgaaagtttaaatcctcctataaaacatctaaataagaataacccaattaaattagaaaagttcattgtttgttggtttgctttttgttattttattattttattttattttattttagatatttggccagacacggtggctcatgcctgtaatcccagcactttgggaggccgaggtgggcaaatcattttaggtcaggggttcgagaacagcctggccaacatggtgaaaccctgtctctactaaaaattcaaaaaaaattagccgggcatggtggcaggtgcctgtaatcccagctactgggaggctgaggcaggaaaaccgcttgaacccgggaggcggaggttgcagtgagccaagatcacaccactgtactccagcctgggtgactgagcaagactccatctcaaaaaacgaaaatatattatatatatatatttatttactagaactactattcgtaggtaatttttgtttcataatttctcttttatctgagttactgagtattctgcttttattatacattatctctgatcatctggttcatacaattatgtgattaggctactaattcacttatgaaaattctaagtactaattcactgaggtactagtgaaagccaagttatgaaaaccatactagtgaagacctggttttcactagtacaaagaggacatataatagccttagttaaggctacataatttgatatataatagggaataataaatcttgaaaacaaaaatttcagaactttttacaagtggctgaaatgcaacatgaatatgtttcctccaaaactttttttttttaatttttagagaagggggtcttgctgtgttgcccaggttggacttgaattcctaggctcaaacaatcctcccatcttagccccctgattagatgacaggcacatgccaccatgactggcttcccaaaacttttaatgaaataaaatagtgtggtattttattacataaacatttaataagggatattgacagacaatgggctaagcagatgacaagatgaggaagaagggagggtatttactatggtgactgtccaccttactcctggttttacagttaggctttcactactcatccataatatttagttacaaatttgttagagtgactcagcaggtgaactgctttctgacgaggatgaacagcccttctgacaggggggtttaaaccacagattgtccatttcattctattttggggggaatattatattctcttaacctcctatgctatccatgttagactctatatgcagaggctaccaaatcctaaaactagggggaaaaaagtagttaacccctttacattatagatgagaaaatttaggtccaggaagcttgtcacacatctaaatcacagaactagctagcagcaaagctaaaacttaatctaattaccatgcctccagtttctatacctttcactctttcagctacccttcagtttttgcatatataccagtaatttgtatgacttggagattctgggattggctcaattcaccagaaaatagatttcttttttcttttctttctttctctttcttgctttcttttttttttttttttttagacacggtcttgctctgttgctcaggctagagtgcagtgacacaatcacagctcactgcagcctagatctcctgggctcaagggatcctcccatctcagcttcccaagtagccaggactacaggagcgtgccaccacacccagctaattgttaaatttttttgtagagacggggtctccccatgttgaccaggctggttttgaattcttgggctcaagcaatcctcccgctttggcatcccaaagtgttgggatcacaggtgtgagttactgcacctgacccactagagagtagatttgttatttgctgtaggatctgccctcttttaacatgaaaatatctttaggaggtaaaataataactttttttttttgagacagggtctcactctattgcccaggctggagtgcagtggtgtgatctcagcttactgcagcatcgacctcccaggcttagatgatcctcctgcctcagcctcccaagtagctgggattataagcacacaccatcatgcccagctaattttgtattttttgtagagatgggtttttgccatgttgccaaggctggttttgaactcctggggtcaagggatccatacaccttggcatcccaaagtgctgggattacaggtgtaagccaccatgccaggccataactaatatttttatagcacttcttttcctgaaaaaaatgcccttctgaattgttatagcactttaaaaaggaatttcacatattttgagataagcagctggtctgctatctcacactcatactaataattattttattatggtggggtcctgtatgggaatctaagcagctgaggaagcaaggctaggtacttggcgggttcatttgggtggaggctttttttgtgtgtgtgttttgttgttttgtaaaactgcctggggccaagagattggaagttacggataaagatatactatctttccaaagaggtcctttctttgaacagctagatctgcagtccttacctgaagatgattttgctcattcctccccatgacctttggtgatgtctggagacatttttgattgtcacattggggagggtgatgctactggcacgtagtgggtagaggctggggatgcttctaaacatcctatgatgcacaggacagtccccacaagaattatccagcccaaatgtcaatagtgccaaggatgagaaattataagctagagaaagaagaattcattgacgagctggaggaagcttcttgaattattatttatgttatatatttaagaacttagaggcggggcacggttgctcacgcctgtaatcctagcactttggaaggctgagaaaggtggatcacctgaggtcaggtgttcaagaccagcttggccaatgtggcgaaaccccgtctctactaacaatacaaaaattagccgggcgtggtggctggcacctgtaatcccagatactggggaggctgagggaggagtatcgcttgaacccggggagcggaggttgcagtgagccgagattgcgccactttactccagcctgggcaaaagagcgaaactccgtctcaaacaaaaacaaaaacaaaagaacttagaaaaggaagtaagtcacacacagtaaccgttttttcttttggggtatggctagtagtttctaggaatcctggagactttatctggatttcagttaggcatttcaccagttctcatggcatctttatggaggaatatgggccaagaagacagttcggttgtgtcgtccacctgtattcgaagcctactgagaaatttttgatggcaggagcattaaggtctttagtggcatgcagcagagttctgtcctccgctctgtcttattaaacacttggacagaatgctgatcagatttgagaaggataacaaatctgggaagggtaggcatccccaaagatcttcaccaccaggaacaacggtttgcttcgttcaggccatcacagtgtccttagtgagggacaccacaacccataggctgtccagaggagcgtaatggggaagaatgtgaaagagcttgaaaatcaggacctgaggacattgcgagatggaaaaacaccgtgggacaaaatgaggaaaaccgagagaaatggaaatggcatatacgaaggctttgagggaggactgtgcccctgggggaaactgtgcccccgggctggagtcacaggcatagtttggcctcatagaaggagaggtcgattaacaaaccttgcaagtgttcaaatgtggaatgggcttgctcggaaggtactgtcaagacagagaccatccgagggcttttattgcaagtgtcgagacacattgctggtgtttctccttagaacgtcctccaatctgctctgacttccgcccgcacccgcctgagtcctgccccattccaagggtggcacatccaggtcccgagggcgccagccatgcccggagcacgggctgatctgcgtaactctgtcccttcgggagacttctgggaaatagttctagtccttgctatccttgctttctggttttcagaaatcagtgcagctgctggctttatgcagtcttctgcgggacactgcacacatccaggtgtttatgtcattttttaaaaaaaacaaatgttagattgggtgactaacttgacaggacatgaggaatctcttcaagaggaatcagattttcttcaggatacgtcatccagagacaagagccaagggatgtagaaacccagggaagcctcgcgtccccacaaagcccgccggccaaatcccgaaggggctctaccgggccagctagcccggagcagtccgcgttttagacttagaggcgcgcgactgcgcgcacccggctggagctgcggagaggaccaatgagcgggcgctctctccgctccggctcgggattgggcaagccgcgccagcctctcacgggcggggtgggactcggatccgcgcgcccactgcgccagagtcccgggggcgcgtgcgcggtctcgcggcggccgcaggggccggtctcgcgcggtctagaagtggagttgctggcggctgcggcggtgacggcggcgacggaggaggcaggcggtggggcgggggcggggactaaggattctgaggtggggagtcgggagtttctggattctttatccggaatttcaagggccgccggagggctgtcgcttctgcagtgcgtaggagcggccggggcgggaggctccgcggagccgaggcgtggaggtaagaggcggatcggcggcggctgggctgtagagatcttaatcaacaggtccctgggagcgcggcgggggaggggcgggcggccgggctccccttcccccacacgctgcgcaaactccggccagcgggagacccctggcagccaggcgggcttcctcaggcgcgcgagctgcggccgtggagggtgtgagcccaacctttgtccctcggagcaacgctgcctgcgcggtgcccgctccttctgcttggctgggcatgcaccttggcgcgggccacagccagccgagcccgaggtgcagggggcgcggcggggagtcgtctgccccctgcgccctctctccgaggtcgcgacgcgcgggactctcccggccgggtctgggaaatcggcgagggaacgctttcctttagaagtcagaatgtagtcagcgttcctctgcctgactcagctgctggtattctgctgctcattgcgttcttaaacacgcaaacagttcctgcttccttgtgaccactttaaaagaaaagcctagttttgttcatggtttctgatactttaaggttgcacgttgaactttgaagcatgtaaattgttataacctacgtttaatgaagtttgctttaaacgatctttgtagtaaattatgtaactttctaatgatcataactcaccttctgttgattgacatacagtaatgtgtacggaatgtaggtttcggtcaaaaggtttttcttggcagtttatgctaaaattaaaatctgatggctaggaagtttttagatgtagtatggagtgtgtgttttgtctccatactcgtttagaatagtaagaatttagatttggaaagtcagttgaacaaaaattttgaaattttgatttgactgacgcagtgaaaggtgttaatatttctgattttttaaaaaagcaatatcatgttttaa

SEQ ID NO: 6437 - DNA, 6000 bp, Homo sapiens
gctacttctcatgggaccacaaaggactttctctcccccctcatcctggggcaggaaggtttggccctggctccatgacttggggaggaagcactggcaggggactccctacactggcccgccctgaccctaaacgaatcaccccctttgtctgtgctctagtcctgtactcatttctcaagtgcttggcttaagagagaagtgcattttttcatagagctacactgccttttctcctccttccctcttcctctcccttccttccatcaacaaataactatgcgatcgcattccaagggcttcagacaaacaaacaaacaaaaaaacaaatactacacactaacaagcatgtactatttgccactactataggcaccggggaaacagtggtaaggaaaatatacaagaaccccagtcctcttggaatttttactccagtggcagaaactaataagtaagaaaccagggttatcagacaagtaggaggaggaggattgacaataagaaaactgccaagttcctttcaaagagctaagtcctttcctccatctataatggtttatagaaactaccttataaatatcttttccttagagacgattggtgcattgagtgcgctcagctggcagtgggcagcgcatgctccactttatgctggcacctccgtgggcatcagtctcctcccctgtggaagggggatgattgcgccttcctcacagggtcgttatgagtattctgagatcgtgtatcagcacattgcctgttgcttggtaacatacattctgtccaccatccctgccttctttcctgcttagagcagacatgggccagtaagggtatccaatcaggtcccttccctaccttctgggccctgctgctgtggacagagcaagagcttctgagctggcccagcacctcaaatgggaggctggggccctgctctgtgcctctcccctgccttgcctccagcctgctcagcagaggctctggaagatgcagccacccacccacgggcaggacagtctatgactgctggacattagccatggccaaagaggctggcatcaggtctgttcttggcagcaatagtgagcagtccctttcaggaggcccctttcacctccagcagccagcaacagcctgcaggagagagcccctggggggtgcttatgaggcactggattttacatgactttatttcatcctatctttcccaacaaagttgtgaggtaagagctgtcagtgccccattttgcagttgaggaaactgaggttaagaatttgcccaaaccactctcttaatttgtgacaggatcagcattcaagttcaggttgtccaattccagagccagggccttacactgagctgtaccctttccccctcggttatccactcctccacaacccccacaccaaaggcccagaggcagagagctccctggggcatctgggagccccaggggcatgtggaactttgcccagcttaccctgagtgctggctttgacagctttaaaacaatatgaactgtgcctaagagaaatcctgaaaaggaggaaatgcaagttcaaagtggcacagttggtgagacccccccaccccaggacatcttatatccctccttttatggatgagaaaacggagaactgtgggcagggaaagtgagactcctgcatacagaaattcagaccacactgcagatttcccagtggcctcagaagccctgtactcgtacccagacacaagcgttgaaaatggcacaggacttaaaccgagcttcaccacttacttgctgtaggattccaggcaagttgagtagccgttgagcttcagtgtcatcatctgcagttggggatatgatcatccttagctcagggttgtaggggctttagagacagtataggtgacagtacctggtaggtactgagtaaactgcagctattatgatgactcttgttttcacagttcaaagtatgtgaagaaacagtgaattccttaggtgttgctttgattctgtgatgctgctggagtccattcctagtaccagagaggaaacaacactcattgtcatttctgagcattgaaacctatcccagggagggccagttctgcacccacttgggattacaatctgaaacgaagaccacagactgtagccaaggtggcaattcctggtctttagctctgccagagtgcctatggcttcaggcacattactccacctctgtctatgtggaattcctgtcagtcaaatgagcatggcaattacttgctgtcttacccccaccccacccccatcatcccccagggaagtgcccaactaaggaacaactgtggtgaagtcatctagagaggctacgcttcacttctgtgcagtctttctggtggtgggggccaagcaaaccttctctcagggacagaactaccaggagtgaccatttggggcagatatatagcatcctcaccactgagccctgggcagtaagtggtgagatgtgagaaaccctgccacattccagcccatcccacccctccctccttccccccatggagccttccttttggagtcaccagaagccccaactgtctggtttcagtcagcatggtccagcttcatccccgtgccgaggggtgagtttggagccttttaccaggaggtgataggtgatgtgatgtcttcgaatcccacatccaaaggcaactagagatgcacagaccaggctgggatgaggggagcagcctatgacaacagggctactccccaagttttcacctggctcacctgagagatgtgtgaaaatgggggcaccaggagggtagttcccttacattttcttggttgacctgagaggcctgtggagcctgattcccaaggagcaaggtctttcctggcctcccacaaatggcaccgctggatctgccccatgattcctgcggaaaccagatggaggtttggcagtggttttctccatctatgcaaacaagccctggcccctggcgcagtcttattaaactccccaggggagagagacctgggagagcatctggcgtctccagactcctgcccctgttgtgactgccacaccttatgcctgaaattccctgctacttgtgtagaccctttgtgaggccctctttgtgcattctcttctttctaggtcccattcctgcgtgggtcacttttggacttgtctaagtgtcatcgtaattagtcttctgagtgaggatatcgtattgcagtaatgaccctgggttttcctcagcaaaaacccaactagggtttcttcacctcaacagaaatgtattgagcatctattatatgtgcggttcagtctcgagtgctggagaaatggagaaaagccacctgattttacttctatctgtcagggtggtgctcatgggatgcttgtgggggggcatgatgctgtgacttcagtttgcctgattccccagatggcttcatttagaggctggaccctatgtgggtcttcggagtagccatggtgtccagcagtgccagcaggaagcagactcctcaacaactctgccccggcattcaaggacctcctgagttcagactcacccagcctggccaacctcaactcctatcaaatcctaggccccctgcaacgcctggcagctctctctcttgaacacatcaagctcttccatcctctggatttttgcaaggcctatttctgcagtctctcccctgtcctcacctcccccttccttacctcttaagtgattcatccacctttctgagagctttcccaaaggccaccttacaataaattatttcttcctctgttggatccctactttgttgttacacatctattcattgagcgctctgtgcccgacactgtgctggtttcctaaaactcatccaagcctcttgctttctgcctggagtgaagagtagttcacgttctgattctcagtgcctctagggctggagcggaatcttaatgtctgtgtcctcgtctctcaccaccgcgttttgcactttgtcgaaaggtgtcagatggtgagatggcttctagactgggctctgcccactaattagctgtgtggccttgggagaatcatccggcctctcttgctgcccttctttccgatgaaataatgctgacgatgatatttcagggttgtccaggggtcaatgaggcgggatagagggaagcatcgtgaaatctgggagccccaggccagcgaaaaatgtggaagggccgtacccgcactctcctagcactgggtgtgaggcagcgtcgtttccccttcgcgctcttcgaatgtcaagtgcaccagcttccaatccctcctctgggcgggcccggtctggctaatctcagctgcagattccagtacaaactcaggactctcccccgcccagccgcccctacacaaggactcgccgaacacaccttgaatcccgcgccagagcgcagcccggaactgcagctcgcggcgcgggcccaggtcgggggtcgcgcgtctccagtcggtgactcaaggccgctcggtccgggggtgggtgtgggtcggcaggaccgaccagggccgcgcgggggcagctgccgggcgttcggtcacctagcggtgggagccgaggctggctttggccagtcgccattccgccgcgggcgtctgtctcgccgggttcccgggcgcgggaggaaggcccgcgccgcttcccactcggcgcgcttctctcccagtgcgcagtggcctggtgggtcagccggcggcggctggagcgcggggccggccctgcgcacgaatgaatgggcgcccgggggacgcgcgcgctcggggctgaagggcattaggaccgtgaggatcgctccgcgatcctgtctctccctatcacccccccgcccccccacctctctcctttttctgctctgcaggactgagcagctaggcgcgagcgaaaacaaacagctggggctgcgagcgcccccgccccggccccgagagcacgccggcccagtcccccacctggggcgcccgtctgcccaccatgaggaagatccgcgccaatgccatcgccatcctgaccgtagcctggatcctgggcactttctactacttatggcaggacaaccgagcccacgcagcatcctccggcggccggggcgcgcagagggcaggcaggaggtcggagcagctccgcgaggaccgcaccatcccgctcattgtgagtacgccccgagcgtcggccggccggctagggagccgcggcgcgcgtccagaccctgcgcggcggccgagggcgcggggcccggccagggctgagtgcccgctgcgccgggccggctttgtatatgttggagcattcctgcccgttgttatggcaacctctgccgggcggcggggctggggcgcaccgactaagggagggtgacagagggtgggggctgggagaaagtgctgcaagtttggtgggcccggcgtgcgcgcgcggctgggaacgtggcggctctcccggctctgcgctgccggggccgggagtctgggggctgcgggagcctcgtgtgccccggaaggctgccgggcccagcgcgcggcgagcgggcggtgggaaccactcgcagccgagcgcgtaggtggcagtgcgcagcccctctccagccttctgggggcagaggacatcgggtgggggcgtgggtaggggaaggctctctaggcgctgcgcctggcttcgaacccccttctgagccgggtcaacttgaacccgcttcttcggcgcggacacccagcttccccggagttctctgggttgaggagaggtctcgcactgtacgcgtctctcactcccaaccttagggtccgccaccacgggtaggtgggcagtgtcagcgcccgaacttggcgatacccttgcatgaagtcagcctcgcgacatctaagcgggcagggaaacaaaggcagtgtggcacagcgggggcggcggcggggctgcgggggcccttggcgctctggggacccgggcgggg

SEQ ID NO: 6438 - DNA, 6000 bp, Homo sapiens
aaaaaactagctggtatgcaaaaaagcacttttttaaaaagcaagagatatatgaggacaatttcaatctttatttgctatttttattaggggtgggaggaagcacatggtttatttgggaaagtgtgacctttggaacagacaaacaagaatgaattctgcttttgcaacatacatacttatgtggttttgatatgtcaaaaaaaaaaatctctctaagccttgcttgtaaaatggtgttaatgataattaacttggaggactgttgccaaaattagaggttacacgtatcaagtccctaccaagcacctgacatacagtaggtgctttgtaaatagtagctgtcattactactattgtatgtaataaccatagcaactgagattccatgtacttattctgaaccttttctctcactttcagagagccaaactcctctgtcctgccctgcaagcagtaaaggcacacactccttgttatattcctgggagatgaaaggaatactgtgcctcctgactcttatcataggagtgactacctcatcctgattggcccaggactgtcctaattttggcactggaagtcccatgtgccaggaatccccttagtcccaggcaaactgggatggctggctattctactcaccaccaactgggactaatctaacccccatgccatattccagcacctagatttagagcagaatattaagatttgtgctggaaattggccaggtgtggtgactcacgcctgtaatcctagcactttgggaggcagaagcaggctgatcactgaggtcaggagtttgagaccagcctggctaacgtggtgaaaccctgtctctactaaaaatacaaaaattagctgggtgtgggggtacgcacctatagtcccagctactcgggagactgagacaggagaatcccctgaacctgggaggcggaggttgcagtgagctcagatcatgccactgcactccagcctgggcgacagagcaagactccgtcaaaaaaaaaaaaaaaaaaaagatttatgctggaaatctggaaggacccaggaatattagctcaaagagccatcttaagtccttttagaataaggcagggtctgaattgaaaagtgaaaataaaaaattagctctggtttaaaattgattgttaggtggaagaaacaaaaaatcaattataaaggccacatatttgtatgattctatttatagagagtgctcagaataggcaaatctatagagacagaaagtagattgttggttgcctagggagggaggcagggaaggtggtagggagggaggaaatggtagtgactgctgatgggtatgggagttttttttagggtcatgaaaatgttctaaaatattgtacgactctgtaaatatactaaaaaccattgaattgttcactctaaatgtacaattgtacatgtgcaaatttgtacaatttgtaaagttatacaaaataaatacaaatttaaactgtgaattgctggtatgtgaatatctcaataaagctgttaattaattaattaatttatttaagacacagtctcactctgtcgcccaggctggagtgcagtggcgcaatctcagctcattgcagcctctgcctcccaggttcaagcaattcttgtgactagcctcccacatagctgggattacaggcgtgcaccaccacgccaggctaatttttatatttttagtagagacgaggttttgccatgttggccaggctggtcttgaacttctggcctcaaatgatcagcctgcctcagcttcccaaaatgctggggttacaggtgtgagaaagctgttaaattaaaaaaaaatcttaaaaattttaaagaattttatttaaaaaaatctatgatccctcccacttgagaatgtctaagtctaaattattcttaaccttcatcttgtgagatcttttcaatggcagaaagataatattcaccccaggccaggaagtaccattccattttgcgggtgagaagagcaaggcctatacgtagaatgtaacaggggcttttcgtcagctgtactgaagaggccagtggaacttcagataggaggggatgagaagacaggaaaggctggtgagctgacatttataaagggaggagacttgaccctgattctggcaattcaaagcagaaggaaatggaagctaatcccagctgtaacccagctactcgggagactgaggcaggagaatcccctgaacccgggaggcggaggttgcagtgagctcagatcatgccactgcactccagcctgggcgacagagcaagactccgtcaaaataaataaataaataattaaatatttaaaatgtttaaaaattttaatttaatacttttctgtggcactttggggctcaaccaaagtgccacagaaaagtagaagcagcagccttgggaagattctgaagggtaagtagagaaggccttcaagattgaggaaacagcatgggcacctggtttgtgacaggaatggcttgttagagaccagcaggtggtatggggaggctggagtggggtgtgtggagggatggagagcatttgggccggactgtggacagcacaggatactacagtccttgctgatgactttgagttcattctgtggaccctgaaggtctgggagaggattttttttttttgagacagtctcactctgtcacccaggctggaatgcaatggcacgatctcggctcactgcaacctctgcttcctgagttcaagcaattctcctgcctcaggctcctgaatagctaggattacaggcatgtgccaccacgcctggctaatttttgtatttttagtagagaaggggtttcgccatgttgtccaggctggtctcaaactcctgacttcgtgatctgcctgccttagcctcccaaagtgctgggattacaggcgtgagctaccgcgcccgactgaggatttttgggtagtgatggacagatctgcatagggtctcacaagggattttataaggtggcagttcttgtatgaagttactgagcctcttaatggccaaactgacttcagtgcacagccaggggctcagttactttggcagttgatctgacctgaaccatccatgcctgctttcttccctttcctttctttctttttctccttcctccattcatcttctccaattcttcctccatccctttcccttgcttccttcccccttgtcccctccctgagccttgggtctgcctggcatgttcctgctgcccacactgatttggttgtgctctgaggcagacccaggtagttctgaattgtgcttttcaatcttctagtggtctgggcagtgtggccccaaatgagcaggaagggaggggtgcccatcttctctaatgagtctggacccaagaaggcaaggaagaaagaaggcagaacaaggatagacttatgaaaaaggcattatagcaacgagccacaggttgctgtggggcccagaagggaagggttcttttggggatgggtctgtgtgcatggggaggagcatcctgtttatttggttcaagctacttcacaaggacatgccctgttaattcacagtgcttttcccgaaagcctactagaactaggcctggtgagaggccctgagaaggtgtatccttttgtccaagagcatctgggagaagaggcctgcctgacccaagctgcagcaaagacacaagtctgtaggtccagatgtggactctaccactgatttacaagtaggagttccttaacacttatggaggacctctgagaccgacacggtgcaaggccctggggtacaaagataaaaagccagagtcctccccatcaaggcgccacgggccctgtaaacacataaaccgaggacacactgcatgagagatcaccaataaacgatgtagccatacagtgcacaaactgctcactcagtatgtgctagaaaatagccccagaaggcaaggctcaagaggggaaatacagttaggaatgtggcaggcttctagcccgggctctgccagtcctggctctgaactgcggttttctcaaccttgagatcccttgtgtgcttttagtatgctgaaggatcactcacttcagaatgctagtgaaaatacagattcccaagtccgaccccactgaatcacaatggctggaggtcattcggggccccgaatctgcattttcacccccacccaccccccgggcagctttaatgttggcaggctaggaaccacagttcggattactgcttaacagggagataataacctgcttcagacgagctaggtcagacgagcaattcaagagctaacaaggcaacatgcgccaaaagccttgtaaacctcagggcagtacaattctttgcaaataatagtaattcaatcatgcaaataataataatagtaaacgaactggagagcgcactggaaacgccgcatagtccagctgagtcggtgccaccgccccatccactccagcgcagagggactgtctctttaaggaccccccacctccccaaccgcgtcgcttctcccttgggtacctggcccggccggcggcgcgtgcgtgcagggcctcccggcggggcggtcgcggcggcgcgacgccggcgccgttgcgtgcgcgcctggccctgcccctttcccgccccttccccgccccctcccctccgcggggcctcccccgcccgcgcggtacagctgggtcagtgacgcgggcgctgcagccgtcgctaccgccgcgttctattctccgaagccggcgaccgccccacctcctccctccctcccgcccgcttcctctgcccacagcgccggccagagcgagctagacaagggcacgcggggcctcgcctagacccgagaagactgcgggcgcgcgcaagcggcggcgtggaagctgtgagcgcccccatcccggaggtctccgccggctcccgggtgagttgtcaccgcggcccgggggcggcggggccggcattgtgccatcgacgcgctcggccggctgtcaggggcgcgggaccagcgcgcaccgcccaggagtgacgctggccggagcccgggccggcttcggcggctccccgcgcttctctgcgccggcccgctgtcacccggccgcgagccgcgccgctgggagccccgcgctggcgtggcgcggccagccggccagcagtgggggctgcgcggccggggggaccggcggctggtttgcggccgggaacttggtgacccgcggtccggggcgcgccgtcccgcgtcgctgcccgggcagcaccggaagagccagacgccgtgccgatgggtgcagaggaggtaggcagaggccctctgtgccactgtcattactgccctcagcccagcaaagctgcggggcttgcgctggggcagggctggcttagagaaggtggatttcctgaggaaatctcagagcccgcctgtgcgcaccgcggcattcgggagcccccgcgcctcggctgctctttaatctcaaaaacttctcttattaaccaggctaaactccccgaaaccagctattttctttcaaaaagtaggcacgtacatacagactttccttttttcgcttggttttgagaccccagctatgagtgtggatctgactctccctcatgggagtcgtggctggggagctgctgaagtggagaaaagttaccctggacgaatttaggagcaggagggggaggtggttatggggacagcaagacccaggagcaaagaggcgtcaaaataaagtcttgggctggttaaagggaagttggcgtctgggcaaggaggcctaaagctgttgttcccacagaattttctttcagtggcaggcgacatgctgggctttgttgctctcgctaactgggctcctgtgtgctcttccagaggtgcagtaagattactcagttcaattaggcctagggatttactcccttttttgatctacagagatgggaagtatgtctttccttcacagtagtta

SEQ ID NO: 6439 - DNA, 6000 bp, Homo sapiens
catcacatggagctggtagactttcaacatatgaatttcagggagacatatttagtccataagagccattaatattttcgagtaccagggagctgggtctgcagaactagaggtaaaccacagcttgaatgctgtggcctccttttgtttggcaactcaaggacgactcatgaggatggcctctacttctaattgtgtcccagaattgtatcctttcttagtaacataaacgttgacttttagctgtacacatgtggtcacctccaattaggattacattttttaaagcccttttttgctgaatgtggtcatatgaccaagttctagccaatgagacaaaatgaaacgtgacttctgggaggtgtccttaaaaagaggagcatgctcttctttcctctttttccttcctgttggctggaaaatagatatgatggctggggcttaagcaatcatcttgtaccaccaggtagagctgcttattatgacagagaaataatagaaggagcctggcttggaggaagctgcccgaaactttcaatggagttgtgtaccaaagagagagctaaatttctaaattgtttgtcactcgaattatttttgtcatgtgtatttaaagctaaaggagtgactttggtaaggttaaatgtctgcgggtaaacttcatttgcacactgggactaataatacttaccttagcctaatgctaaggttacagcaagttagtcataaatctaaaagcagaacctaggaatcttaatgtctcaagcttctaagctcactagtgtttttgacaaaagtcttggaccttagatacagtgtacctctttccattggtagctattgtaacaaatgaagcaaatataaatcaggatatatttatgttatagaagcactctgctccagagcctcattcaggatctacctccatcatgagaccttcctgcccattaggcctacagtgggtcatctcactctgagttcctacaacacactgcaggctttactcttttttttttgagacggagtctcactctgtcgcccaggctggagtgcagtggcgcaatctcggctcactgccagctccgcctcccaggttcacgccattctcctgcctcagcctccccagtagctgggactacaggcgcccgccaccacacctggctaattttttgtatttttagtagagatggggtttcaccgtgttcgccaggatggtctccatctcctgaccttgtgatctgccctcctcggcctcccaaagtgctgggattacaggcatgaaccaccgtgcctggccagctttactcttaaatgtggtccccaggtatctctctggtctgtgtcttaaattagatggtaacctctcagagggctgggtgtgcatccaaagatccatcataataatgaacattgtgcaaggcgtagaaggaggtgcatcaaagtgcttactaaaaatggatgaaaagattctattctgaagatgagatgaggaaagaatcctctggattatatagaaacacagatatatatatatatatttctttttttctagatggagtctcgctctgttgcccaggctggagggcagtggtatgatcttgactcactgcaacctccatctcccaagcaattctcctgcatcagcctcccgagtagctgggattacaggcatacaccactgcacccggctaatttttctatttttagtggagatgaggttttgccatgttggccagtctggtctcaaactcctggcctcaagtgatctgcccacatcggactgtcaaagtgctgggattacaggggtgagccaccgcgcctggccagaaacacagatatatttgaaactggcatttctagttagtactaaatatttgaggccttcagacctcaatctgtgatataaagtattaattttcatctactgaaatatcccattgcaaatagaagtcccacaagacaaggagtatgactgaaactggacaaaccagatgccaagatagtcagattatttttggaccatgagtctggcctccagggaaagaagaaacttgtcaattttactttttttgcttggatcagaagattaagcctggcagagagatactgtttgggactagtggttctctggaattcctaaccttctctgggcttgggaggagttgggagaagaaaatgcatcatctgaatgatggccatggttacaacaggcctcatatgccaaccagagggaaagaaaatacttgctgagcagagtaactggaaagcagttgctcatagtttgaactaaactacatgattgaaatccagaataatgtagatttttggaccagtgaacacttggaaataagctttctggctggaaagcagcatttgatgttagggatggaaagggctattgcaatgctttttccctgggcactttgtgctgccagatactcagggccatctgaagcatatttacttactccagcagatttctcaatagttccagcaacaggaaggagttgaccagcttgataggtgaatgtagccaggtggtagagtcaggaaaagcctgtcacactgctgagcccgatggtaacagttccatcctgttgagcccctggagggtgaacacttaggtggacacatggatattgatgtcagtgctgcacagggcacggtactggacaagtgtcacaagtccagctgggcaaactccaggatgccaggtcacaagggctgtttccaggaagggctgacccctgatgtttacatccttttcctctgaagctcagtggagctcaccagtctcagttcaccttgtaggccactgaagaaattcccaattagcacagaggaacgtccaaccctatgggatttgagactggagattgcagccatcacatgatggaagcagaattagactccaaaaaccttgccttgagtctcggcgtctcggctctgtcatttgccagccaaatgaggccaggcaagtcacaatctcatggagtattcacttatctacctgtaaagtaggaatgtctgacctatttcagaagattgttctgaggataaaatgagatgaggcatttgtcctgtcctcttcaaatgccatattgtgatacttttcacttaattattttaagggctttaaagactccatctcctttacttttgacaacatctcatggcaggggatactatttttatccccattttacagagagaaaaacgggaccctggatgagtcaagtgacttcttcaagcttataccactaggtggcagactcaggatttgaaccctgctgtacagctccagagtctgtctgaccaaagcactcattcccagtggaggaaaagatagaccattcttttagaagtgcgcttcatttttgtttggagaaccacaagtactttgttattgttccagcatccagtctgagctttcttgtcagagggcaatggggagaggggaagtcgtttaagcagggaatggtgagttccggtttgctgcttaaaaggatcactggcttctaaatagcgaatagacacactggctgccgtgtggaggttggatggggccagtgtggagagagggcaaaactgaattcaggagtcaggtgcgaagctgtttcatggaatccaggagagaagccctgagggagcagagctaatcttaggacctctcagaccagatagggagggggagtgtggcactgatgcttacaatcaaattatagaaaagaatccctccctgcgaagtagcccatactgatggaagtaagcactaaaggttgttctccacataaggagatcgctctgggtttcattttgcgcccccccgcccccttccctgtgatttcctggagatgtcagtctcactgaaggcagctgagcaccttgctctgttgaggagccggtgtgatgcagctgtgaccattcccaagatggccttccggggatggccctgggcagagccccccaacatctgactgaagctccgctgagctgtcctctccaagagggtcgggcacccgggagagatctcctctccttgttctaccccatctctgggatctctgcatcctcagactgccgcctcctcatctatacttttcctccttgtctcccatcaggggaccagggcctctctgcccgcctcttccagagctgctgggctatagagaggctgccccttgccctccagttcagagggggaagctaggatgcctgagttccaatcctggatcatacggaccatagggctgggagatgtgtgtgtgtgtgtgtgtgtgtgtgtgtgtgtgtgtgtgtgtgtgtgtgtgtgtagggggttaccgtacccaagaggccctccccagcggccaatgcccagcacacgcttcaccttgtcccttgcgacttctcccggggcagccgctgtgagactcaggatgtcacctcccagggagagtctttgaaagaagtggatgctcccattccccactccaacgccacagcccaccctgtgcgggtcatccagcgacttcccagttactcttcccagatgcagcagggaggcagatctctcggcgccttcgtgtcacagcattctcatctgataaatggggctaggagtattttccctgcctacttcaccaggatgttgggacaatcacgagcttgagctaagaaatatacatgcttaaggcattattattagccaggtgagccttctggtgggtgccggctgctggggctctctcaggcttcctcgggcaggagtgccgggagaaagttactctttatcccactctctcccggggcctactcccgcggagctcctcggcggggggttgaccacgagtggctcctcttgcccctctcccattggctttcacctgccagagggtcggcttcaacaggcctcttggcccgtcaatcaggcccgccgtgctccgccccgcccctcccgggggtttataacgggaattcccatggcccgggctcaggcgtccaacctgctgccgcctgggccccgccgagcggagctagcgccgcgcgcagagcacacgctcgcgctccagctcccctcctgcgcggttcatgactgtgtcccctgaccgcagcctctgcgagcccccgccgcaggaccacggcccgctccccgccgccgcgagggccccgagcgaaggaaggaagggaggcgcgctgtgcgccccgcggagcccgcgaaccccgctcgctgccggctgcccagcctggctggcaccatgctgcccgcgcgctgcgcccgcctgctcacgccccacttgctgctggtgttggtgcagctgtcccctgctcgcggccaccgcaccacaggccccagggtaagtgcgcccccagctttgcgcccacctgcggagggaggggaggttgcttcccccctcatccctgagggaaggaggagggggaagagagatgtcagagacctgttgtcctctgtctactaccaggtcccctgcgggcttggtgaagttgctgaaatattttttttctcccattggagccaccaccactctccctttcttgacccaccatccctcccctgtccccgaactgtcactggtgggttttctttcccaatctcttctctcctgcattttgctcaagaccctcagaggtgcctcctgcgtcggagagaagctcgctctccgctcatgcagggcttccctgtggtctcacgctggcgcccggtccagcgcgctggagttgttggcaggcggcgggggttgggacgggggcgggtgcagctctgcctggagagttttaggttacccgcgagccacacaaggaccttgtgttgttgttttaaaaagcgatcactgctcgtaaaacccacagcagataattttaatgtcacctcctgccgggcaggcactggaagagggtcagaggtggggtactgtaaagaggtgggaggggagagttgcgcaatgttcaggggtctctccccctgggttcagtgctgggaggttgaattactcgttgaac

SEQ ID NO: 6440 - DNA, 6000 bp, Homo sapiens
gactgcaggtgcccgccaccacgcctggctgatttttttgtatttttagtagaaacggggtttcaccatgttagccaggatggtctcgatctcctgacctcgtgatccgccctcctcggcctcccaaagtgctggtattacaggcgtgagccaccgcgcccggcgtgttttcatttttaaagatatgagtgacttgagcatggatgtaggtagggtgaccaaccattccagtttggttgagactgaggggattgctgggtgcagcactttcagttttaaaaccaggacagtcctgggaaaatcaggatgaggtagtcacctcaattgccagtaaggaatagataaagtagtagaagatgaagatgcagttgagaatagggaaaattaatagaaacagtcctcaagtaggtgggagagatgatctggaaccatgaggggctaatgagactagagaggtagtaaggtagagaagaggtggatataggcagattcagatggtgaaaggcccagaaaccattttatctttgaatttggcgtgtgtgtgtgtgtgtgtgtgtatcatattccagagaaagaaatccactttatattatgacattgtggctttacacacacttacaccccacatatttggcactgtgtgtgcaaggttgctaaggatcttctagggatgccttctgatatttctgttctatttcctcaaggaaaaagactgcaggctatagccagctgaattacttccatgactctaatgggacagatattagtgacagacagataggaaaacagtgcattagggcattggaataagagggaagatgggtagagagcggtcttgatgaatttgaaatagctgtggggaaaggaagagtttatcaaacatgcagaagagggctgttggctcacctgatagtccgctgacattagaggacatggatttacggtggtaccacttcacagtatccatggtagaatgatggtacttcaggagctttggtctctgtaagtcctaggaatgaagacaatgagtctggttttaaagatttttttaaagttattctcctgttattgcctgctctcatgctgagctccaagaaaaagaataatatgacacaggttggtgtagcttatcagtcctttccacaacattatatctttgattagttcttcccattttcaatcctcccatccacaacaactgtcactccatagtaagtagaaaacatatcaagagagatatagagagcaaatctggcagttagaatttcatcccaattcagagatctttgttcttggaagttttgcctatgaactttgcttttctcttccatgctacttgcaccttgtggaataaggtgcctaacttgcagcagtgaaaactgcccagatgaatccagcctctttaagcaagttaatggcaaggataatgttcagcttgaaacaagttttccccatcttccagcatccacatagccagtctaggacaagaaaaggaaaaaaaccttaaatactttatattagaaaggaaaggtacttggttaactaattctactgtgattgagagacaatgagaatggattttcagctgctggcactatacataaatgaggaaaactcagaagattgaggaggtgcaaatgcaatatccaggagaataaagaaaagagcaatatggcataggaagttttgaaatatctactggattttatatctctattccttaggctggggatccaggacaagccatttcagttttgatttctatattctctttttaagcctttcacaaacacattggttttgggattttttttttttcagagcagcattagtagctttgatgtaggagtggaggaagtatgtgaagaattaatgcagttcctgcccaccccccattccccgacaatctctgtcacatttaggactctctagagtcaaagattttggcatacagtgcttgaagggatgaaactggtagcagagctgaatggattggaagacaagaacattaagagaaatgggggatgatgaaagaaaagtatttgggttttctttgggtttgagaaacaggtatagcagaagtaagggggagagctgggagaactaaaattgttggtaaattgattaggatatatgaaattttttgtgtgttgacaaggtatacattatgactatgagtgggtgggctgaattacactgaagatgaattgaagaggttaaaaaaaactttaaaaaaccctgtcttgttttcagatgggttttctatatacttgctaatattactttaagttgagggtaggaattttggtggagaataattttatcagtcagaggccagagcctttgaattttgtccaagtgtgataagggtggttgaagagacatctaaaaatagtgtagtcagatattgcaggataaatgatttggtgttcatgttgtgggctgtggagaacaggaactctggtccttgtggtgcatgtgacttctgaggatggagtttctcaagaggaagcctttaggcaagcagtaaattctattaaagctcaggttcaatacggtaagtagatgtagggagctttctgtgaagaggtacaggatggagttggttctctctctctctccttttgtctttaaaggaagactccagaaagcacaagggaaggtataagaagagaatataaggaaacttgaatcagggcaaagaaagcattgattagaaatggattcaaaatccaggagatgattggtgttgggtcaggcatgttcatttttatatcttctgtgtaagtcctcttagattagcttgatttaagtgcttttcctttttgttcttataagaaatagcacctaccttcatcaatatgttgatcacagtcagaggtgaaattaagtttttgggcctgatgcacgtacaagatgaggggcccactttaagaaaaataataccaagttacaattgcagaaaataagtatgaaaatgaggatttatttagcataagaaagaagctgcaacaaattataaatattaaaaggttgaaaacaccataaacatcacaaaatttaatcccctcagtattacattaatcaacttcctaactcacttttatgataccttttccctatagtttttaaattgcttatttaattacctcccttaagagaattattttgttataatttctacggcaagaactgaaaggcatttgcctttccctagtatgtttaataaaaattcattttgtattattaatagtttagaaaagaaaattcagcttcacagcttgttattggtaatgagataaataattaaatttactattgtcaaattttagaaaacctctattaagtcttttatgtatgcgatgtaatatttcagggtgtttgagatttttcttgtatagtgactaattttgattactcataattatatgactttcataaagtccattgctgagccccttacagggtctttatagaggtctgtacagtgaggatccctgaagcataaactttgtctggttttgatcatattatattataattatctgttttttgtttgtttctacacatgctcagtgcttactagcctcacttttgacagtcatttgagactatgatgaaatatatggatactctcctcagcaaaaaaagtcatgaaatacataaaatattgaatacaatattactgacctcctaaagcttattcttgctcctgccacagtttctgcactaaattgataatttatttaatgctctgtattttgattttctttctctaatatctagcacaatgtcctgcactttgtatgctccaaacacataaagacttgtttaataaatagaaaaagaaatggataagtgttgccagccagactgtatgacaggtgcagaaattccccactttcaaaaactgttggtaaatatatttgagcaaacactcagactcttccctggcgatcctaaaatactagactctacaatggtttttgccctaataagaaaagagttccttttcggaagacctttaaactgcatagattctcattttctcttctgaaagcatttcgttttgtctttgggactctcctgtagctaactggagagaacaacattattctctccatacccttaaatgatgtcagtgtttcatgaattttcttttctaaaaattatactacaatatgaacacattttagtagcattcacttataatccaagacattttgcaatccctcctccgtttttccatttttcattgtacatagagctatatgaggcattacagaggatactaaaatgaacgaaaatcataaaccctgcagtcaagaatctttcagtctaatgaagttatgagtaaagatgaatacaatgaggaatagtaaataactttgagataaagaaactaaagtatatcataagactgatgcaacttgacacagaattgtgattatttttgatgtctccagttttgatagtcaaaggagacactatcaatagatattgcaagggcaacaggcataaactaatattatcttggacaatttgatatatagagtcaccctactcttaagtttctttacttttgcttttactttttattatggacattccatactgcctgtaaagactgagataactatttaagtacccatcttccaacttcaactattatcaccacgtggccaatgttgtctcctctataccccctaaatccccaccctcatttactaaaagcaaatccaaagcattttcttgattcatcaaccagtttttcactacttcattctttttctctcctgattccttacttatcacctttccaacccatctttttatttttacttccagcactgcagttctgatctaactctgccaggacacagatccacagggtcagccctgcatcctgagcagcttagagggagaagccagaccagcagtgcctcacaccttgtcctcttctgctctggacagatggctccataacgacagcttcataatggcagtggatgggaccctcgtgtacatcagagtcactcttctgctgctctggcttggggtatttttgtctatttccggctactgtcaggctgggccctcccagcatttcacttccccggaagtggtgatccccttgaaggtgatcagcaggggcagaagtgcaaaggctcctggatggctctcctatagtctgcggtttgggggccagaaacacgttgttcatatgagggtcaagaagctcttagtttctagacacctcccagtgttcacctacacagatgaccgtgcactcctggaggatcagctcttcatcccagatgactgttactatcatggttacgtggaggcagcccctgagtctctggttgtgttcagtgcttgttttgggggctttcgaggagtattaaaaataagtggcctcacttatgaaattgaacccatcaggcactctgccacatttgaacacctggtttataagataaacagtaatgagacacaattcccagctatgagatgtggcttaacagagaaggaagtagcacgccaacagttggaatttgaagaggctgagaactcagctctggaaccaaaatctgctggtgactggtggactcatgcatggtttctggagctagttgttgtggtgaaccatgatttcttcatttactctcaaagcaacatctcaaaggtgcaagaggatgtatttcttgttgtcaacatagtggattccatgtataagcagttaggtacttacataattttgattggaattgaaatttggaatcaaggaaatgttttcccaatgacaagcatagaacaggtcctgaacgatttctctcaatggaaacaaatcagtctttcccagctacagcatgatgctgcacatatgttcataaaaaattcacttataagtatacttggcctagcctatgttgcaggaatatgtcgtccacctattgattgtggagttgataattttcaaggagatacctggtctct

SEQ ID NO: 6441 - DNA, 6000 bp, Homo sapiens
ttttcttttctttcctttttttttttttttttttttgtgacagggtctaagtctgtcactgaagctggagtgtgcaatcacagctcactgcatccttgacctcccaggctcaggtgatcctcctgctttagcatcctgcgtagctgagaccacaagcttgcgccaccatgcccagctaatttttgtattttttgtagagatggggtttcgccatgttgcccaggctggtctcgtactcctgggctcaagtgatcttctcagctaggctttccaaagtgttgggattataggtgtgagtcaccacgcccagccttctcttccaaattctcttcaccttcatttcatattattttttccttccttgaactgctattctaagctggtgaaatgctttgaaatgttgaagaattaccaaatgaatgatgaaacagattaggccgggcacggtagctcacgcctataatcctagcactttgggaggccgaggcgggtggatcacctgaggtcagaagttcaagaccagcctagtcaacatggtgaaaccctgtctctactaaaaatacaaaaattagctgggcgtggtggcgcgtgcctgtaatcccagctattcaggaggctgaggcaggagaatcgcttgaacccgggaagtggaggttgcagtgagtcgagattgcgccattgcactccagcctgggcaacaagagcaagactccatctcaaaaaaaaaaaaaagaaaagaaaaaaagaaaaaacagattaaaatctctaattggaaagccattggtttctgtgctttgtttaatcaatgtatatgaactgagtgttaattgatgctaacagctttctctgctaggccctgtggaacatgctgagaagtgccttgccctcaaggaatgtacagtttagatggagggatttgaagtagcacataattaaacgctaaatgagtggaacatgtgagtgctctaggctgttcaaaaaatagaagaatgggtttggagtagacgtagtggattttagcaggcaggtggaggggtaatgttttctaagtaaggcaaatggtgtcagtaaaagcacagaggcagaaattaataaatgagtgggctgataaacataaatagttatactgatattcaccaataaaaagggttcatgctggggagtagcggcagttaagttggagaaaatagtgattcaggttgctggggtctttgcccggctaaggagtatccctttagtcctgaagggaattaaaggcttttaagaaaagtggattagggagattaatttgttagtggaaggtagaatggtttagaagaggagaaattggtggtaatagcagactgctgggtacgacttgatgaggggattctccagaacggttgatctggcaacgtaagggaagggttgagcaggagaaagcctgtggagactagacactggggaaggatatatgaggttccaagtctgagtgagctggaaaatgttggtttcacgaagacaaagaagaggcgcaggactgggggaagacatggatacttactgcgtctggatcattggcaggacatgtgggccataatgtctaaaacagataattgccacacaaaaatggatcagagctgcagtttgcatgactctgctccaaggtgggcttgggtggggttattagatttcgtacattcagctttgtccttttcaggcaggagacagcatctgctgtcgagtactctcagtccccaggaggcctatgagctagtcagaaaatataattttaataggattagctgagagatgagcaaatgtcaaatggtgatttggtagtatgtcatggctgctaactttgacatgctaagtgtaacattattaatggcttctatgcatggctaagagggttaacacttagcaaaattagttccctggatttttgtcctgctgttatattttatgggcatgatggagtgtgctaccttgagtaaaccatttaacctctctctgccttagcttctagtttataaaataggaagcttgttgtggcaggcagtattcacaaacattttgagagctacagagagcgctgtaggattgtctttctccccgccccctcattcccccccatccaccccgtcccaatgactgagtcagtcatttggaaaggtcagctttttcactggatactctcaattgctactccctaagtcagttaattagtatttttctaaaatgctcctaccagtccagagctgaaagatgtagtctctaactgctgtttctactctctgggcctgccaatcctgctaaccccttttcacccaatggctattgccatgtgactcacacctcaggttctgggatcaatcccagtcattttggagggcaactagagctttatattaacactctgggacttcaacataaggcaaccatgctcagtgtgaagtttggtcctagttctaggtattaggctcctgctttgtttgtaagtctcactctgtccccccagatccagcctttgaatatttgttttgtcctgctgggtcctcaaacttgggcctccagtgagtatctcagtagctcaaggatctgagttctatttgttttcatcaattccctgtagaaacgaaagggcagacctagaaaaccccagcactgaagctggggccttgctataagcaacacactttctcaaggcttgccgtgatttcccaatttttgcccactcctggattttccaaggctatgtgttccagctgtccattggcttacaacacccacattctctgtttaacaggcctgatgccggctgccttcctggcctgctgccggttccatatcctccagatactgcattctggctgaacgtttatcacgccagctgggttggcctccgattccacggatgtatctggttctagtttccatttctccccatccacctcaccctcattacagttaatccttttatattaaaccatagcggatctttgctgttgtggaaactgatgtggtattggaattttatccttgtttacatctttctttgtgttggaaaggttgggattacttccaaaaccttcccagagagctttcctgtctcctttaggggaaacaaatgaaaacttgacaatagctggtatctatgacaccagcttcaaggccactattttaattgtaaaattgcattatttaatcataattttgcttttagatatacaaatatattttaaagtatattttgtccagtgtttactcacagctctcaatttcaaggtatcttactggaactcagtggctttgtggttataaggacataaacaaatcaaggctagggatggtgtggtgttctacagtggtaagctacattagaatcctccggaggacttgttaaaacagattgctgggtaccaccccacagagtgtctatagaatgatgccctaagaatttgcactttgacgaaaactggtcatgtatttaagctggtcacagataaccagaaggtgctgaactgttcttaatcaattcaaacttttacctgaaatggataataaggtggagagccttgagaaatgaacttccaaagttcagtgcatgcagttagcatgactgctggttttagagttctcaaccacttattgcttatgagcaataagtggccataagcatttggccaatcacttacttgagtttacaggttttctcatccataaaataacaatagctgctatgctgccctcaaagggttgtcctgaggtctgaatggaatgggtgtgatagtgtctgagcaactataaagtggtatggcactgggaggtattgtaacggtttttcattactcttcttaaaatatcaccagtttcctttggctcttgtttccctcattaattatagcaactgtaatctgggaatacacagtacttttattgccataaaagccaaacttcaataaactcaaatttcaaacttttctataaaattttattcagtgagatcagacacgccttataaacattacacagagccaagaatgattccgtttttacagctataaaaagagatctacaagaccctattgtaatttggggtggcgtcacggttaatctttttcaaccctgtttagattggcccattaataaaaatggctgctagttacagcacatttaaaaatacaatcaccgcgtacaaatggtaacctgtccactccatacttccatgtcctgtgccgcttctattaacttgtctttggaagtagtaaattctcccagtctggacgtggctattttttctcacacacgggccaacacagttcttgctcaacttgggtgcgtttatgacttttcaacagtgtcatcagccgtacctaactcttccaggccttcagtatctcaggtgttagcttcagttgttcctaggtctttcacaaatatcataaatgacaggcaggacgcttttctggagtcaagatctgttagtttcggagtcagaaagaccccgtttagagactcgtaggcgaacttgccagggggcctaccaggggcagaatggggtcctccggaccagccagccgcgtctcagccacctccgcagcccccggggccctgaaccccggccgcgttgacgcgcgcttctcccggacgtcggcaggaggcgcccgcggcggaccaggcgcggcgcgcaccgtagccggcccagggggcggagggagcggagaggaggagctggagggggcgcggcttcctctcggtcgctccctggcgccgggcctctttctctgcctggcccagggctggcggccggcgggggtcgcggcggcggcagtgggggcgctggcgggccgcgggtggcgggggccgggccgcggctccgggtgttaggagacaagatggcggcggctctcagaaggccggtctcctcctctccgccgtcctccgccccgccgctcgccgcctcctcctctcgggtctcctcctcctcgtttgctgcctcctcctcctcctgcagcagcaccagcgaccgccgaagcgccggctcgctcacccggagctccggaggtggatagacggggcagctgcaggctccggcgaccgaggccgagctggggccggggcggggacggcggcggcggcggcggcgacggcggcggcgccgggtggggatggggtcgcagacgctgcagatcctccgacagggggtgtgggccgcgctcagcgggggctggtactacgacccgcaccaggccaccttcgtgaacgcgctgcacctctacctgtggctctttctgctgggcctgcccttcaccctctacatggtgagtgtgggggcggggagcgggtggctccttccccgcgagccggtggggagatgctggggtcgcgccctcttcctcttccacggggtctcgtcccccgggggccgccaccctctcggtgtgaggctccccgcccccactgcgtgctcccactcctctcttcggggctttcctggtttcggaggtgacacgagcaacgagcccacggcaacccgcgccggccgcccccgcccgctcactgggaagcggcagcgtcctaggccccttctcggggttccctcctgcggccactcggctaggccgtccccgccggggccccccgcccgtggggctgtgtggcaggcgccgagcgctctgcggctttaggggacgccgcatccatccttggcacgctgggttcctcgggcgcccggcatccggcactgcccgcccccgccgcggccctcgtccggggctcccgggagaggccgcccgccgcctcgccgctaatccgcgtgcggagccccgggagcgcgggggaccgtgcggctctgctccgagtgtgtgtgggggtcgtccgggctcgtcctccaggggtcctgggtggtggctgaaaacccggctcggaaccctcctgcctctaaaaaaccgttgttgtgcttcgcagcggttcttctctgttcggccccgtggccggtggccgtggtgcttcctggcc

SEQ ID NO: 6442 - DNA, 6000 bp, Homo sapiens; identical to SEQ ID NO: 692

SEQ ID NO: 6443 - DNA, 6000 bp, Homo sapiens
ctctccttgtttttagtttttggtttttgtttctgcttttgatagagacagggtctagctatgttccccagcctggtctcgaactcccgagctcaagcaatccaccatcgtcggcatcccaaagggctgggattacaggtgtgagccaccgtgcccggccccattctccttgtttaactgtttaccccaccctcatctcaaccctgcacaggtgcccgcttcccactcccccatcctgctaactgtgttatatcatagctttagatacatcaactcccagtgttcactttattaggattgtgttcatgctatgcaaatcaaatcacttagggtatatcatgattattttttccttttcctccatagtttgtttattccactggagttaataatgcttccttttccccatttacttagttatatttatggtacttatcattagtccaacccctaatcttccccctattgtgtaaacctctcaatattttcaaacatgattctttcagtgtgactttcttgaagaactcttccttggagtcttcaaagcagcttcagcctgagtatgctgctttctttttttttcttttttcttttttttggggggacaaagtcttgctcttgtccccccagctggagtgcgatggcacgatctcggctcattgcaacctctgcctcctgggttcaagcgattctcctgcctcagcctcctgagtaactgggattacaggtgcctgccaccacgcccggctaatttttgtatttttagtagagatggggtttcaccatgttggccaggccgatctagaactcctgacctcaggtgatccacccgcctcagcctcccaaagtgctgggattacaggcatgagccaccacgaccagccgagtacactgctttttatgcctggtagatagctgtctacccaggagtttcctttagctgggtgattcccattgtttgccttttgtggcggattcccggtttcctcagccttaacctcttcccctctctaggtttccttccttgttttggtggagcacatccttcagcagcttcctgagagagaagataaggcagtatcatttgttgtttcactctcttctcaaactgattttttggtagtttggatatagcattctaggtaagaaacggtttttcttcagaaggcattgttccactgacttcaaatttccaggcttgaggcaactgtgttgatattttgtatctggttttttttttttaactttttctgattttttaaaatctctgaaatcctgttggatctcctctttgtctccagttttgtaaaatttcatggtgatatgcagtacaactcaattctacagatacgtattgagagcgtgtgttacatagtttatctcactaaacactccaaaatatacaaaaatatccacaagtcctgagacagctagaaatctgagggaagtgggggagataaggcaaacagaatattgatgagcatgtagtatcacacatataaattatgcatgtaaaacttgtaagggcaacattttcacaaattccaagtgttgatatttttaagaaagaataatgccggctcccaacctgattcattctgttagaaatttggccttcccctgcactcaacaaactccttacctcttaaatctatagctctgtttggctagtagtaagctataaataagagggtgatgttttggctttgaatccaggagttgctgatagcctccagtgggctgacttaactatcattctgcaagaggccacacaagcttgagttcaatgccagaggttcgttccctcaagcttcctaaggtgtcagttggaatagagccaggaaccaggaaccagagccccctttcaggaagcaatccctaaaatgtatttctccttacccttcaaagtgtacctataggtactgatagatagaacatcataaagatagatatgctacatagtaagaacatcataaagatagatatgctacatagtaagctgctcaatacatgttttttcaatgggatgaatacagaatatttctctctatgtagtatctacccaatatttatagagatgaccccaacaccctaccccccacattaggaatcagccaagagtcatccctaccctggtggctcccagaatatgatcattattattgaaaacagtttatgcatattagcttgtttaattctcacagcaattctatgaggcaggtttttgtttgttttgtttttttgtttttgagacagagtctcgctctgtctctcaggctggaatgcagtagtgccatctcagctcactgcagcctctgcctcccaggttcaagtgattctcctgcctcagcctcccaagtagctgagattacaggcatgtgccaccacacctggctaatttttgtatttttagtagagacggggtttcaccatgttggccagggtggtcttgaactcctgacctcaagtgatccacccatctcggcatcccgaagtgctgagattacaagtgtgagccaccgtgccaggctggaggcaggtatttttaatccttatttgatagattcagaaactgaagaatagagaggtcaagtgacttgctcaagataccaaagctaagaatgacaaaacagagcttcaagtctaagcagacccaacccagatctcacaacagatccagctcgttccaccacaaaagcaattccaaatctcacttgaatcccaggttagaccccttggaatctctcaccaagctgaagggctgccccagaagagctcatgggaaaggccacgtggaaggagcacccattttattgctgcttgttctgatgctatttcactataggacgctgagtaacacacccgcctctccaggcctcagtttccttatctgtaaaatgaagttaagaatatattatgaagagttttggaagaggcccatgatgaccgagggaaaagaagcagtgagaggtctcagaaggccttctaaaagaacagagttctgtgctccctggagaatgatgggaaacacaggaggaatagtgacaatacgagatgttaaattactgtagaaattcttagatctgagtctgaactccctctccaaatattccattataatccaagactctatagtttctaccaaaaagtaggtgccttcaagcagggagtgatcatttgaatctagttctctcctgggaatcagtggttctaacttggctgcacgtttggatgaccagcggagcttgtgacatgcagatgttcaggtccaccctcggagatcgctaaatggggtgttgcccgaacacttgggatattaagagtttcttcatatgattctaatgtgcagacaaaatggagagccacttcccagagcttcaagttattcattttctggtctgaagtttaacaaagaaaaaaaaaataaagaagcagtgatgcccagtagctctcaaaatttaatgtgtaaacaaatgaatctcctgggcatcttgttaaaatgcagctttcaattcagtgggtctaggttgggcctgacaaccttcttggttgttttgtggttgccgttttgttttttaaggccttaacactggaggggattctggccttctaaaaagctcccacaggtgcccacgctgctaaccacagactgtgcttgaatagctaggctacagcttgaatgattacagacttgaacgagaattatggctcttcttgccagctgggaccttcagaaagaagttacttcacttctctgagtctgggttttcttgtctataaaatttaggccagcaatagtaactttatcacagaattcttgtgatgcataaatgagctaatgcattcaatttgtttagcactgtacaacaaatgttagctttttgctaggatagccagcattcgcggaatgcttactatgtggcaggaattttctaagtgcattcgtgtattaattcattcaagtctcagaacaacacggtgaggtaggtactattatttcatcatttccattttacagatgaagaaactgaagcgcagagaggtggagttccttggtctacagtggcacctcattgtagctaagctggtgtttgaactcagggagaatttgggctccttaccaggatccctcgccaaggacagaggtcagtgcaacgagtcgagggtttgccctttgaaatgggctaggaccggcaggtggcagactagggctgcttgagttcaaagaccgcttccaagaccaagcccggagccagctctgtgctaagcgttccatcacacaaccgcggacagcttcttcggcttcttcaaactctcctttccctcccccgcaccctagggtcttcgcccagaatccatcaggaaaaatagccccacataacaggttcaaatctaacctccccaagacaaaaccacgtccgcagggaaagaagcgagtaaagcgagttttctgtaactcccctttaacccaggagcgcaaccagcccgggaaatctacaaatctctctttagttcagcaaagggctgggagcctaagccaagggggagaaagttggggaatccctcttgaattccccagaacacttaggtggcgccgggctttggtgcacgcgcgcagggcatgcggacaggcaccggagaggctctattttgggcattacttcgggaaggcggatcttcttgcagggtccgctgatagcgggtggcaaatgaatatgaggggcagtgcaaagggtgggggttaaccgggcggtttccatggcgcccggggcgtgggggaggaatgcatcccgcaagctgtggcgaaacaactgctctgcccggaggaccgggctcgagaaggcaagagacactgggtcgggggtggagtggtggcgggggggttgggggcggaagaagccaggcaggacgggggcggggcggtcacgtgtgcccgactgggcgaggccccaagctggcccgggagaggactctgcgggcgaagtggctgcgcaaggagagaacttttcctgcacaaggaacgcctcgtggggagacccaaggcaggagcggtccggagccggctgcggcgtgtgcggccggccttgggacagcgatcgccgcgggtggcaacagagagccccaagcaaaagtgggagcaggagcttggaggtgagcacaggaagccccacttgaggcttttacgcagcctctagtctctgtttcttctggaataggcaagtgtcctttcaactctaagagaccagcagaggccactgtcccttaagactgccggagtcctcaccacttctccaggattccagaggagactgtggcgatggtgaatgaaggtcccaaccaggaagagagcgatgacacccctgtgccggagtccgcactccaagcggaccccagcgtctcggtccatcccagcgtctcggtccatcccagcgtctccatcaaccccagcgtctctgtccaccccagcagttcggcccaccccagtgccttagcccaacccagtggcttggctcaccccagtagctcgggccctgaggacctcagcgtgatcaaggtgagcaggcgccgttgggccgtggtcctggtgtttagctgctactccatgtgcaactcctttcagtggatccagtacggctccatcaataacatcttcatgcacttctacggtgtcagtgcctttgccattgactggctgtccatgtgctacatgctgacttacatccctctgctcctgccagtggcttggctgctggagaagttcggcctgcgcaccattgctctcactggctcggctctcaactgcctgggggcctgggtgaagctgggcagcctgaagccgcatctctttccggtcaccgtggtgggccagctcatctgctctgtggcccaggttttcatcctgggcatgccctcccgcatcgcttccgtctggttcggggctaatgaggtttcaacagcctgctccgtggctgtctttggcaatcaggtaggtagaacagt

SEQ ID NO: 6444 - DNA, 6000 bp, Homo sapiens
aatacttttggagcagttaatttgtgttgggctgtgtactaaatgctttacattcattatttcatttcatctccatccaagagatagatatgtacaaatattgtctccatattgcagatagggaagcaaaggctcaaagaagtgaagcttctagctctggacacagtcaggcagttagggcttcacccttcacctccttccccctcctccactgctgcctgcttgcagcctgctcaggccttattaccatcagtgacctcctcagttgccaagtgtggtggcatttcctcagaactgctcatcttcaaacttccttttcttcttcattttcttaaaactctctctcctctggcttttagacacaggttctcttcagatgctttcagtctttttggagctgtcctcttcttccacaacaggccacttctctcaccaccctctttcattatgtgattctgcccatggcttccaccatcccatgaaggcggaagtttcattacaattttctcatgggactgagacaagcacttctaatgtccctgacccagcatttagtaaacaagtattcatttaatttttaaccaacaataactatggagcacctaccatgtgtaaggcactgtgctaggcactgatgagaatacaatgaataggacagggtcttcagggcaatgcagtaggctttggtttggttcacatagttatatacatataagcacagggccaggcatattgtagacgcttagtaaatatttgttgaatgagtgacttagttggggaggcaaacttgcacataattggctctagttcaggttgaaggaagagagtgtggtcataaagctaccggcaagtgctcagaatgagagccaaaggagtgggcaagcaagggtaagtgtctttcttgaggtgacattggaattgagcctttaaatcaccccagatcccaagggtgttctagaactagcaagtgatatggtgtgctcaagcatgatgcaggaggtagtggaagatggatgaaatgacaccactaaaattgtgttttaggaaactcactctggtgcctgggtagaggatggcattttggggggagagactgcaagtgggaagaccagtaaggcagctgctgcatcacccagaagagtggttacctgcccagatgaggccaatggcagagcaaaaaccaatgagggaggacaaatgcaagactactgcaggagtgcaatctacggggcttagcactttgctagataaaggggtaaaagaaagaaacaagaactaaaaatgggtttgaagcttctcacctgggtaactgcatgatggtggcgatattttccaaagagtgaacagtggagaaggggcaggtttgatagaaactatggaagaggctggacaaggtggctcacacctgtaatcccagcactctaggaggctggggcaggaggatcacttgatggtaggagtttgagaccagcctgggcaacatagtggagaccctatctctctactaaaaatttaaaaattagctgggcatggtggcatgtgtctgtagtcccagctatttagggtgctgaggtgggaatattacttgagcacaggaggtcaaggctgcagtgaggtaatgatcatgccactgcagtgttctgtccgtaggtgtaccatcatttagttaactaatccctgttgtagaatttctgactttttctactttcctcaatcctccctcagaaatgctgcagagaagaatttaacctgtatctaacatttttgagcccatttccaattttttttttttttgagacatggtctcactctgtctttcatttcacagagaccctgtctgggaaaaaaaaaaaaaaaaaaaaggaaaggagagagggaagaaaggaaggaaggaagaaagaaactgtggaagaaactaagctttatttttgacattttattatatttacttatttatttttgagacacggtttcactcctgtcaccaggctggagtgcagcagtgtgctctcagctcactacaacctctgcctcctggaatgaagtgatcctcttgcctcagcctttccagtagctaggattacaggcgcccaccaccacacttgcctaattttttgtatttttagtagggacggggtttcaccatgttggccaggctagtctcaaactcctgacctgaagtgatccacccgcctcagcctcccaaagtgctgggattacaggcgtgagccactacgcctggcctatttttgacattttaaattggaaatgctggtgaggtgaacaagtggagctatctagtagaaaaatgaaaatataagttggatttcaagaaatttgggagctttcagtgctgatgcaggcaatcaacaccgtgggaacagatgtgatttgtgggagagaattttcacttatgcagaaaagaggcctaaggctgtggacacctgttgaacatttccatatttctgtcctgtgggagtcacagattcagcatgtccaaaatggaattaatcatctttccactaaacccgtttatcttcttgacttctctagctgtgcagatggcactgaccattgtcttagttgccctagctcaaaacctcagctatctttgtctcctaccttgactttttttcacctatagaacattctgaaaatccacaaaaaacaatagataggagatataatcattgataatgaaaccatttcggatattgtatggtggcttcttctggtcatattcctttgcgagtatagatttaatttcctttgtatgggaatcatactctacatttttagagtaatctttttattgaagtataacagtcatgcagaaatgtacacaatcataagtcgatggcttttcatgtcattaaatattcttttgcaacattaatttttaaaagttgcaagatattccacccatagatgtaccataatttagttaactaacccctgttgtagaacttctggctttttctagtttcctcatctctccctcagaaatgctgcagagatgatttacctatatttaacatttttgcgcccatttccaatttttccttagaatacaattctttggggcaaaatttcagggtccaaggtatgtgcatatttttaaataaacttttttattttaggataattttgggtttagataaaaattatgaagattgttacagtttctgtgtaattcacactttctcctattattcactttttttttttttttttgtgacggctgagtctcactctgtcgcccaggctggagtgcagtggctcgatctctgctcactgcaacctccgcctcctgggctcaggcgatgctcttgccttagcctcctgagtagggactgggactacaggcatgtgccaccacacctggctaattttttgtatttttagtagagacggggtttcaccatgttggccaggctgatctcgaaatcctgacctcaggtgatccgcccacctcaacctcccaaagtgctggaattacaggtgtgagccaccacaccaggctattcactcttacagaagtataacacatctcacaattgcaaccaatattgatacgttattattattattattattttgagacggagtttcactcttgtagaccaggctggagtgcaatggtgcgatcttggctcactgcaacctccgcctcccaggtgcaagtgattctcctgcctcagcctcccgagtagctgggattacaggcacgtgccaccatgcccatgtaatttttgtatttttagcagagacaggttttcaccctgttagccaggatggtctcaatcccccaacctcaggtgatccgcctgcctcggcctcccaaagtgctgggattacaggcgtgagccacctcacccggcccgatacattatgattaactaaagttgatactttatccagatttccttagtttttacctaatgttcttttttcaattgcagcgtcacacccaggacaccatattacattgtcatgcctccttaggctcctcttggctctgagtttcttagacttcccttgcctttgctgatcttaacaattttgaagaatactggtcatgcactctgcagaatgtccctcaattcgggtttgtctgatttttttttcttataattagactgggttatgagatttggaaggaaagtaccataaagtgccattctcatcatatatcattccacatactatcaacatgatttagcacatagtcttgatcacctggctgaattactgtttgccaggtttctcccctgtaaaatcactcattttcccctttacagatgttgtacttttgggaaggaagtcactatgcacagcccacatttaaggaggcagaagttatgctgcaggatggctgtctacataagttatttgagattcttctgtgggggatttatctcttcttcctcattcgttaatttattcaatcacttatatcggcatgggctcatgaatatttcttttgtactttgagttataatccaatatcacttgttttattgctcaaggcaatttgaaatgttctgagtaactcagtgcaaaacaacctcttccaaaggttgtaccagctcacagggtagacgtcattaagatccatttcccctcaacttcacagacccattaaaaaggtcagaaagcaagagataagctgacatccctgcctagcgcccaatttctggaagcccctaaggaagatgaggccagcatgcaggggtctttccccacgtggggcacctcaacccctgagacgccctttcccggccagaccctattcaacacccctccttgtcccctgccccatctcctggcttcctgtggctccgcccaccgcggggcggaagtgggtgtggccacgggcggaagcactgggtcaggggcccaatcgtgcagccagcccctcccactcgccaccgccccacccctccggcccagaccggaaatgaggtcagagagggaagccccggcggtgagagtcggcccaaaaagcggcggccgttggaggtggctgcggcagctggtgagggggaggaatgggttgagagtgttggggtcctgggggctagtaccagaggggatcggagcgccaagccgcggctgagcggctaagggcgtcttggggctgcggcagacggccggagggtgagggtggtggggccttgcttttcagggcccttgtccccatccctggggatgtgggtcgggccgtctccggggccacagccccctcttcccctttcttctttctgcctctctggggcgggctgcagcctgagggcttggtgtcccgagccatggtcgccccagccctcagggacgggccggggcgtggtggagagtccttcgaaacacagtttttgtcatatatgtggccatgttgcgacccccgatcccggagggagctcagtcgccaagacttgcattttggcagtttctgccctagaagagccgatccccgcccctcgtgagcccaaatgagcagttgcctcctgcctctcccacctcctactccgcccctcacttccaccctgctcctgtctctcttcttacttgctgtccaccagctacccgttccttcctgtgcgtgactcagcctcatctctgcccgggtgcgtgcctggccgccgggtcctctcgagagtgtgcatccgcgactggagatggggagttctagggttcttttgtcactactgttggaattacaggctttgaggcaggaaaggattctgcacaggcattcgactgcaagttgtttgatgacttcgttccatgttcaagtttgtgctgttctgcctgaggtttttatttgttcttttgtttttgttttttgtatttttgttgcctgagtttttaaagcagtaattctttattagggaagtagattttgacatgctgttcccacttgtttctttattttggtcttagggacagttgtctcccaaacctcaatcatggcattttaatccacttttttttttccca

SEQ ID NO: 6445 - DNA, 6000 bp, Homo sapiens
ttgtaaatgcccaaatctctctatgagaaactaattaagccctgcctttgagtaaaagagaaaaaaaaaaaaatgcttctatattaaaataacttcatttggagttcaaaggaagctaaataaggttttcacaggaagagttcatatttttttaatccttaaagtaatgtgtataagtttcaatgaagtaaatgtcccagctacattattcaaactcaagagattaaaaatattttttttccaacatccaaactcctgatatccctatttcagccacagggaggacaagggcataactatggatgtttattagaaggataagttaaagaggcagaagcagtatatacattctctaaactatacatttatacaaggatgccattgtctttttttaagcaaatacttgtagaagtgatgtctaaaagaataaagcttctcttctatatctccaaatagaaaatataatcaaaatccgcttttatgtaggatggcttttttaaataaataagcagaaggatgaattatgtggctataaataaatctactgacatgtaataaagcaaagtcgaactgttttatggtgtcactgaaacccttagatatatttatagccatgttaacagtccccagtattttttcaggacttttatttcatttcacattatgagagtttagttgtttgtttttctctccctaaattgccttctggagccctttgtagagatagaaagtaaggatctctactcttcatatttggaaaaaaaaagggtcttcaccgaaaaagcttagggctcacacagaaacagtcggttctgatgctttctggtctgcctgtttctgtgcagttcatatgagatgtgcctgcgaagaacaacttgacaggtagctcctgctggcagcaaagtggcaagtcagagtctatacaagtgaggagaggcctgtgcagagataaaatgtacagtactgtagaaaacaagcagatggacagagcaactttgcattagattcctgatgcctgacacatttaaatacaatcacaaggcttatttcagaagccaaagaatctccagactatcacatagccgaggcacagaccaaaacaagataaagggtctgatgggtaaagatgctcacaccttaccctgggacattctcttgcagggtgaggatggggggggggacatttaaaaagcaagaggagaaggtttataataccagttctaaagcctgaagtaatataggggttttttaaaattgtattccatttagaaatttcaggatccaaagagtatggttaggattccgtggggggtttattcaagtggagctaagcgtggttgttcctgtgaaattatttatatttttcaacttgaaatctgggtgagcatagtgtttctaaatctatttctcttcttttctatcttaaaagtggactctcattttcatcctgtagctatacacttgattcccaagtgttatcactcaagggacccactagaaaagccaactcaagaggaagaggagagcttttgatggtaggacaagggatgacaaatccttcagctggaactctagctacaggcagtatttagaaagtatcactggagctaaaaatctttaaaaatgtatttaatgtgttagactaatataggctctaaaagacctaaaaagaacaggatccagaaaagaagtcgaaataggaatgtgttaactagagggaggggcaggagggataagaaacacatgaaaaaattaacagtggggtaaattggagagggacattcattttattaggataattgggggttgtctctttgtagtggaagaagtaaaatagacctgtcttacatttgtcctctgaagagtcttctcagtatttaactgtgttcccaaatggaatcagccttaccaaaattcacggtgacttcttttgacattttgcaaaaagtaaataaataaattataagtatgacaagtgaaatgaatagttccagctgtgatgcaccagcagcatttccagattttgtactgcattaaggatttattttctctttattgcctagcagagaattaattggaaggtccatctaagcttcccacacatcctcagaatgaagtcaaagcagtctccaatgctcaatgccaattaaaaaaaaaaaaaaaaaagaaaaacagtaagtgggtaggtggtcagtttatcaactctggaaaagcttgtctttgaggattcacactgctaaagccagacaaacgcatcagcaaaattaatggcataaggaaaatgtgagtatgagattggcaattgattcactgagttcgttcattcagccagtatttactgagcccgtatgatgtgctacctattttttcacacacacagaaaacaggagaaaatgaagactcagccctcagagagcttataaccattttaaggagataaactatgaacaagtatacagataaaataatttcagacactggagagtgctgtcaaggaaataaaacaaggtaatgggaggggatgccttccaggggtggtggtcaactttaaatgaggaccagagagggtctctgaggaggtgacatttgaaatgcacccatcacatgaaaatcttggggaaaagccttccagacagaaggggccaacaatgctataaaggccttgggatgagaaaaaacttcccacgatcaaagcagaaagacctggggaactagagagtagggaggaatggggcatctggcaggagatggagctgaagcattagagttaagcagagtcatctaggccgccttaaggccaaaagtgcagtggaaatccacctggggactaaatcaaggagtggttgaattgagtggaaattatcatggatatttaggatattaagaattttttctggcttttctagcaataatagcataagaccctaaccatgtacttaacctgttcttcacctttttagagcttcagcttatttttctagtggacaaagaatattgccactgtttgtcaggtgctctaccagatactgtatattttctcattttaaacccccaacaacctcgagagggaggcatattcctcattttacagaggaggaaactgaggtttcaatggaatgtccataaaccaccccttccccttgctgtggtgtccctgagagcatgctgctggtttaagacactgcgtgggggcacacccaaaagtatgcaagaccttgtcagagggccatttcctggggggctgtggatcctggaccacccttacaaatgagagccagggcagttagggtgactgtgtgcatcatttactacgggcagcttgaagcttttggaggacaccaatttcagaaccagaataccagttcactgccataaattctgaaatggacttgatgtatgaccttgaaggcaaatcacctgtaggtttggtctttttgttagagagacataatgctgtttcctcaacacctccttggggtgtctcaaggatgaatagggctgtcttaatccctgttctttatcctcagggggtttgaaatgagagtggagtatataataggtgctataagctccttttaaaaaagcctcctaaatacaacatatatatgttttaaccagcaagtattgttcactcacctccccttcctccctgcaaatgtaatgggctttttacccaaggtgaatggtaggagggagtcaaagctagcaagacctgtgtggacaacaacctggcctgagagggcagcctgttgggtttgtccttcctgcgcatgagacatactggaggggtggatgccgcctagtccacagtgttaccgtgtcctggcagagccttgggtcagtcccctcctggagtcacagatggccacgacagaggacaggtgctgccattctggctctcccctgcgtgttcagtcgtgaggtaaacaccgtgctgtctttgatgcccagcgcccaggggacttcacccacctggggcagcccttctgcagccagttccggacaggcgccagtcacttctctttgagccagccgacttggccctctccccttctgaagttttttgatcaggactacaggcgcggacgataacctctggattttgaatcccaacagtgtcctatccaccaccgggggtggcagccaccttctggaaggactgccaatcacggagcccttcaccctttggagtccccaggccaccgctccaccttcacttttgggagtccggactcagattcccatcattcgccctgcgggaggggccctgggcattttaaccccgggagacacacgcgcctggagagtggtcgcccaagccaccgccaggcagggaggagcgcgcgtgcggcaccaccgcgtgcagcagctccagcgctcgcgctgcctcaaggggtttatttttatttctatttggagctacttcggccttagccgccgcccttacttttcctccgaaattgtgagaaggtgccttcatggctggagtttggtttcacgcgcctgggagaagagcagggcacgggtgataaagaaggcgcagtgtcggtctgtcggtgtcacacacgcgcgcacacacggcggggcgggagccgcgcgagcgagaggagggcgggcggcgtgtgctggaggctcgcgcgggtgtatacgagcctgtgcttgaatgggaagggccgggattccgggtcgctctggcccctccttcctccggagccagccagtccctcggcagagcgctggggctgcactgatttgctctcgggagtgcgctatttgcatatgacttgcccatttgtgaatttggctccccaactcctcgcttcacttcacctgtgcctccctggtccgcgcacttcgcaggcgcccgcccgcctctcggccacctctgcagcctgccaggcacctcctcttgcgctctcgctgatttcgcccacccacctccctccaccccgtgccacgttggtttgggtggctgctccgcaccgggttcctcctcctctcctctttccctccagtccttcttattctcttcctctggctgcggtggctgctgctgctgctggttttcatccagttgggaaacccaggaagccggcggctgctccgtggcgctagtccagcacgcccagggttaaaagcctcgcgcccttccgcggagactcccaggaacacccgaagaactcttccacctgcagcccccttttgcctggcagttctgcattgcatctcatggaagtggaaacaggaaaataaaaatgttcaaactccttggatgttgggataaactcacctgaacccacttgggttcgggctgcctccttctcttccttcattgccacctttcctctgtgtggctcccgggagtgtgcggttaagtcatcagactcgaagtgcctagagatccggaggaagccgcgccggtcttcccctgacatgcgtggcatgccggggctccgtaggaggtttgctatacctgggaggaccctggcattctaaatttcagctccgggaaagagaaggggctttttgccttttatcttttttttttctttctttaagtagtaattttttaactgattcattgtttggaaagcgcatattgcttccctcttccccgaattctggcaactcttcctcctgctatgatgggcccttgggcatcatgaacttcattactcctcactggctggaattcaaactgcccatctgtagtggtcccgtgcgttgaccatgcacctgagaatccacgcgagacggagccctcctcgccggccggcctggacgcttgggatctggttcctgttctggggatgtatcgtcagctctgtatggagttcttctaatgtagcttcctcctcctccacctcttcctcgccggggtctcactctcagcacgagcaccatttccatggcagcaagcatcactcagtgcctatttctatctatcgttcccctgtttcccttcgaggaggacacggtaggtctctctgctctttatcc

SEQ ID NO: 6446 - DNA, 6000 bp, Homo sapiens
ttggaatgctcaagggagaggaaagtgataagggggaaaatcatagatgcagaaatggagaaacaatggctaaaaattttccaagtctgatgaaaaccataaacacacaaatccaagaatctcaaaataccccaagcacaggaaacttgaagaaaagtacatcaaggcacattacagtgaaattgctctcaacaagtgacaaaatctgaaaagcatcccgagtaagaaaaaaaaaaaaaaaaaagcagattataaaggagcaaagaaaactttgacataagatttgtccttgtaaacaatgcaagcaacaagaaaatgaagcaatgtttttaaagtactgaaagttaaaaataatgtcaatctatgattctatacctagtgatgatatccttttttaaaaagaagacaaaagtaatactttttcagacacagaaaagctggaataatttataaccagcagatatgtatgacaaaaaaattaatgaatgtcattcaagcaaaaggaaagtgacagcagtgaaaaatatggatcaatactaaggaatgagaaagaccagaaggggtaactgtcttattatttgaatccctttaaaagataataacactgtattatgggatttataacctatgtatgagtaaaatgtatggcgatggaagcataaaggttaggcaggagaggagaaatggagtataaacaagcattcaacaagtacagtgttgaagggttcttttaaaccaagtataaattggtataatatcaactgaatgtggactatgataacttaaacgtacatgctataaaccttaaagcaatgagtataataaccagagttatagctaagattcagcaaagaagataaaacggaatcataaaaattccttaatgactccaaacatatgtttaaaataaaaggagaattggatcaaataacaatggagaaatagaaaactaatagcaagattattcacttaaatgtaatgtgaataatgacattaaatgtaaatgatctatacaaaccaaacaaaaggcagagacggcgagactgaaagcaagacccaactctatgctatttataagaactgcacatttaatataaaaactcaaagaggttaaagtatgaaaaaatcataccatgataacgctgatcaaaagaaagatggattggctctaccaataacagaaaagtagattgaagagcaaaggatatcacaaggtataaagaaggccatttaataacaatgaagagaacaagaaaataatagtcccaaacacgtatttacctaataatagaacttcaaaatacatgaactttaaattgcatgaagaaaaacctgatagaaatgcaatgagggggaaaaaaaacaaatccccaattgtagtaaaaaatttcagtacccatgtctcaacaattgatatgacaagtagactttaaagttagcaaaaatacaaaagacttaaacaatactatcaacaacttgacctaatcacatttgtagaacacacaactccacaaaagctgatcacttattttttttcaagtacacactgaacattttaccaagattgaccatattctgaatcataaaatgagtctcactaaatttaaaagtgttcaagttatacaaactattttccctgtctataatagaattaatttacaaattaacaacagaatatctgagaattcctcaaatatttggaaactaaaccacatgcttctaaagaatcaaggaagaaatctaaaagaaaaactaaaaagtattttaaactgaatacaaatgaaattacaagatatcgaaacctgtgggatgtctctaaagtagtatagggaaagtctacagcactacacacatacaatattataaaagaaaaatggcctcaaatcagtgacctcagtcttaagaaacctcaccttaagaagtaaagaagagccaattaaaccccaagtaggcagagtaataaaataataaagatcagagcatatatcaatgaaatagagcacaaaaaaaaatagagaatctaagaaacaaaaatttgcttctttgagaatatgaataaaattgataaccctctggataaagtacttaggtgaaaaaaagaagatacaaattatcaatatcaggtatgacagagttgacatcagaatagattatataaatataagaggataagagaatattatgaacaaactcatgccaataaattcaacaatttagatgaaatagacaattcattatatgacacaaactgcccaggctacctcaagaagaattatatgacttgaatagccctaaatctatgtttagaaactggatttatagttaaaaaccttccaataaggaaaatgcaaggttccaacagcttcactggagaattctaccaaataagtaagaaaggaatgatatcagttctacacaaactcctatagaaatttaaagaggaaggaatatttcccaacttattctgtgatggaagaattaattgccctcataccaaaatttgacaaagaagttacagaaaagaaaataacagactactatcccttgtgaacgtctatgtaaaacttttaaacagaattttagcaaatccaatgaaggagtatattaaaaagatgataaacacggccgggcacggtggtgcatgcctgtaatcccagcactttgggaggctggggcgggcggatcacgagatcaggagttccagaccagcctggccaacatggtgaaaccccgtctccactaaagacacaaaaaattaaccgggcgtggtggcgggcgcctgtaatcccagctactctggaggctgaggcaggagaatcccttgagcccgggaggcggaggttgcagtgagccaagatcgtgccattgcactccagcctgggcgacagggcgagactccgtctcaaacaaacaaacaaaaaaaggataaatacatcatgatcaagtgagatttatccctgcaattcaaggtgggtttaacattcgaaaatcgatcactatgattcaccacattaataaactaccatggaaccatcaccacgaacaagatttaaaacagttttattacccacaaaattctctggtgttcatttgtagtcagccctaccctaggcctttgcaaccgctgatctttttcctgtccctatggttttgcctttttgagaaagctatataaatgaatcattaatatgaataattacatataaatacgtaatattttgagtttggcttttttcacttaacattatgcattcaagatttgttccataacaataccatggtaatttttaaaaaaacaacaacaaaagcccgggtgcggtggctcaagcctgtaatcccagcactttgggaggccgaggcgggcggatcacgaggtcaggagatcgagaccagcctgactaacacagtgaaaccccgtctctactaaaattacgaaaaaattagccgggcgtggtggcgggcgcctgtagtcccagctactcgggaggctgaggcagcagaattgcttgaacctcggaggcaaaggttgcagtgagccgagatcgcgccattgcactccagcctgggcgacggagcaagactccgtttcaaaagaaaaaaaaaaagaaaagaaaatttgtgcatgttgtatcagcagttcattcatttttattgcagaatagtattccaatgtggaggtatcagagtttgtttatccattatctagtcgcgagacacttggttcgtttagtggttatgaataaagcttctgtaaaatttggaatacacatattttaaatgtacggtttaatgaattttgataaatgtatacatccacttaacctccagcctaattacgatatggaaaccctgtgtgttccctcctgtctttttctagtcaatctttcctaacctttattctgattcccataaccacaactttttccttcctgtcctagccaagttcatataaaaggaattatgcagtatagaaggaattgacattccttttatcccaagaggaataagtgattgaagacttttaagaaggaaataggcacaatctgatttatgtttgtaatgatctttttggctactgtgcgaagaatggtgagtatgccacttaagtattatttttcttcccatcttccagggggaatatgactcaatgaaattcttgggtcgaccagaatttccatactggacccattattaagggaacctggaattatttctgccattcccgattcttcccagcagatggccccaaagttcagttcctgaattgcctcgcggagccgcgggctgcaacgtgaggcggccgctgccagtcgactcaaccaccggagtggcccctgcagttggatagcaacgagaatcctccaggggtgcagggcgacggcttcggccgcaccgcgggctagccagggctgcgtgcccgcctctgaccctcagcagaggtgtctctggccaggaggagctgaagttctgcaggacattggtccgcccgcggacagtccactccgcggggactttctctggataaggagtgcgtgcgagtggctcccaggcagacagggtgtctagaaggctacacgctagggaaggtggctccttggatttaaagaggaggaaaggagggggcatctaaactaggctttggagagaactaatgggaggggcgcccggggtgggggggcgggctggaaaacagaggggacagccaggactggtgttgggtgtcagggaacagacggagcggactgcgtgggtccagccaaggaaagtgaagcaagcagacttgtttgggtcaaggttgcctagggaagcggagcacttaagtgcctctttttccccttctccagcctcctccacagtggtgaggtcacagccccttggagccctccctcttcccacccctcccgctcccgggtctcctttggcctggggtaacccgaggtgcagagctgagaatgaggcgatttcggaggatggagaaatagccccgagtcccgtggaaaatgaggccggcggacttgctgcagctggtgctgctgctcgacctgcccagggacctgggcggaatggggtgttcgtctccaccctgcgagtgccatcaggaggaggacttcagagtcacctgcaaggatattcaacgcatccccagcttaccgcccagtacgcagactctgtgagtacccgggagagatcagggtaggacccagagatcaagggcatctgcagaggtggcccgaagtgcacaaaagcagctcaataacagcccgaagtagtgtgtgagtgtgtgtatgtgtgagtgaatgtctgtgtgtgtagatgtgtgtgtgtgctaaaaacttaatcgcccacacttgggaaggtatcattgttgacatcctcattcccaacacaggaaaatgttacaaaactttggtgtacaatgaccgtgagagctgttctttccaacaagctgctattcagcactttgcctaaccctggttgaatctgttttatttgaattaataaggataatggcatctcaggaactgacctttttgatcttaccttgggtaataaaaaattgcaaaaatatgtatttctcctttttgtttctctagatgggaggttatcttagcagttctgctgattcatcaaattgttgacaaaggtttaagcaggggccctttttaaaatgaactgtctatacagtatctgtaagttacttactcaaatgtgaactgccagtgaaatagtacgtccagaaccctgctttgtgatagaggtataaagaaatgaaatttcataaaagtatagtacatttatctgcatgttaaatgttaccagattagaaacctgatgttaaataagattatacacacacaacctgtttcttaacagcaatttaaatcagtgatcattgaaattgtagacaaaaccaagggaataaagtctgtcttgattagttaaaaagagaacagaaagaaaggacagtaaaacaacctaggctggttaaatccagttaag

SEQ ID NO: 6447 - DNA, 6000 bp, Homo sapiens
gggtgaagaagggaatgagacagaaagactaggcttagagaagctggttaaggaggctgctgcagtgatccaggtgggaaatggacccagagctgtcaacagggatggcaagaagtggacagatctgaggcctggttgatgatgggctgcgaggaaagatgtgggagatgtggggagacaaaggtcattccttgaacatgcaggttgaaatgaccaagaagtttccagctagagaaacagacttgtgagtcagcagcagagagaaccaatgcactctcccaggaagaggggtaaatggtgagaagaaaagagggactggaacggaaccccagaggaccagggagagctgcgccccaaagggaccaagaagagctggtcagagaaggaagagaaagaccagaagcgcacattgtcaagaacataaagaatggtggctagtaagagtcaacatgtgtaagagggtcaaattctgggagatgtattcacaggccactggtaaccttggcagggaagatggggtcagtgcctggggcggggctgaagtggtggtaagagcagataccatctaacaggggcaactattctttatctatttgtttgctcattcagtaaatactttatacatgaaacagggtgctgtgttcagagctgtggataagatgccaactccggaggccttcacccactaaaaggagacagataatctcgcccacatcacaaaacgatgagatataaatgctagaatgaggctgggtgcggtggctcatgcctgtaatcccagcactttgggaggccgaggcaggtggattgcctgagctcaggagttcgagatcagtctgggcaagatggtgaaaccctgtctctactaaaatgcaaacaattagcaggcatggtggcacatgcctgtagtcccagctactcaggaggctgaggcatgagaattgcttgagctcgggaggtggagattgcagtgagctgagattgcatcactgcactccagcctgggcgacagagcaagactctgtctccaaaagaaaaaaaaaaaagctagaatggagatgtagttcacgggctttaggacgtagcagaatcaactctaccagagaagaggaaggggcaggcaaggaaggtcttagaaagcaaggaagagggacaaggtttgcactgatgtggtcatcatgaaggccgcccattgtagagttcagatcttagcctgcagtggaagaatggtacttctggacctcctcatggattggtggggccatgtgaccagcctggggccaagagtggtgagtagaggtgagagcagtcatgttcctgccagagcatctaacggtcagcacaggaggcgccagaggtccttcaggcactgcaaacagccaatgttgagactgtggctgctttcaggtacctgactgacccctcctcaagacacgcacctcttggtagaccagaagcccgagccggaaacaaatttctgctgctttagtgctgtgactgtcatcatagcatcccttggcccagtgctcctcaaagtgtggcccctggaccagcagccatcagcttcacttgggaacttgttggaaatgtacattctcaggccctactctgaatctgaatttactgaagcagaaactctgtggggttggggagggggcggtccagcaacctgagttttaacaaactccaggggattccgaagcatgttgaagtttgagaaccgctgcctatccagggctgatggatagtcatcttcaaggcaaagtggaagttacaagtcatggagaaggtcattctagcaaagaaaactttttaaaatgaagtaagatacaaattaaatggtgaggcccatcatgtcacaggaagggattgttaaggaaaaataccatggtacccacctcccctgggctgagactgctgaacaaaatggcctaaactctggccatgtagacagttccctgcagtgtcatatcagaagacacaattgcagaggagatattccgaatccaaaggcactgaagccaggaccaggataaacccggcaacgcattttcgctttgtcccacggcctttgctggtttacaaaatgctcctgaatgccttgaatcccaaaggtacagaaaacccaattctctcttctgcagaatgagtcattagagctggagctgaggctatttggtaatgggcactatttaaataaagtgaaaagtacaatttcaaatgaattgctttttaaactgtcaaataaaaggaatccatttgtgcatgagaaattattccaagggttctaactattaactgaaagcaggtgaaaaatgtcaaagaaaacgtcctactaaagagctgactaaatgtctaaagacagacacctaatgactcctttgacctgttttggattcaaaaacatgtattttcaccagccccaggtgagctccgtggacaaaagttttaagaaaatattaaatgctagtagcaagatgccattttgtccatcggcatcgccttaaccaatgtgaccctgacactgttttagggacaggacaacagcatattatcactttaactttttcctttggcttaaatttgatgccaagggcccttggctagctctctaagtgtcatatttaacaatgttttatagtcttctatttgaatgcatccttgtacagtctagtcaatgtttgcagaagaaaattctgcaaacgtatgaaaagtgtcttttctgtcacaggcaggcatgcttggttgaggtcaccagtacggagagtgagcctcagtgttaaggcatctctgcagacaaaaacagaaccctggccttttccatttcatttcctctaggggtttccactgcaattagttttgtgttcatgccttcactctctttgttggtattgaaacagagctgctgaaaataatcagtgaggtttctcccttcctggccctctggcacctctaacctgtgtcactattccaggctaacacaagcaaaatgacccctgcttactcagtccagagggaaccgtgtgggtggtgactggctagaggcattggagcgggcttgaaaagggagcacttctcacacgtgaaggtgcacacaaatttccaagggatctcgttaaaaatgtacattctgactcagtaggtctggggtggaatcttaagagtctgtgtgtcgcataagctcttaggcaattctcatgctgctgaggaccacacggtagtgtagtgagctgtgagggaacaacgcacattctgcacaacagtgactttcaggaccctccttaatggggcatttatctaagggccttgctcccttttgatttagagttccttgaaagcagagactgggtctcatacatttgttattgttttgttctccggttggcacagggcctgcacacggtgggtatgtatttatttaattaaagagttggcctgttccaagaaggattttaacccctagcggcactgaacaggtggcgatgaattggccgggaaggaagtcggtcctaggggtagtcacagaccccctgggctggggtcccctccacctgcctgcacctgtatcacccctcagctgctgttctgaaattttccctcctgccccatttttaaagcggtttacaccagagagccgaccagaaaggagagatacaaaaccaaaccagcaagccctgggaagcggtaggcttaggaacatggaaagctcaaccgtcggttgtggggcccgcagatctctctggttcccctctctgccccgtctccagcttttttgcaggtcggtgtcgcggcctcgcagatccccaacagccccgagagccctgaaggagctggtcccagcgggtccaagctcgtgttggcttggtgcaagcctgtttgttagctctgcacgaccaattaattttctcctgcatcttccccccgtggtgggtggcggggtggggagggggtgtgtggcggggcctcgggtcggctcgggggtcggagagcccggacaggagcgactacactgcagaaaccctttttctaagagtccccagcggtgccataacctgtttctctctgcagcagcctcagagggtaaaggaagggctcgttgcagctccatatggaagaaaggagagaaaaagggagaaggaaggggattatattggtcagtagaggtccaactactgaagagaagagtgcacgggggagtgcgccctacgggacgagtacacgtgctgggaagggcggggggtgagaggcgggcaggaggggaggagtagggaggcgagagcagcgggcgggaggcgccacggcctctcagacgctggcgcccgcagccgagaagccagagagaaagttcccggggagagctcgcccctgggagggccgacgtcgagcctgctcgccgcgagggtctcaggtaccgcgcgtccagccagccttcccgcggcgcgcactcggccgcccgggctcggctcgtcgggaagcaggggaacatcgccggctggcagccggggcggccgccgccaaacttggaggaggaggatgctgcgagtgggcgcggcggcgcggggcgcgggggcgcactgagtgctccctacggcgctgctgccagggctgtggccgggcgagccggccgaagcggagcgggcaggtagcggctctagcgccgggactgcgccagccctgcgagcccgggccgccagcgccaccgtgccggcgtcgcctcctcgccacggagccatggtgcgcgcagcgcgcacgcggcgcgcgggactctgagctccggccgcgtcgcgcgtccccaccttcccaaggggctcccccgccgacctcgccctcgggccatgaggctttggcccggagctcctcgcctctgagtcgcgcaccgcctgctccagccccagcgccgctcggccactgattgcactctggccgctgaagctccccatcctctcccagagacggcacccaggcgctccgggatggcgctccgcgggaccctccggccgctcaaagttcgcaggaggcgagagatgctgccgcagcaagtcggcttcgtgtgcgcggtgctggccctggtgtgctgtgcgtccggcctcttcggcagcttgggtgggtgctggtacgggtcccctcttcctggggagttgggggctttggctggggagtctcggggcggctgcgagatgttttcccctccttcctcatcaggttggtcccaagggttcatccagtcccctccccgccgggcaggtagagcgcgcccagaagagctgatggacgctctgggctgtggcgccggttcccctgagctacgagcggcccctgggggggctcaggacgcggctgcaggtgtgtgttactaagacgaaagcaagaaccgcttccgtcccgggagtgcgcccggaatgggcagcgcaactgcggggtgcaggcaggattctcttggtctggggtgggcgaaactgagtggcccgctttcctattctgcagagccgcaggaaccgccactgcgtctcgcccctgccctggttcaaaggggtcccctgggtgccctgaggtgtttgttcttcccaaaccctaaaggcgttggggcagtctgccgcggggggtagctgccatgtttcagcatcgcgtctctcaactccccttaactcccacggagggagaaggcgggtgtgtggagcctcgacccatgccccctcctccaagaagagggatttgggagtagcttaggctatgcaaatttcaggtggagcgggaagagagaaggaactaaccaaagaagtgtgtttagggggatgtgaccccatgtgtaaccttcaggaggcattcacttccctaactcaggagacattcacttccctaatcgtctcattttgagttggatgctgtgaaccttttaatttcattatttttttaaatgtaaaaagacaaaagaaatgctggtgatttaaacaccaagacatggaaggtaaagcgggtagtaccttcttgagcagttagaaa

SEQ ID NO: 6448 - DNA, 6000 bp, Homo sapiens
cgatttgaattaccacctggtgtcacttcctttcaggttgaatgattttctttattatttcttatagggcaagtcttataggactagccacaacttctctcagtctctgtttatctgggaatgtctctatctagccttcatttttgaagaatagttttgctggaaatagaattcttggttgacagtttttttcccctttaggattttacatgttatcctactgccctcttccttcattgtttatgatatgaagtcagctgttattcttgttcctctatctttgatgagtcattttcctcttacagcttttaagattttctttgtctttcaacagcttgactgttatgtgccaggttgaatgtccttgtgtttgtcctatttgaagatcattgagcttcctagatgtacagattaatgttttcatcaaacttggaaagtttttggctattttttttcctcaaatatcccccctcctcccaatccttctctccttctgaaattcccattacatacatgttggtatatctgatgatgtcacacagatctttgagaatcacctcattttttattcttttttctttatactgattggacaaattctattgatctgtcttcaagttttctaattgtctcttcagcccactcaaatttgcattgaactcctctagtgaaattttttattttttacttattgtacttttattctagaattccattgctttttaaaataatccctatctctttactgatattccctattttatgaagcattgttgtaatttttttgtttttgtttttggtttgtttgagcctgggtctcactatgttccctaagctggtctcaaactcctgagctcaagcaatccttctgccttggcctcccaaagtgctgggattacaggtgtgagctgccacagctggctgccatattttcacttagttctttggacatattttttttctttttttttttaaatagagtagatgtgctgtgtgagacttgatctcatggttgagtaacttccttgaagtccttatatgctaagtccaacatctcacaacatttatactgattttcacctctgtgtatggtcaatttttctgttcatttgcatgtctgcttttttttaattgaaaactggacaatttagataatatagtgtagcaactcctgtgttttggtgtgcccctcagagggtgttttttgttgtttttcttagtttatacatttgttgtgtgacttgcctggactaattctgcagagtttctcttccatagtgtgttgacattgatgtttctgctcagttttatttttttctcttttacgtttatttctaaggttggttttctaaggttttcaccaaggtcaatatagcttagaatttagtcaatgattgatcagatgtggtaattagacacctcaagccagtaagacttctaccctttcttgatggacctgtgtcatctaaatgggttgaagaacattcaaaattcaggcaatttacaagactgctctgacttttgttttgctgggttttcttgtgtctcctctgcatctctgcaaggcttctctggcttttgttttcctgtgtctcctctgcctctgtgcaaggcttcatgttccgccagggttgagtagatgactggggcttttgccagactctcctgaactgacacagccttccagaccataagcgcatcgccaaagcccactatggctatctgattccctggatctcactgctaaacttccagcaggctttctaatcagctgtttgctcaaccagtcttgcagcccaggtaattgtgatgttggcattcccaatcaacctttctccttggccatggggttttgctggcaccactccttaccaagtcagccccctctggcagcaaagctgctggttttcacatttacgcagccctgacagaactattcccatggaactggaggagagggattgggaatttccccatggtaacgtgtcacagactctcactgttgttacccaaggtttaatagtttttcttgaataaatgcattttaatttatgttatacctgtggtggatttccaggaatttgaaatggttgttttttacaattgtgtccaatttcatcattgttttttggggaagagaatttgctgaattccttactctgccattccagaagtcacaatatagccccatttgtttaaaacttcatccttaagctctattcaaagttctttcccctgatctctggagcagactagcttggttgccctacagctctagagacttccttcttcccctttcttttctaggctttagctccactggtggcattagggcagggaggaggtgggaagaaaagagcaaattttctgacccattgggcaaggttgtagcctctctctgttgtgctgtttctctggctaatccaccctggccccaataatgtatgcatggcaggcatctatatgctgacctcttagggggtatatgtgggaattcttgaaatactcttttttggggcctgcccattgccattttttggaatatctgaattaagtctaaaatccacattcaataattcaaatactcaggacccactatgtgcacaggatcaggccaatttggccctaatgacaagcctacaacatggcccctagtcttcatcttcaagttgaggaaagtaagactcaaacaggttaagggctgggcacagtggctcatgcctgtaacctcagcactttgggtggctgatcaggcagattacttgaggtcaggagtttgagactagcctggccaacatggtgaaaccccgtctctagtaaaaatacaaaaaattagccaggcatcatggcacacgcctctagtcccagctactcagggggatgaggcaggagaaacacttgaacctggaaggcagaggttgcagtgagccgagatcgcgccactgcactctaggatgggcgacagagcaagactccatttcaaaaaaccaaccaaacaaacaaacaaaaaaaacccaaaaaaataggttaagtaatttgtctaagatcatcagtcctaacaaggagtccacattactccgaagcctgtgcccttagactcaaagttttgtctccagattaaatattgggagtaattacagctcctgcttttcttcctctcaggtcaggtttcgtccaatacagtggaagactggttcctcctcaacttatttcattctcatcccttcgacaattaaaacactgtttctagagtcacactgtcccaagtttgaatcccagttgttctacttttgcttctatgtggccatgggcaagtaactaaacctcactgaatctcagtgtcttcatctgtaaaatggtttaatatattaatagtagtatgattttattaggtagggctgtgtaaaaaacaatcctaaatctcagtgacttataacagcaaaagtttatatgtcactcatgtgacatctcaaatgtgagctgcttcacatcccctttttcttccaggaccaaggctgaaagagcagccccatctgacacagactattctcatgaaaggaaaaatttctctggttgaaatacgtaataactgttaatactactgctcagaaagaccccctgccaaaagaagatcatacaatcaagcctgacatcagtgaggctggaaagaatgctcctcctacaggatgcactgcagtcgcatggcaacgggcgatgatgtgtaatccttaactggaaaagcaacttaatagttaggaacaacaataccacctaccagagaataatagtaccttccttatgcatgtgagattaaaatgaagtgaggcacatgcaatgcttaacacagtattctacacttaataaaaggtttgataaatgttagatgccattattatgattaccacctcctggtgctgctgaaaatttttctcttcaccgtactgggctaaacctcacctgagagcaataaaagcaggagctgtaattacttccaatatttaatttggagacaataaagctttgagtctacgaggaataggctttggagtaatgtggactccttattaggacagatgatcttagacaagttatttaaactgtttgaaccttactttcctcaattcaaagatttgagacttggaactgtgttgtaggcttgtcattagggccaagttagcccaatcctgtacacatagtgggtgctgagtatttgaattagtgaatgtggattttagacttatttcagatagtcaatgaactgtatgcataacataaccacaatactgccttttccatcctttgggtctcagctcaaatatcatcttctcagagagaccttccctgaccacctgatttaaagtacctcccgtgcctccagtcacttttccccgttttcttgtcgttacaactctggtaacgccctgaaattgtcttgtccattcactgttacgtaatatctgtctctgccactagaaagtaagcgccatgcaatccggatcatgttttcttatttccaccttctgccgtggacctctggcattctcgtctgtaaaacttaggggagatggtgaggaaagggagaaacacgaggtctagccggtccacccgggtctcaagccccgcccaactcaggcctcgcgttccttccaggctgggcaccgcctttggtcacccacgtggcccgcagtaaggccccgccctttgtgggtgtggcctttcacggcgtgcgggccgtccaccggcggcgagccacgtcacacgcacgcaggccatgcgccgcgcctgttctcgccgcgggcggaaaaggggcgtggccatgcgcgaggaccccgtagccgccagcgccaccgcctgagtcgcctgcaggtggctgttcgcgtctccctgccgtgcaggcagctcgaaagccactctgttgtggggtcctcgcttcccttccacgtctcccggaagcggtagcagggccccggcgggtcggggaggaggtttactcagcttgggccccctccgggccagccgccgagggggcgcggcccaggacggcggctaggccgtagtgcagcctctccggagtcctcaggtgaggcggaggcgagggcccactggacgagacgggggtgttaacggtcctaggagcgggggcgcagtcccttcagtggagaccctggtctctccgttttctttcgggtcgcgctcatcttcgccctgttaggggctgaggagggtaactggagagactccttgggcttcagccgacgtcgtttactgccctcctctgtcttcctttctcctgacccctgcctggcctggccgttcttcccgcacggaacgagatgggtggggagcagagtgggggtctctgctcgcttacctgagattccccaaactgacagaccccagggctctacggactgggcctgaccgactgacctccagcctccctccctctgtgctgacgcctggccttcgaagcaggccctgccgcagccctttgcagacccatccccatcccacgcactctctgcccctgggcagtgtctggggaattgacgggtgcctctgaagtccttcgtgtctttgagatgtttgcccagggcccatctaagtatttaattaggtaatcgacattaattgcaacattagtagcagttgcatggtatgttttaaagcccaattaattttgaaatgggaggcaagatataaagaattaatgagcgtgttttgattttttattactttttttgtagagacagggtcttgccatgttgcccaggctggtctcaaactcctggcctcaagtggtcctccccgctcggcctcccagtgtgttgggattacaggcgtgagccacagtgcctggcctgtatggtgttctgtatgttacagagcatttcatctccattttcatttgattttttataaactccgaaatacataggcatttaatagtcacatgtgtaaagaacagatttaaaggatgagtttcttcttgaggttttt

SEQ ID NO: 6449 - DNA, 6000 bp, Homo sapiens
aatctaggtggagactcccaaagcttaactcttgtcttctgtgcacccacaggaccaataccacatggaagcttccaaggcttggagcttgttccctctgaagcaatgactcaagctctaccttgatcctttttagccatggctggagctggagtggctgggacacagggcaccatgtcttgaggctgcacagagaaacagggtcctgggcccaccccatgaagccatttttccttcctaggcctctgggcctgtgatgggaggggctgctgtgaggatctctgaaataccctggagacattttcctcattgtcttggccattgacatttggcctctctttacttatgcaaatttttgtagttggtggcttgaatttctccccacaaaatgggtttttcttttctaccacatggtcaggctgcaaattttccaaacttttatgctctgcttctgttttaagcataagttccaatttcagaccatccattcataaatgcatatgactgtatgctttcagaaaaagctaggtcacatcttgaatgctttgctgctcggaaatttcttctgccagataccctaagtaatctcttgcaagttcaaagtttcacagatctctaggacaggggcaaaatgctgccagtctctttgctaaggcatagcaagagtggcctttgttttagttctcaataagttcctcatctccatctgagactatctcagcctggacttcattgtccatatatcatactatcagcatggtatcatatatcatactatcagtattttggtcaaaaccattccacaggtctctaggaagttccaaactttcccacatcttcctgtcttcttctgagccctccaaactgttccaacctctgcctattacccagttccaaagtgacttccacatttttagttatctttatagcagtaccccactcctgttaccaattttctatattagtctgtttttacactgctataaagaactacctgagactggatagtttataaagaaaagaggtttaattgattcatagttctgcatggctggggaggcctcagcaaacttacaatcatggtagaaggcaaaggggagcaaggggcatgtcttcttatatcatcttctattactgttgtgcttgcaatccaagtgtgttactgatgttgccagttgcagaacttgaatatgtttcccacttttgcaactcttctgcttttgttgcttacttatctgagtatctcgatcattgaggttgtgcaattgtaaagacagatgcaaatacaaagagaaacactttgttcctcaaaggcctttggttctttttttttcctcccctatttttcagagacttttgttctgaagcctttggttcttgaatcagaattaaacatgtttttctagagaggaatgaatttgagatatttggggctgaggtagtgcaatcttaattcattatataattttctagaactttaacaccagtttatttagagcatgaatatttataaaaatcacattataaaaggtaagtgggcgagggtgtctttctcattcattgtgtacatacagctcagaaaacctgatctctaggttatagctctaattaagttcttttatataactgcagaaggaagttcttgcattgtgggtcactgagaatacatcgaatcccagcccactaaaccctttattgaaaattgtagaggtttgagttaacagtgctagtcttttgtgacttgcagaaattaaactgaggaatgttgtttgtattggtaatttgagcagctaaaagagctgtctcctggggtgggggtgggtggcagggagcttaattgtgttgtggctgaatttggagtcaccactgtcgaaagtgttttaaggcttttgttacagagaaagacctaaaatgcttaaatctcacttgaattgcactctcttctaaacttctcaagattaggattaaaccagtcaagcttgcctattattgggctctttctcactttacttcagaatttttgttgctttttaaaaattaaaaatggggtattacccaaagaaaaaagtcttgactaatatcgtctttcttaaagctcttttgttgttagcaatagaaatgcagcaccacctagtttaagcccaaagcaggatttatcataaagtatataaagagaggcccagaactcaaggagaggaaagtgtcctaacttcagaatagggagaattcaaaccagggctttgaacacaggcaggatattccctctggttcttatctctggttctttgagcagcttggctacattattaactcactgtggaagggctttcttgctaggcagggaaaaaaaaacatggctcccaagttacaacatccatcccaaccaacagactgggtcccagccctctctttggtccaatatttgagtcaagtagtgtaacaactgtggccaggaaacagagcaatgttgcactaaatcatttcttacaggactcgtgtaaatcacaggtgctcaaattattatctggggatatctaaggcaaaattagagtttacctgatgtgactgggcaggatgagccaagggaagactgagaacaaggagatgaggttagggaggtggccagccatggttcatgcaggtccttgattggttagggtaagattccagagcacagttgcccagtggaaatgtaacatgggctgggcatgatggttaactcctgtaatcctaacattttgggaggccgaggcaggtggattgcttgaggccaggagttcaagaccagcctgggcaacatggtgaaacatgccccagagttaggaggcggggcctttgggaagtaattagatcataccacagccctcatgaataggattagtacccttataaaagaggccctagagagctaccttgttgcttccatcatacgaggacacaaccagaacaaggaagtgggccctcactggacatcaaatctaccagcacattgattttgaatttctagcatccagaactgtaagaaatacatttccgtcatttataagccatccagtctgttgtattgtaacagcctgaacagactgagacagtaacagaaaggaacaaaagtaactgacctgcttcttcatattcataagcatgaaatgacaaccaaggatcataagatacttgaataaaactggcaagttcaaaataaataaatagaatgtacgctaaagaaacacagttcatggaatagagataactttttaaaagttcagattaatattctgaaagaaatctaaagtgataatatctataaaatactaacaggtgactgtaaaagcaaaaaatagtatgttttaaaactataattctaaaataaaaaatcatgggctagaagaaaaagtcaaggaaatcctgcaaaatgtagaacaagggacaaaacgttgatgagtgagaaaaaggttgaaagacagaggtgacccgctaagaagggccagtgtccgtcaataagaattttaggttgagaacaaagaaaacagagaagcaaataaataggaatagtgctcctatggctaaagaaccatgacttcagatagaaaggtcttacccactgctaatccatatgaatggaaaaatacccatatctaacagtatcctggaggaacgtcacaattccaaagacaaaaaggaatgcctaaaagattcccaaaaggaaaaaagagggtactcaaaggaatgacaactatattggcattatatttatcggctcactagatgctggaaaagaaaggaacaatgccttttgaaaatctctgaaggacaatgattttgagcccagagttctataaccattcaaattagcatttaaatggagaccaatatatatatattttgatttccaaggactgaggaactttatcacctacaaacccttcctgaaagaacagcttaaggatgtactacagcaaaacgaaaagaaatctaagaaagaggaagataccaggctgcaggaacagaggaatccagagaaaccctagagtgttactcgtgcaataggcccccaaaagaaataatgtgaagacacaggatcattgtagtggataaagttttattacagtactaaatttaaaaatcacagtatatttacttttccctcaagagggtctgggcacagtgcctcatgcctgtaatcccagtactttgggaggctgagacaagaggatggcttgagcccaggagtttgagatcagcctgggtgacacagtgagacctgtctctacaaaaaaataagaaaattagccgtagtgacagataattacatcactgtttctactgggtccaaacactctatttgaccctgccatgaatattttttatatcatcagccgactatagaaacttgttcttggttttcagtgttaagaattaacctatagacattttatggaagatttaatttgcattagaaacagtgtgctataaactctgccaatgccagggcatgttaagaggtatataaagtataggtagagaggaagacaaaggaaaggagtaggggtgccaagtccctcaccttaccctgcagaaaagagatacttagtgtgaggtggggttggggctcaggggagggtggcaggagagtttaggagaggataggacacgtgggtggaaagtgaggtgaatgagggctgggaggttgcagggagccctgagtggaaaaggcggggcagagcagggggtactgaactgaagagagtggagcagagcaggggtgtgctgggtggaaggggtggtgcagagcaagtggtgctaagcagagggggtggggcaaagcacggactgctgagtggaaagggcagtacagagaaaggagtggtgagcggaagaggcggggcagagcaggaggtgctgggcagaaggggtggggtagggggcgagggcagagcgccccctcgtggctggggcgcctgcgcaaaccagctgcctcacgagcactggagcttgcgttacttggcctcacctcacctgtgctgtccacgcctggctttgtctcacctgacgcgatatgcctctcctgcgtgggcgctgtcctgcccgccgccactaccgccgcttggccctgctcggcctgcagcccgctccccgcttcgcccactcggggcccccgcgccagcggcccctgtctgccgcggtgagttgaggcccagccatcatggtgggcgggaagcgcgtggccctggcggggcgccccgacgggtggggagaagggaggacacggcgtgcaggcctcgcgtgggaggctcttgtggcttggtcgccgttgggggaggttcctgtggcttggtcgcctttgggggaggttcctgggagagggtcgcggtgaggatgccgtcgtcgggcacaggggcggaaagcccgggaccctgaggaacgcgcggggattgggcctccttcgttgttaccctttaccggcacctggctcgggggcggggctgtggtttcgcggaggaatgatttaccatcctcggacgtcctcggcactgcgaagatctagcgttttcgataaaatggtggaaatcctgggccacatcgaagttccagagtgcgaaggttggaaccggagaccccttagatgaaaaatgaattaaaaaaaaaaatcaggtgatccatgaatcgattttcagcattttagatttcactaggcgcctgtttctaggacaacggtctaggtgctcaaaatgttttttttaagcactttttgttaggcagcaagtcactggcctaggaagccatactcagcagcgcgtgtcatcttctcttccaggaaatggctgttggacttgtggtgttttttacgaccttcttaacaccagctgcatatgtgctaggcaacctgaagcagttcagaaggaattagatggaagatgatgttgaacagctgttaacgtccaaaaaactttcagaaaaagctgtgtttttgttaacgagcaaaattgcctagttgagttgatg

SEQ ID NO: 6450 - DNA, 6000 bp, Homo sapiens
atattatatgatttcattatataaaattctagaaaacgcaaattaggccggggacagtggctcacacctgtaatcccagcactttgggaggccgaagcaggcaggtcatgagggcaggagtttgcgaccagcctgaccaacatagtgaaaccccgtctctgctaaaaatacaaaaattagccagatgtggtggcaagtgcctgtaatcccagctattcgggaagctgaggcaggagaatcacttgaacccaggaggcggaggttgcagtgagccgagattgggccactgcactccagcctgggtgacagagcgagactccgtctcaaaaaaaaaaaaaaaaagaaagcaagaaaatgcaaattaatctatagtgatagaaagcctatcagtggttgcctgaggaggaacaagaactgagggagggagggagggacaacaaaaaaaacccagggtatctttttgggggtaatggatatacagttgaccctttaacacaaatttgaaggtaggggtccacttatacacagaatttcttccacctcagccaccctgagacagcaagaccaacccctcctctttctactcagcctactgaaagtcaagatgaagatgaacacatttatgatgatccacttccatttaatgaatagtaaatatattttctgttccttacaattttcttaataacattttttctctagcttatgttactgtaagaataaagtatataatacaaaatatgtgctaatagactgcttatgttatctgtaaggcatccagccaataataggctattagcgtttaagtttggggggagttcaaaattatacatggattttcgactgcacaggggaccaatgcccctaatccccacattaagggtctatttattattgcatgggcagtggtctgttcacagccccagatggatgacttatccaagtcgttttgaattctggacttgtagattcacaacctgacaggaactgtggtatacatccaaatgtcaatctctggccacaacggctcatataaaccttgtttctgccttccacggacttacttccaggactctgctgcacataccaaagcagtgtagcagaatgcttaacaacacacagaactagcctggaatccatacactaccatttcagttgtgtaattttagggaagctgtctatgctctgtgaggctgagttttctcatctgtaacatgggaataatggtacttaccccagggtggttgtgacaaccgatttcatcaacataaagcacttaacacagtgcatgacacatcttaaatgctcagtaaatgttctaagttattatctccattcccctttcctgtagttcctcactcttccatctatatgactgccacagaacatcatcctgagtttcctgaccactgttccagaaacccaaagcacgtgtctactgaacacttaaaatgtagttactctaaaatgacatgtgctgcaagtttaaaacacaccagattttgaaaatttagtaaaaaaaaaaaaaagaacataaaatatctcactagtttttaacttttaaaaaatgtgactcctagtaaattttaaattacttatgtgtttcacattatacagtcacccttctgtaaccgtgggttctgcatctgtggatcgacaatattcgggggggtaaaaaaaaaaaaactgtatctgtactaaacactgtacagacttttcttgtcattattccctaaacaatacggtgtaacaatttacataagacctatgttgtatgagatattataagtaatcgagagatgatttaaaatatacaggaggatgtgcctatataggttatatgtaagcactacaccattttatatcagagacttgagcatccctggattttggtatccaagggaggtcctggaaccaatcctccatggatatcaagagatgactatatgtatttctaatggacactgctggtctaaacagaccaatagttccaggcagtactagttcctcccccaagtcagcagtctagtctatccagcaaagtcaacctgtcattgcttccaaaagtctcgcaggaacctcaaacacagcatagtcctaacacttcatagctgaatctgtttacaaaatccacccaatgactacccaccacactcaaatccttccaatgacaagaaactcatcaactcccaaagcagcaacccttttcacctttgcacaactcctgagaattagacagttcttccctatactcatgaagatctacctctccaaagggctgatcttagccttgccttacccctttgagctatttagaaaaggctcaagaacagcagaaactacgatttgcagaccacttccaatgtacagtgtaagctttagtttactgtggcatttaaccctcacagcaatgcaagaggtagaaactgttatctccatttggttgataatggggtctacagagctgagagagataaaagtgatctggctaggataccattcaagaagagcatatttcaaaccagaggggctgacttctaaacacctttattcagcgttgcttttgtggttatgttcttcaacattcttctctctcccaattatctggcctattagcagctatgggctcaatccagaagcaatcctgctttggccagagttgcccttacctgtctcagcagccccaaggatgtccagtttgtcacggatggcaggtgccaaggtcagggcttggattggtgtgggtgcagagaagcctagaaagctgagtgctcggagaaccggcctgggaacaaacaggtccttccaagctgacacatctgctttctgatcatgaacttcaggaatccatgtcttcgcttttttgggcaccttggcagcagtgctctgagaaggctccaacccttttttccctttatttttcttcttttttggagcagtttggaccaggttttctgatgtcatctccccagcctccggatcatcacaaaccatgtcatctccctgggcctccagctcaggatctttcacttcaaattctttctgggtactggttccttcagttgctacatttttacttttcttcaacttgatctttttctttggtgagctagactttccctcctcctcctcctcttcttctgaaacagcttgtgcctttctcttgggtgcttcctttgagaagagactggagggattcttggcaggggagaccaactggtaatctgtcaattcctcaaagcacaccaagtcatccatctgtccatctgcaaacatatttgggtcaatcttcacttccttccattttcccacaactttgattccctttgtctgaaatttgccacagcttgactgctttggccttgattttgtgtccttcaacttcatggttgctgaaaaggagatacatgttctattaggttggtgtctgagaagcagagggttctgatgtaacaaatattttctaagcaactaggccctacaaagaactgaggatacaaagatggctatcacacagttgctcccacctagagaagaacaaagaataccacagaacagacagctttgcctggaacacagggtacacatgtgatggaacaaagacatatgagctagacctggtttgaattccaaatccaacacttactgcctgtgtgaccttggatagtgccacccactcctctctgaacttcagtgctctcatctataaaaaggggggagggtacctaacaatatctaagttgtacattttatgtaaataaagaaaattatgtaaagcacggaggatgaaacctgccacacctaagtcgttctgaaggcagagtaagaatctcaggggtttttcttgtgggggcaggaggggtgagctttattaaaagcgtactgcgcttgcttccttctcaagccttgcctgagagagcaaatgcctgctccaccatcctttcctttgccaagcgtcttaaaacccatccagtttcttcatcatattttaagtggcttaatggccatttaggcccaactcgtttgggtggaactcgatccaggtttttccttttcagaaaggccaagaaagataacagattccgtgaaaaagaccaaggtaaactttggttcaaatccagatccaccacttgtcagctgtggctctgcggtggacgtattaatctctgagtctcttatttcccagtctgcacaatgggaaaaacgaggacatctgtcccacagaatccttatacgccactacgaaaaagtgacgcacgtcaaaaaaaaccgctgagcatggcgcccggcgaggagagcacgttcgcacacagtgcccgccggacccgctgcgccacggcaaaaaaacaaaaaacaaacaaaaaaaaacacaaagaaacacgcggggttcaacaaggagagggcgaggggtgccacgcgaaccgggcgaggacacggagagcgccaggcagagtagaagggcctctgtctcctcgtgacgccggtcccgcgcggccctctcgctttgtctcaggcacgaacgcgcgcacgaaaccgagaaaccgagaagccgagaagccaaggccgtcaggctctgatgaccggacaaggagcccaaggcgcggggaccgtggcacgcagctcggttggacggcttgggccggcggccgccctctctggacccgggaacccaccggcccagagcgacccgcgataggaacccgggttcctggcctcagcccctctccagagtcggctccaaccccgctcgttttggtactcaccgtgtggagacgccaccgcagctccgtcagtcgcgagtgaagaacctcagaaaccgccgctgtacctcagctgcagcagcaactgcagttccggggcgggacctccacgcacgtactcgtgcgcgctggggaggaagtcccgcccctatggcaaactcagctacctgattggctgcctcgcggaccgcagcagtgccggcgggagagctggcttggggcgctggcacctcctcttacagctttactcctgccagcttgggaaaaggccggagaaggtgaaattctgtgtgctccctccggcgagagactttgtcagctcccgcacagtaacgtaagttttcttgtattcttagtgtagtttcgttaccggaaaggggtctcgatccagaccccaagagagggttcttggatcttgcacaggaaagaattcagggtgagtccgcatagcaaagcaaaagcaagtttattaagtactttactccgtagacagagtagggcgttcccgaaggtaagaggacgaacgcgtccatcctaggtacaatgctcgtacctagatcatagggagatgtgctctgctacaagggtgacgtgtgatgagtgttccttgtattgtaattgttttggggcgccatgagctgtgcccatataagatacaaacgtaattgataaatgttgtgtgtgttcagactaatccactgacaggccgttcttccttctctctccctttccttgggtctctattccctgagacacaacagtgttgaaattaggtcaattaataaccctacaatgggcctctaagtgttcaagtgaaagaaagagtcgcacatctctcactttaactcaaaagctagaaatggttaagcttagtgaggaagggatgtcaaaaggcaagataggctgaaagctaggctgaaagtttgcaccaaaaagttagccagtttgtgaatgcaaaggaaaagttactgaaggaaattaaacattttactctaatgaacacatgaatgatatgaaagcgaaacagtttattgctgatttggagaaaattttagtggtttggatagaaaataaaaccggctacagcatcccctaaacccaaaaccgaatccaaagcaaggccctgattctcttctattctatgatgactgagagaggtgaggaagctatagaagtttgaagctagaagagattatttcatgaggtttaaggaaagaagccgtctccagaacatgaaagt

SEQ ID NO: 6451 - DNA, 6000 bp, Homo sapiens
atgtgacagaatctccttcctcgataaggctgaatgacattccaccggaggtatagaccacatttggttgatccattcacccatcagtggacacttgggctgcttccacctctcggctattgtgcatagtgctgctatgtacgtgggtatgcaaatatctctttaagatccggtgtcttaggccgtttgcactgctgtaacaaaataccatagactaggtagcttaaaaaacagaaatttatttcccacagttctagaagctgggaagtccaagattaagaggtgtcagcccccttggtgtctggtcagggttcctttcctggtttgtaaatactgctttctgtgtcctcacatggtagtgggataaggcagctctctggggggcctcttttataaaggcactaatcccattcattagggctctgctctcctgatttagtcacctcccaaaaagttccatctcccaataccatcacctttggggttatgattttaacgaatttggcggggccgtggcattcagaccatagcaccctgctttcaattctttgggatatatacccagaggtggggtttctggatcatatagaagttcttttaattttttaaggaacttccctactgttttccatagcaactactccatcttacgatcccaccaacagtgtgcaatggttccaattatataagggccaacactttttattttcggtttttttgatagcagccatcctaatggttgtgaggtagtatctcattgtggctttgatctgcatttccctaatgattggcgatcttaaacatcttttcgtgtgctttttggccatttgtatatcatattagttcatcttgcactgctataaaggcatacctgagactggagactgagtactttataaagaaaagaggtgtacttggctcatggttctgcagggagcatggcactggtatctgctcggcttctggtgaggcctcaagaaacttgtactcacaatggaaggcaagaggaactgacatcacacggtgcaagagcaagaggaaggcaggaggtgccagggtcttttctgcagtcagatcttgcgggaactaatagagtgagagctaactcattactgtgaggacagtgccaagcacccccatgaccgaaacacccccgactaggcctcatctccaacattggaggttacattttagcacgagatttggagggggcaaatatttaaactatagcatatatcatctttggtgaaatgtccatttaagtcttttgcccattttatttatatatatcatttattattattattattatttcagatggtgtttcactcttcttgcccaggctggagtgcaatggcacaatctcggttcacttcaacctctgcctcccgggttcaagcaattctcctgcttcagcctcccaagtagctgggattacaggcacacaccaccacgccttgctaatcttttgtagttttaatagagacagggtttcaccatgtcggtcaggctggtcttgaactcctgacctcaggtgatctgcctgcctcggcttcccaaagtagtgggattacaggcgtgagccaccactcccacttttgctcattttaaaattgggttattcgattttttgttgttgagttgtagcattttttggtatactctgaatgtttactcttcattgccaagtttgatgtcatgaataatttcccctatgttttcttctaggagtttcatagttttgtggctcgcatttgggcaattagttctccatgcccttttaaagttatttctgtggatagatgatagaagagatatataggtatctccatagaaaatatttgtatatagttctgttatatgcatttttattgctatggttttgtttaacctaatacatactattctgatgctggcttttttttacattttataagtctttttcattatttttaattgctgcttagtattctacggtaatgatccaccacattttattttgtcttttcccttttaaaggtacttgtgtcgctggttgttaaaggaacatttcctactttggaggaatttcttttttttaattatacttttaagttctagggtacatgtgcacaacgtgcaggtttgttacataggtatacatgtgctacgttggtttgctgcacccatcaactcgtcatttacattaggtatttctcctaatgctctccctcacccagcccccttcccccaacaggccaagtgtgtgatgttcccctccctgtgtccatgtgttctcattgttcaactcccacttatgagtaagaacatgtggtgtttgattttctgtacttgtgatattttgctgagaatgatggtttccagcttcattcatgtccctccaaaggacatgaactcatctttttttatggctgcatagtattccatggtatatatgtgccacattttctttatccagtctattattgatggacatttgggttggttccaagtctttgctattgtgaatagtgccgcaataaacatacgtgtgcacgtgtctttatagtagccattctaacaggcgtgagatggtatctcattgtggtcttgatttgcattactatttactattgaaattgtgtagaactgctggacaaaaactgtgtccatatgctggccgtgtattgttccatccagaagtgatttgagcctcagcattagggtgaccccaacccagcctttggttaggacatggagcctgatgatgtcacatacatacattcatacattcattgtgctaatttgcaaagtctctggtactgatgtagtagctgcacaggggcgtgtggatttctgaatatactgcctccccgggggcccttcccagagagaaagccagagtggacacctgctggacccctgaataggagtatagatcgccatcagtgtggcttaaactagttgaaccaacatattgatgtcacacttgtgtcaacataaaaaaaaaaaaagagagagagggagacaaatctttaagtaaaatcgttttacttgggaataatacaaaagaagtaggattgcaatcccacaacataaatatggaccagggtggcctttttgttttggagaacaaaggaaaaagctggggatttttagagaaagaggctgttatgcaagttgttctgaaggaaagttcaatgcaatttgttttatgaaagttatgcaagttgttttgaaagaaagtttaatggctgtgatcccacagccgaaagctcacacctgtaatcccagcaatttgggaggctgaggcaggaggatcacctgacatcaggagtttgagaccagccgggccaacatggtgaaaccccatctctactaaaaatacaaaaaattagccgggcatggtggcagttgcctttaatcccagctacttgggaggctgaggcaggagaatcacttgaatcactccaccgggaggtggaggttgcagtgagccgagattgcgccattgccctccagcctgggcaacaagagcaaaactccataaaaaaaaaaaagaaaggaaagggaggggaggggaggggagggcagggaagggcagggaagggcagagaagggcagggaagggcaagggcaagggcaagggcaagggaaaggaaaggaaaggaaaggaaaggaagaaaaaaagtttattggtggtggcagcatcttacaagacctggcgagttctgaccgccaagtgtcagtagttgctaggtaggactgggaatcttggagttatggtcaggttcctgcagttttggattgggtttgtgagacactgtgccaggcaagtgtttttgcataactggctcgctctccctgtgcttctagctgtccttgtgtggcccatgtgataagctgcagtttggaaacatttcttgtgatagttcctgttagcaggcaaacgggagagcctcatcttgcgtgagagccctcccattaaagccttgctggctctgtctgctgaggttttacccaagtgactccattttgaatcttacaactcgcacactactcatgtggaagatttaaatgtacattccaggacctggtgctttctcttccgcctgttctcaaagcagctgcagggtgagcctgactgtgtcatttctcagcttcatctccctttccccaaaaaggtatagatgataatcccctgcaatggcttcaggacacaagatcaagtccttgcagtgcttttgtggcctcacagggcctggatccctgttaaactctgagttcacctcctgcctctctcccctgcccacctgctgaggccacactggcccccttgctgctcctgccacacgggctctgccactgctgtggcctccacctggaatgactgcccccccataattctgcctaggtcactgcttcacctccttttgctttagcgcttcatcaaataacattctatacatttagttatttattatgtttagtttgcccccattgctggtaaactctgtgaggatggatattttggtctgttttgtttacagtcctgtcccagtgcctagtcagtatctagcacagtgggccttcagttgagactttttttgaaaaacggaacatctgcctatcgcaaggactactattattctgaaaatcaccttcttcattagaaagtaatatttatcattttattatagaactttgatcttacttcttgtgacttcattctgcgtagagcacactcccatccttgaattaaatgacaaagcattttatattaactgacaatgactgatgccatgggcaaatcctatttctgtaaataactgaattttcttctggactgcgcatgaggggagaaagatgtctgcagtttcggtttcctggaaaatgaaacctatctcatttgttgcctgtgtcaaggggcagtgcttcagtcggggtggagctgcttaaaaggcctgggatcacaccctttgggaacacatccaagcttaagacggtgaggtcagcttcacattctcaggaactctccttctttgggtaagactgggagggtgggcaggagctacccttcccgtggccccggaccttgggtgggctgtgggctcagggagcggaggggaggccttaagcatccactctctgcccggtgtttttgttctcatcagggagcctcagatgggaagggactcgagccccacctgtccctggactctggaatgtaaggacaattagctttgtccttgcccaggttttcctcaggccttgagggcggcttggggtaaagtgggcaaggggaagagataagtgttaggaggaaccaagtcgaagccattgcaagtccatgcctgggcggggtgttgcttccctatggaaagcttctgacctggagcaaatcactgagccagatcgcgctccctcatctgtaacatgcggaggaggagggtcccatctttttcacgttagtgaggagattacataagagcaggcacctcgcctgctgtatatgccttaaaaatgcgattggttctgatttcttagttttggtgctttttcaattgctccgtggagagataagggagtcccggaagtgtctaagacattggcgctgggactttcaggagaaagaaagcagcccccctggggaaataaagtccctcagggccctgacctaacacaggtcctttggtagccccaactccccaacatccctccctccctcaccccaggatcctttcaaggcctgctgctccacaagctcagagcagcctccctagccccctggagcccgtcacatttttcaggacagtgggaagcaagtcaggttgtgtgcccatcccgtcctcagagctccatcccttcggcaggtctggctgaagttgaggatctcttactctctaggccacggaattaacccgagcaggcatggaggcctctgctctcacctcatcagcagtgaccagtgtggccaaagtggtcagggtggcctctggctctgccgtagttttgcccctg

SEQ ID NO: 6452 - DNA, 6000 bp, Homo sapiens
caaaaatatcatgctgaacaaaaaagtcagacgaagaaaagagtgcagttgtactattgcatctatagacattctacaaaaaaggatataccaatggcaaataaggatctgaaaagatgttcaacattgttagccttttcttaggaaaatacaaagtaaaaccacaatgagatatcatgtcacacctaccataatggctaaaataaaaaaaaaaggacaatgcccatattagtcaaagttctccagagaaacagaactagtaggacattcctagagatatataagaggaggtttattatgaagagttggccaagaagtcccagaatctaccatctgcaagctggagacccaggagagctggtggtgtaattcagtccaaatcagaaggcctgacaatcagaggaggccatggtgcatatctaaatcccagtctgagagcaggacaagacaagatgagatgtcccagctcaggcagtgaggtaagaaaaaaaaaagaaaaagagaatgctgccctcttccagatttttgttctatacaggccctcaataactgaatgacactgatatgctttggctgtgtcccaacccaaatctcaccttgaattgtaataatctccagtgtcaagggcagggctatatggagataattgaatcatgggggtggttcccccatactgttctcatggtagtgattaagtctcacgtgatctgatgattttccaaatgggaagttcccctgcacaagctctcttgcctgccgccttgtaagacgtgactttgcttctcctttgccttctgccatgattgtgaggcctcctcagtcatgtggaactgtgagttcattaaacctctttcctttgtaaattacccagtctcaggtatgtctttattagcagcgtgagaacagactaatacagatacccaccctccttggggaggccaatttactgtactgagtccactgattcaaatgcttaccttatccagaaacaccttcagggacacacccataaataatgttttatctgggcacccgatagaaactgattcataaaattaactatcacaacaccaaatactggcaaggataaggaaaaaccactcctacgttgctggtaggaatgtaaaatgttacagccactgtgaaaaacagtttgacagtttctttgaaatgaaaactgtaactaccatatgatcctgggcctttatcccagagaagtgaagacatgtttatacaaaaagccatacaccatgtctatagcagtgttattcacaacagccaaaagctagaaacaaccaggatgtcctttgacaggtgaatggttaaacaaactatgatatatccataacatagaataacacccagcaatgcaaaggaacaaactattgatacaggcaacaatctggatggacctccagggaactatgctgtgtgaaaactgctgatctcaaaagagtataaactgtatgattcttttataacatccttgcaatcacaaaattatagaaagggagggcagatgagtggttgcccctggttaaagagtgggtggggcagggaggaagtaggtctcgctgtaaaagagcaaagtgagaaatgcttcaccatatcaatgtcagcatccttgggccgatattgtactctaattttgcaagatgttatcattgggagaaactgggtaaagggtacatgagatctctatattatttcctacaactgcacatgagcctataatcatctcaaaataaaatctttaagaaaggcaccatgaaatgatttcagcaagagatttgcaagatctttatatagaaatactaaagaaaagttaagcatataaggagatatggcatgttcttgaagaaaatatttgttatctgtaagatgtcaattatccccaaaaaagttaatagaattttcttcaagtccaggttatttgggggagctgacaaggtcaccctaaaatgtattcagagagcaaagagtgaaaggtagtaaggaaacaaagaacgcattgaggaaacttgctctcccatacatgaattagcatgaaattagagtaactaaatcagaatagcattagtattagacagatgaacaaccaatggaacagaacaacctagaaacagactgatggctaaatggacacctgacaaatttggtgttgcagatcaataggaaagagctgatctagtcaatatggggttggaataattgaacattaatatgagaaaaataaaattgcttccttactcccgcctcacacacaatatatcagttatacgaggctgaaatatgagaaaagtatttaaatttttactaaaatactacaggacaatatctttatctttatggtctcaagttggcaaagaatttattaaacaagggctaactataaaagaaaatattaataaattttgaccaaattaaaattatttacttctgttcatgaaaaggtataatagagtgacaagaaatgtaaaatgaaagatgatatttaaaaacctataactagcaagattaatatctaaaacatatacttttcctgagtcaataaaaaaataagcaaaattttaaaacaagcacaaaagacctggtgaaaggcatttctcatcaaaggaaatgaaactgatcaatagatgtataaaagatgcttaatgtcattagtaatcagagaaatgaggatcaaatccaaatgaaacactacttcatcatatcatatttgcaaaacttaaaaaaaaatcctaacaatacaaagtgttggtcaattgtggagcaataaaaacccatgcctactataggtaggataataaaatggatgaagcctccttggaaatcagaaactggaaagcaatgggcatcaattagtaaaagcacagatgagctgaccacaatacccaactgttccattcctagcgtattccctgaggaccccttgcacctgtgcatccaaagacaagatcgagagtattcacagcagcatttttttttggcgttatcagaaaacctggagatgaccaaagtatccatcaaagggctagtgcatcaataaaaactgtgataaggacatacaaatggaatattgtgtagcactgaaaaacaatatacgtcaactacacaaataatgctgagaaaacaacaaagaagacatggaagagcaaatttagagcaatttaatttttctacaaagggttaaagcaggtaatctataaaggtaaaactataaagaaaagcaagagaattgacaagagtgaatactaaataggatggaggtgaccctggaaagggggcaggtaggagatgcctttggagagatacacagtaggacttcacgactgttttttattgttccactttttaacctatgcaaggctatattatttttcaaattgcacacacacaacctatacgcccttttattgtgaagtatgccgtgtacataatatttcttacagcagacggggagccctgggcagttctgggcaggctgctttgctattggccacaggaagggtgggaggaggtgggcggctcttggcatggactgtttgggcaggccccgtgtggactaggctgggaggtggcaggaatgatgggtgtggtgagtgcagtactggctaaaaacagggagggaagggagggccagggaactggagggtttagagaccagaggaggaagggaggaggcaagcatgacaggaaaagtgaaaagagaaaagaaagaaaaaagtggggggaaggggagagaaggagagaaggaagaggaggaagaaaaggagggagaaaggaagggaaggaaaagaaaagaaaggaaagttacaggaaagataacactgaaagccttctgtaggtcagtgaggttctggtcccattcccatagccacagtccctactgggcccccagctgccgggggaccttgaacaaacccctccatctccctgtgccacagcttccttgcctgtgacaaagtctgggagtcccaggctgcccctcacagaggctcgtgatgaccatgagtgtaaagtacctggaagagacatcacccaaagggaccagtcgtactcactgagactccttagagtacagctggttccctcccagtgagcccccggagggcaaagcctccacgtgtcaccaagtctgtggtgtccaccacacacacacacacacacacacacacatacagagcaatgggcccctgtgggcgtctcttctgttccccttacttgaactgtggcacctgcatgattttcgatactggtttgagctgagagccatggagtacccgctgtgcaacctgagcaccgtgcggtcctcgaagacaccactcacagcctcgtctctattggatgattagccatgttagggctctcatttattgaggacaccgcgtgctatattccctatctcatttaattattcggttctgtattctcttttcacagatgaggaaatctaggctcaaagacactatcttgctcaagctgcacaacaaagcagggctaggattaaacctcgttctgcccagatgccgagccgggagtacaccggactctgggaggagcgttggcgtggaaagccaggtcactccgatcttggtcctcaggctcgggataacgtgtcagccccaagagagcgctgcccacagccccgggtgggttgggttcaactgcacggggcggggcgccaacagctcaggacttgggttgcaggctggttcttgcaccaaccagcggggcggcctcgggcctcagtttccccatcccgcccacgaagggaggcgattgcgagcgcttggggtttctgacggaccccgccccgggggtggggcggggagtggtcacgtggaggggcgccccgtccgccgagccccgccccaccccgccccgcccgcccccgcgctcggggccctccgcctagtagagatctggagccagaagcccagagacagccgagtgcgccgtgcggtctccggacgctcgctgctcagcccgatccccgccaactgtgcaggcggctgacccgcagcggcagcggcagcagcgaggactcgagcgctggctgcagcgacaccatggatctctcctttatggccgcgcaggtaacggggcgtcccccccacgcgccccgggccgccaagtttggggaggttcggggccacggtctcgccctccacgctggggctgggcagtggcgcccgcccgcgatccgcgtcccggtcctttgtcccgagccggacacccccacttggtgcacgcgtcgggggcggcgatcgcggctctcccggggtggggcgggctgcgcgccccgcacccccgcggctcgagctgttcccgcccgggcccctctcgttggcaggaaggctgcgaggagcctgggcagcccgagtcgcccccttctgcccatcccccactgctgtcccccttctggggtcccggagccctccaaggccgggccagctcagacccgcgcgaacgtggatgggcacacagtctcgcccttccccactctgttttcccgaggcgccagtaatctgtctcttgccggtgacctcgggcgccccctttgccgccgcctgaggaaggctctgagacccgctttgtgaccgtgacccgccaagcgtcgacgcgccgcggtcgtttgtcctgttttgctttgtgtagagtctgatggagccaccagtgcccagcgcggccagaacccccccacccccctccccgacacaaacaggctcccagtggccggaaaaacaaatctctcacagcttgaattttcctccggcagaatgccctggagttctgagcttgggtgatgattctatttctgtgccttaactctcttgagccagaacaaagacaaatcccggatttctccatcagtctgtgaccctagagaagacccagagctggctccagggaagggctgcgtttggcctgggagagtaagtcccaatctaccaaagccacatcttgcaccttctctggttgtgttggttggttatg

SEQ ID NO: 6453 - DNA, 6000 bp, Homo sapiens
gaggggctgccctgcccagtgccacacagcttagtgctggagcctcagggtcaatgctgcaggggtggcccagtgtccaggactgtgttcaagacatcagtcagaggtcacaacatcccaggccctagactgagcctaggggtcaccatgttgataccttagaaatgtttgggaggttcaaggaagctggaaactgggttccagtcctggctctgtgcctctctgagtctcattgcaaaatagaggtcaccagaaggattactggatgaaaaatgaggtagcattgcagacgtgcatggcacgtacactctaggttgcttcctagacagaaagctcagttcgaggctggtggcatccatgctggcagcagccaactgtctgcgacagagtgaggaggggcatgccacgtgaaggaccagcatcagaatgacatgggaagaaactctcacaatagcagaagaaagagctccttcagcctaacatgtagaactcaagtcttcttgtcgcgcttctgtcccctcgcccctcctcccccactgagaactagcttttactgagcagttattacatgccagctacctcgggtgtgtcagctcatttaatcttgacaacagctccacgagacaccctcaatatcactgtccctgttttccagatgaggggacagattcctagggtgttatgtaagtggtccccggggctttagaggcaggtttgcaccaaggcccattctcccagagccggatccttctccttccctgggatacagcacctccaccctgccaggccacccatgtaaaggcagccaattcagagccacctcttatgcctgcatctccccaacaattcctgctgggaaaccactcctcgtatggtgtcatctacaccagtgggtttcaagcttgagaagaatcaagttctacagggctgcttaaaacacaggttgctgggtcctgtctctcagagtttttgactcagtcttggttgagaattttcagttctagaagctcctgggtaatgctaatcctcctgttctaggggccatagtcattgtccatactggtgctatccaatagaaacataatgtgagccaaataggtaatttaaaatctgcttgtagccatgttaaaaaagtaaaacaggtaaaattaattttaataatatattttatttaacccaacatattcaaaatattatcattttaacaggtacctatatataaatatcaattttttttttttttgagacagggtctggctctgtcacccaggctggagtgcagtggtcccatcactgttcactgcagcctcaaactcccaggctcaagtgatccctccacctcagcctcctgagtagctgagaccacaggcatatgccaccatgcctggccagtttttttgtttgtttgtttgttttcattttttgtagagaagtggtctccctatgttgcccaggctggtcttgagctactgttctcaaaagatctattgcctccacctcccaaagtgctgggattacagttgtgagccactgtgcctggtgaccttttttttccattcttttttggtattaatctatgatatctggtgtgtatcttacacatagcacatctcaattggactagccacatgtcaagtaccagaaagccacatgtggccaatggctgccacattggatagcttactccagaccctccagtgaaggagcaggtggttggccacgtgcttccaggcagcgctgcccacccaggaaaagggctttcagccctgggacctggagccttggtatgcagcctgtgttcccttacctgatcacaggatagctgggagcatcaaatgaggtggtgatgggacagctgtgggcttggtgcctagggagaggggagactgttggctcacagatgggaacggcaactgctctggaagtgctgctcctggggtaagccatggtcatgttgagccagagatcactggtgctgcccgatgtgtcagagaagacgtatgcccactcctctccttagccgtatttggagaggttcacgctgaccactgctccctgatgctgctctacacctgctttctgtggggctccaggctgtgcctggagctgttcaggacctggctcttccctcaaggaactgtgacagtaggtagtcaggcagacatgagcagggcaggagagggccctcccccaacgaggaatgtcaagtggccatcagatgatggtcaggcagttgataaactgcttctctcaaataataattggtcgcagccagtgccagggagaggcagtctcccaacagatggaaacacctgaagctggtgatcagcttcccgataagatctcaggagctgggcgagtgggctcaagcatgcacactaagaggcaaaatggcagcgattaactggtagatgaccttcctctaggaacaccggtaagggaaaaacacctcaaatgagcgcgcacataacttcagtaaacacagctgtgcattcggcccctcccaggtgctgacaggccaccgcgcacgcagacagcccgccccaagggaagaatcaggggcgaagagagatgcaaccccccgggagcatgccaacctacaaaaccccgagtcaaaggtcaagccacacacttgcctctctcaagtcacctgcttggccctcttctaagtatactttacttcctttcatgcctactccaaaactttttttttttttttttttttttttttttctgagacggagtctcgctctgtcacccaggctggagtgcagtggcgcaatctcggctcactgcaagctccgcctcccgggttcacgccattctcctgcctcagcctccccagtagctgggactacaggcgcccgccaccacgcccagctaattttttgtatttttagtagagatggggtttctccgtgttagccaggatggtctcgatctcctgacctcgtgatccgcccgcctcggcctcccaaagtgctgggattacaggcgtgagccactgcgcccggcctctaaaacttttaaatacattttcactcctgctctaaaacttgcctctcactctgccttacgcccctcagtcgaattctttcttctgaggaggcaagaactgaggctgctgcagacccatatggatttgctgttgctaacagtaccattgttccaggggtctggagagacaaggcaagagaaagtcctcttcagacagtgcgatgcactgtgtaatctcagggagccgttccacaaactggatactaaatgtgatgccgtcacatttcttttctagctaaccaccccaacccaccttccagtgcgcaggaatccacaccctccttcttgcagcctcatcctccctccaaattgccctcaagccccggagctttcacagcccacaggggacctggtggctccgttccacacctcaccccagcagggccagcctgagttaccctgtgggcctgcggctgcctgtcaccgccgccacacgggggcgccatagcaagccaacatccccgagtccaactgggcggccgggccaggcgccggggggatggatgctctgctgcccacctgtccaggctgcggtggccccgagggcagaagtcccgcctcctccgtgctgggcacggctcttaagacttggccgtctccgtcgcccctcagcccacacccctaacagccatgtcccatgtccctaactatacctgggaaggcggtaccaaggtccccttcgttttccaacccccaacctctccaggactggctcaagcgtggggcaggggcattgcctcttctcagaaacccagcagcatctacactccctgggcctctacctccagcccgggggacctttacctgggctaggagtgggcacacctggccttcccctgccacgactttcacgctgggtggtccctcgggataggaattgggaactaaaacgcccagaattggcctcatcttcatacgggatgggcaaggagacgcgggttacgacagagggggaagccctggtcattatttcgaaaataccttctcctccgctacccccgcctccccggcacatttcccgctttccctggagggcggacccagattttcatccctccaactccaactccttcgggcctgagccagcgcctcagatggggcttcgcctggtctaggagggtccgcaggcccccgagtctctgggagaacagcctccggccacgccgtgcgctctcggtcgcagacacaggcgtccctgggtcccgcaggatcctgccaccagcccgcgggccccgctggcggaccacgggcgctaggcgtggactgtccgggcggaggaggcgccccggggcaactggagaacaactttgggggtctggggttccaaggagaagtttgggaacagtcggcgttatgcggacttttgcaggctgggatggggtttccgggcaggtttgggggaaaaaggaaggggcctaagaccgcgcgcggaaagatgccgttatttggaggcgccgaagcgggcggagccagccagcaggacttcgcgccgccgccgggccagagcgctgaggatcggcgttgccagggacaacgcgttctgggcggagctgctgctggggcggacctgagtctgaagaggtgggggcggagcctggggggctgagccagaagcggagttgtgattggtgaagaccacatgctcggggtggggcctgggctggggcggtgtggaggttggggcggagctctggggggcggggcggggcgggggagggcccggagcgccggagccggaggcggagacgtggttggcggggactgtgcgccctgggaggggtcggagtcggcgggggcggagccgagcgggcggggagggtgctgggtcgcgcctggcctggggccgaggcggcgcgcggcgctgacagctgagtcggctcgcggcctcccggccccctcggcgcccggcccgaccctggcctggcctgccctgccccggagccatgagccccgggctgctgctgctcggcagcgccgtcctgctcgccttcggcctctgctgcaccttcgtgcaccgcgctcgcagccgctacgagcacatccccgggccgccgcggcccaggtgagcggggctgggggcggggcctggctggggtgctgggactgggggcctggggacagcgtctaagccggcgtccaggccgggggtccggcctcgcctagtgcgcgcggccgctgggagtcggcggccccgagaggggcgctaactattcttagtaacaaattactcacagccgcagcagctgctgggcgcccaccgcgcacagctgggccccacaaacgtgatggcagccacagccctttcaggtaggcgctattgttaacccatcgttcagacgaggagactgaggcgctcagaggcgaagtcacctgcccaaggtcacacggttggtaagcctagatttaagcccaggtcagcctgcctccaaagtgggcgctgttaactttgggacttggacagggtcagcctggattggagcacgctgtacttcagtcatgtttccttttgcttgtatttctgttctgggacaccccatttgtcttctccttagtacttacaattgcattcttggtccccacccccacgcaacttacacccccctcaacttgccaacccccccccacccccagcttagctttgtgaagcttaaattaaatgtgtcatttccctgctccaagggcttcccatcacttgacaactaaatgcagttctaaattaagtcggctgcatggcccgcgaggcccctgccgagcactcagaacccactctgcagcttgctctttcctcttgctttctcactactgcccccagcctttcttctcccagcctccccctccccccgccccccccgcagcttccctccccccgggtccttttctcaagcctgggcctggcgggcttcttcctctgcttgtctcaaacaggccttgcccagcaccttg

SEQ ID NO: 6454 - DNA, 6000 bp, Homo sapiens
tagcgtctcctagaacttcctaggaccttctggcgtgcagaatgacccatggggaaggcactggaaagtcaccacccaacccactcctgatgcagacgagacctgaggaaggggccagagatgcacagggtcacacagcaagtagccagggcactgcctcctaggccttctcctctccttggccgggagccccagaccttctccaacccccaaatgctgccaaacacctctgctagatccaggccctggggccctgacaagctgtcctggctgggatcccagcctgcccagtcaccccagagtcccgccacctcccctgtgcctgcctcaaactcccagagggatggaggtctgccatgttgaggacaccgctcagaccagagctctgggtccctcagccatctcccaccccatcccctgcagggtgtccccatgatcaacctagccaagtgtttggatagaagaattcattcttaaagtaaatgagaagggtaaatacctccgtgggagggcccaggtacccgtgggaagacctgtttagcccagaaagggaaacggattggcccagtgaccaggtgatgggtgcattcaccagacaccacgccccaaggggacttcccaggaagtgttgtctgctcacagcggcaggtcctgacccaccgtgctcagccctggctgccaacatgccgccccagctcactgctgcaggtgcgcaaaaggacagagtgaaataccctgagtttctccccaaacaaggagttttcagtaagtacacaccgcactcatttactccattcacaaaggtttattgggtccctgcctggtgctggtttgggttagtcactgtagaggatccatctgggccagcctgggaggggcaggtctggagtccgaggcagacacgaaaccgggggtgacacccaggggctgtggaggctgccatgctgaggacagctctgggaggaccgctgaagaggatgactagcgggtggggagtggggttcagccatctcccgggagctgggagggcccaggtggaggtgagggcagcagaggaggaggaggaatgggggtctccaggtagaaaaagggagcagggaatagcatgagtggaagcccagaggaaggaaagtacccggagggtctctgtgcttcaagaggccagtggaggggacagagacaaacggccagtggtgaagcagggctgacaccctggcagcaaggacactgaggcacacacctgccattcaccagcactctcctccaggtgtgcaccagctcctgcccgaagcctcaggaggtcctcctgcaggggaacacagggccaccagaacccaccccaccccagagggaagtctcagtgacagcctctctgggccctgggagctgctctactggaatggagagagaggctgtacccattgcaaacccgcctaccacgccccgcactggggcagtgaggtccggcgggggggtccgcaccagggttcaccaaaccctccctttcaagggaagactgccccaggaggatgggcttgggatcagaaggccatccaaaggccagccctcccctggctctgccagggccctgctgcctgtcccctccccgcctctctccaagttgttcctggacaccaaatggaccccatccaacttgtccctccttttctttcccctgcccgccccctgctggagttgtaagagggcaggcagaaagggaggtgggggaggcccagccaggctgggggacaggagaagcagccccagttctaactctgcttcccccacagcagagcctgccaggcccccgagggccgggacctctgggtgatgcctggcactcccctaagtcacaggtggagctgggcctttggccagtactctccctcctgaccactgggatgggacaagacagtaggggcaacaggtaggaagggccaggtctaaggtgagctgggggtgcagccctagagagaggtaggaaggagggacaggggttgctctggaggagagagggttgctccagaggcagagggaaaagacaactggagtgggagtcagtgagccaggttctgtgttccaaaggccagcattgcctggaccttgggtctgtcctcacctgcataagaggctgcaggagccaaatgggccttccagccttgtccaatattatggagtcccgaggtgtggagtgtattctgtgggcccaagaaacagcaacagatccccagaacagatgacagccctaaagaaaggctgctttcctgagcatccctggggctagaaagagtgtggatcaggtgcttcctattgggctgggcctgcagaggggacaagaggggccagtcttacagccacccagaccatactttccacacacatgcacatgcgcacacacacttgcacacacacacacacacttgcacacatatgcatgcacatgccaccagatctcagccagcacagaaaggctctcccagccttaggtggcttatgcattttctgaaactaactgtgggaaaagggcttggggaaccatcccatgtgcctgcaccaaatgctgtgtgggtggggcaggacacaagccctacactgacacctcccagaaatcagggaatcagagcttgagagattgtccagtaaaagttggaaccctcaacaccccttgactctgcccaggaggagcaacctcagaagcccccccaaacctcctctcagagacctgccgagtaggaggcttctctctctactctcctccccgcaaaaaagaggccagaaaagaggatgattggctaactcagaggtgccctgatggaggggagcaaacaaggggacttccaaggagaattccctagcccacctgaaagacccctacccagagtggtgaggggcagcttaggagcactgacgcaagggggagagaccaggctggcttccctctacgtagtaagttcctggggtgtgcgcccctgccccagacagcagagaaatcgcctgactgggagatggagaagaggggccaccttctcatgccaccccgccgccaatcctccaggcacactcgggcgcttgacctgctgaagcctgtagcctcaggtccagtgaggagctcacgggacagagggccctaccagagccacgaaaaccggagggggggacctccgcccaaggcaggcgtctctgcgcgcccgctggggccctggtcctgcagttggcttctcccgacacgttccttcgctgccgaaagcgattcgcccgcgctctaccgagcccagccagctcctacctcggcccgggcggcgagcgctgtctccgtcccgagaagaagtttcgcggctggtcccggggcggcaggcgcacgggacgctggcggcggcggcggcttccgacttgggctcagaccccgccgctccagacaagtccccgcgactgcgacagtgtctcgggcagttcagctccccagacgggagacagaccctcgcgacctggttcaggccttgccctgggggacactgcagtccaaggcgaaaggagacttgctcccggcctctgggtccctaggtcaaggcacctccccgccccgccgcccctgagcccaagtcgccaaccccgcgccgcgcgcagcgagggatcagaaggtctcggacgccgcggcagggccggccagggccccacgagttagggagttgccccgcacccctaaacgctcagcacccatttacggttgaaagtacgcacttgacgcgtccgggcgcctccgcggtgagtcgcgccgccgctctcggggtccgcgaaggtggctcagttcgggcgctccagtctcgacgttcccggggtagagagcaacgtccggggacgaacgggacgggtgcgcccagcggccggggctgcgctgggcgaggcaagcggcgagaggggagcgctccggcgttcaggcaacagctacccctagtgggagagccgcccggggccggcgccgccccgcgcccgctgccccgcgccccacgcccgtggcgccccgcgcccgggtcggctgggggcgcagggccggcgccgctttccccagctctccggtctccggcgcccggcggtaacccgcccgcgggctctgccctccgcacctctcagcccggccccggcggccgctgacccaggaaccgcggcgccccgctggaacgagatgggacggggcgggcgcggccagggcggcgcgggctggggcggcgcgcggcagcctcgggcagcggcggggggcgcggagcgcggtgtgcgtggcggggcggtgcggggggcggccgtgtgcgaggcgcgagtgtgagcgcgcgcgggaggcgggcgggcgggctccggcaggcgagcggcgcccgcgggcgagccaggaaggcggcgggaacgcaaagttgcctcctcgctggcccgcgtcctcggtggggcgggagccggggccaccgaagcggcggccgcggacccggcctcccgcggcacctgggcagcggccccgcacgagcggcagcggcgtgggcggcgttggcggcggcgcgcgggaagcgaaccggagctccggcgcggctcggcggccgccggggagctcggctcaggtgcgcggcgaggggggcgcgggccggagccaggcggcggggaccagggcggcgcgcagcgctcgcgccagctggaggacctccccagcggacgcccaggtccctggtcgggctcccggtccccagcggcagcggctgccggagtcccccgcccccgagagctggctgcggggcccgggcccgcccccaccggccccaggcccggccgctccgccctccgcccgcctgcgcccgccctcagcccaagatttctagggcattggccgcgctgctgggtgatccctccgggctcaagttgcaagggggcgggccgggccggaggtggagtctcccgccaattgaagcctccgctataaattgaactccctgcactgctgaagcccagatgcctcgccaggccacgtcgcggttggtggtcggagagggcgaggggtcccagggggcttcggggcctgcagccaccatgctccgctccctgctgcttcactccttgaggctctgcgcccagaccgcctcgtgcctcgtgctcttcccgcgcttcctcggcacggccttcatgctctggcttctcgatttcttgtgtatccgcaagcatttcctgggccgccgccgccgggggcagcccgagcccgaagtggagctcaacagtgaaggcgaggaggtgcctcccgatgacccgcccatctgcgtgtccgacgacaaccgcctgtgcaccctggcgtcgctcaaggcggtgtggcatggccagaagttggatttcttcaagcaggcgcacgagggcggtccggcgcccaactccgaggtggttctgcccgacggcttccagagccagcacatcctcgactacgcgcaagggaaccgcccgctggttctcaatttcggcagctgcacctgaccaccgttcatggcgcgcatgagcgccttccagcgcctggtcactaagtaccagcgcgacgtcgacttcctcatcatctacatcgaggaagcgcacccctccgacggctgggtcaccacggactctccctacatcatcccacagcaccggagcctggaggaccgggtcagcgcagcgagggtactgcagcaaggtgcacccggctgcgctctggtcctcgacaccatggccaactccagcagctcggcctatggcgcctacttcgagcgtctctatgtcatccagagtggcactattatgtaccagggcggccgtggccccgacggctaccaggtctctgagctgcgcacttggttggaacgctatgatgagcaactgcacggcgctcggccccggagggtgtaaacatccaacggacaattgactgaacttggtgggctgggccttcgagccttcgaagcccacgtgcaagcgcctcaaaccaagtcacgcttggcgaggccccag

SEQ ID NO: 6455 - DNA, 6000 bp, Homo sapiens
accccattcccattctccatgatgagcttatttcacattggatgcctgtatcaagacatctcttgtgtctcttaaatatatatacctactatgtacccataaaaattaaaaataagttttaaaaaataagtgttaatgtcctcgtggagaaattggaactattgttgtgcactgttttttgttttttagggtctgtttgtttgagatggagtctcgccctgtcacccaggctggagtgcagtgatgtgatcttggctcactgcagcctgcctcggcctcctgagtagctgggcctacaggcacgcaccaccaggcccagctaatttttgtattttcagtaaagatggggtttcgccatgttggccaggctggtctcaaactcttgacctcaagtgatctgcctgcctcagcctcccaaagaaagcgctgggattacaggtgtgagccaccacacccggccctgtgcactgtcagtgggaatgtgaaatggtgcagccactgtggaaaacagtatggcagttcttccaaatattacacatataccttgaaactgtgtatcgctattatgcatcaattaaaaataatagaatgggaaaaaaataaaaatagaactgccatatgatccagcaatttcacttgttggatatacacccaaaagaattgaaaacagaggcatgagcagatacttgtagccccatgttcatggcaacattattcacaagtgacaaaaggtggaagcaacccaaatgtccgtaaacagggaagagtgaataaacaacttcagtgtatgccaatggaatatcattcagccctttgaaggtaggaaattttggcacttgctacaacatggatgaatcttgcggacattatgctgagtgaaataagccagtcccaaaaggacaaacgctgtaagatctccttatgtgaagtacccagagtagacaagttcatagagactgaaagtagagtgatggttgccagcactggaaggagggagaatggaaagttactgtttaatggggacagagtgtcagttttgcaaggtgaagagttcggtggatggatggtggtgagggttgcaagacactgtgaatgtgcttaatgccacagaactgtatgctgaaaacagttaagatggtacattttgtgttgatgtatattttagcacaatttttatttttatttttttgtttttattttaccttaagttctgggatacatgtgtagaacgtgcaggtttgttgcataggtatacatgtgtcatggtggtttgctgcacctatcaacccgtcatctaggttttaagccctgcatgcattagatatttgtccaaatgctctcccaccccctgtcccccaccccccgacaggtcctggtgtgtgatgttcccctccctgtgtccatgtgttctcattattcacctcccacttctcagtgaaatcatttagtgtttggttttctgttcctgtgttactttgctgagaatgatggcttccagtttcatccatgtccctacaaaagacatgaactcattcttttttatggctgcatagtattccatggtacatatgtgccacattttctttatccattctgtcattgatgggcatttgggttggttccaagtctttgctattgtaaatagtggcacaatttttagacaattgttttttaatcaattataatattattaactccttgtatttatagcatttatatttccttttgcttgcttttggagagaacatacagaaatttgtgattttaagatcgggcatggtggctcatgcctgcaatctcagcactttgggaggctgaggctggaggatcacttgagcccaggagttaaaagactattctgggcaacatagtagagacctcatctctactgaaaatgaaaaaaatgagcagttgtggtgattcaagcctgcggtcccagctctgcaggaggctgaggcaggaggatcacttgggcccaggaggccgaggctgcagtgagcagagatcataccacttccctccagcctgggtgacagagcaggaccctgcctccaaaaaaacaaaccacagaaatttgtcatttttaatatgagcgctattcctgaggggtttgttcagaggtatttacatgttatttttttgcttgagaattgattattcactttccctttcttctaaaagttatagggatttgggggggtggttttgattgatttttatttaactgtttaagccacgtcaaattttattctggtatgatgttaagacttaaattgacttttttctgcatatagttaatcagttgtctgccccaagattgccaagcaattatctaattcttccccttccactgatttgagatatactctttattatattacatttatgtcaacatatttctcagtttggggctgtggcttctgttccattaatctgccttttttgccccatcacactgtcattaattcatacagctttatagttggtaggacttgcctttctcattagtagtgttctcattcttcttgttcttttattttttgcaggtgaactttagaatacttttgctaagtacctggaaaaatagaggcccacctgaattttaattggaaatactttaaacctgtagatcagtttggggggaaattatcagcatagctgcagtatttatatttttatatttccaattcagaagtacaccttacctttattcaagtcttcttttcttccctcatattatttgtttatttatttctatcttagagtctgttttatcaatgatggccagatcagccttgggttctttaaagaactacttacatgcatagggtttcaaaagagtgtggggtaaatcactaataaaggcaagatcctttgatctgagatcattaggaaaaatacatcaaaaagtgtcttcactgtttctttgactcctattccgtatattatatataaagctcttaggagcctttcccccttatttctgtattcccactcatcagcacagttgtaggataggcacattttttcatcttatctcgtatgaaatattaaatcattggagggcaggtctctgtctccttaaagcccagatcttcaataagcatctgctcctgggctccttcctgagcccctgaacgcctcgttcctaattgtgtctgagttcatctggcatcactcagaggaggaggaggaggaggaggctggggtgtggggcagtgagagtcatcaacactgcttcctagtggtcgttggtgatcggtggccatcccctccagacagacaacccacaggtcagcagtgaaggcttagaggcaggagggcagctaagatctaaattcctcttacccaactgaaagcacgtgctctttaaaaaaaaaattaattctgctgttcagatagcagcaaagtcagagcaggtgtgaggccggcagcctgctcaggtggtgcgtgcccactgcccacttgtgttagaaatcacatcatctcctggccggccatggaatccagcactgtctgtcagctctggggaaagagggggaagggtgggatttggtttgcttttatctatttattttagttgctattgatacacacaataaaagctacattcttgtgagggaggacttgattagcagccctgaagggcggtagcagttcccttactcattgaatgtatctggcgctaaaccctcagctggaactgcgagccctagctgtatttcaggtgtttcttactctactgtgaattatgtttaggaactaaagggcttttgtatccttcacaagtggggggaagagagcaggggaattgtgtgagaaactattaaaaatgaggagccatggtttggacaaacttccttgttggtgtgaagaaaggaggaatttttttcagttccacctgccgaagaggcttttcttatagttcgttttcatttggaactactaataacactcatttttgtagggaatcatctcaccgcaccccctcatgggatcctgcaatactccatccaattcagaaataatgtttttctccttggaatagctttttacattaactgtatttgaagatagaaaatttagatctgaatagcagcttttaatagccccataaaaataagtgaaaatatctttaattttaaatttaaacaaaatatctaaaacttaaaaggtatttaatatgtcagcatatttgcaatacaaaaataaacatgctccatttcatttttttgctttcttactcccacggccaggtgatataaatatttcaatttgtgtcactttctagctatcgaatttataaagcggctttcattttctacgtaagtttttaagcttaattttttcagggaaaaaatagatctcaagaaaaaaagtgtttgggatcataagttaataactcatcctattggtaagggaagttgaataagagtccaaactaatggattagaattgtgtaatatttgcttaaccatttgttaaaaaaaaaaaacaaaaaaaaaacactgggttgccagaatcctacctaagatgcagatattaattagaactagcaagtcgaagttgcacaggtgggtataaaatgaatttgggatccctcactgggaaatgctaaagttcacacagacatatacacacacttttttttttttttttttttttttttggtggctccctcgaaatcatttgtttacagtctggccaaggttgtggcctccagtattccccctaagagatgggatctttgcctaaaagttactgagaaacgaaggctgcaaaaagccggaaaatatcccagcttttaaggcacactgacagccaaacagaacgctctttccgtttgcagtttttttagtgtcattttaagttgcagcttccggccaatcagcgagcttcatgcctgctgacatcacgaaccagccagttccctccagctgcagagagcttcagtttgtctttttttttttaaactaaaatggaggctggtttcttgccttaaggagcccattgcctttcccgctgaagtctagatgttgacatgtaataaagcgggcagcaggatggtggtggatgcggccaactccaatgggcctttccagcccgtggtccttctccatattcgaggtaagttattgtgtgtttcactgaatcggaaccttccgtgggtagttaataaatggctattgtgcttcagataagaaaagcaggaagtcctttctagcagaattcaccccatttcgctgcagacttaaccagaggaggttgggtgtgtcactgcagtttggcattttacgaactacttacagaatttgaggcttgaaagaggccttgcatgcatagttcaaagctggtttttctgctttctgctcgctctcccatccccctttcaaagctgtgctgatgtcaaaggatgtgaagtcactgcccagggaaggtattgggtgggggtaggaaggagaggcgggcctgtcgcgcctggccaagttgttcgtacgcagagtttctgttacatatgtgtggcttaatgctgcaaaggttttgtcgaggacacatctcagaattaaagatgaattgcagtcagaaaatatgcacaattgattggaaaagaacttcctttaaaaggattgttttcattcttgccgtggagcctgagagagaaatatgctccactttgaaatattgaaatctatcgtgggtcatcatttttgaaatgttagcgttttcgtggaatattaggaaatattttgcatttaaataggctctgtgttgccagttggcttttaaaattttaaatggcaacaagttttcaaggtatatagagatcactgttttaataattagtttgcttctttttatgcatattttggtttcaaaacttagcctaaaagcacaactactctagtaattaatagcggttatattgaactacaggcatcagggtagtagcctacttattcttggtattttaagatatatgaatttttttttggtcataat

SEQ ID NO: 6456 - DNA, 6000 bp, Homo sapiens
ggcagccaaactccaggaccgtgaggacccaccctccccgtcctaggctgggccagcaccacagagccactgagcgcagggacctctgctcaaggcgatccctccaaggtaaggggcaatgctggtggcatcagagatgtcgaggcaaggcgcccacccgggacacaaaaagaggcagagctccccccagtggcggctccttcctccccggatgcagcatatcactcatgaaagaagcaaataccaggccaagcaaaggggtgctcatggcagagtctgcagatgaggggtgggggtgcaggaaacagcaggatggcctggagggtggaaggccctggaagtctccaagactgagtagtttccctttcaccttcagtcctctgcctacatacccacctccaccatccttcctgcacccttccctagtcactcatccaccatcctgccattggaacccagtgtaaccatccaccattctcccccttccatcagctacaaccagtgtctccccaatccacaaggcacaccatccatctctccaccagtaatcccctaatgaccaattcaccaccctcccagaaactcatctccccatcatcaaatcatccaaacatcatgcacaatccatttgctgttcatctttctacctctctgcttcccaacacccacaaatccatcctccattcactcaccacccagccattccaacgtgcatgatgcagatccaagcatgcactgcagacccattcccccaacccccatcaatcatccatccatcacctagcgcacattcattcacaatttatccaccatgctctgtccacccacccattgatttatatccagtaactcctgtactcttatccatctacctactgtctctctacttactactatccattcacacatcatctaaaattcattcaccattattcatccaccatcaatccatccctccaccatttggtcttgtccaccatccatctacatccaaaatccacaactttttctcacccaccgtgcattgcaacaactatccatacatacacatctgttcaacagctacgatttctctttcacccatcaaccatccactatgcaaccatgattcattttgccaccgtccgccctttccctcgttctcctttattcaactaccatctaccatccatcaaccatccttccataatcactcttctatccatccatccaccaataacattcaccatctgtgagctgccatccatacacttacccattcaccatccacaatcaactatctactctttttttttttttttttttttttttttttaatagagtctcactctgtcgcccaggctggagtggagtggcacaatctcggctcactgcaacctctgcctcccaggttgaagcaattcggccccagcctcccaagtagttgggattacaaatgtgcaccatcacatttggctcatttttgtatttttagtagagacaaggtttcaccatgttgtccatgctggtcttgaactcctgacctcaagtgatactccatcctcagcctcccaaaatgctggggttacaggcgtgagccaccgcgcccagccaactatctgctttcatctaccatccgtcatctgtctgttgatcaactgtccttctacaaaatactatatcaacccaccacccatcatccaccattcataacgcaccacccatctatccccattcaccatccaccatcaccttccatctacctaccatccaccatccaccattcataacacaccacccatcatccccattcaccatccaccatcaccttccatccatctaccatccatcatccaccacccatctatccccattcaccatccaccatcaccttccatccatccaccatccatcatccaccatccatctatccccattcaccatccaccatcaccttccatccatccaccatccatcatccaacatccatctatccccattcaccatccaccatcaccttccatccatccaccatccatcatccaacatccatctatccccattcaccatccaccatcaccttccatccatctcccatccatcatccaccatccatctatccccattcaccatccaccatcaccttccatccatctaccatccatcatccaccatccatccccattcaccatccaccatcaccttccatccatccaccatccatcatccaacatccatctatccccattcaccatccaccatcaccttccatccatccaccatccatcatccaccattcataacgcaccacccatctatcccaattcaccatccaccatcaccttccatccatctaccactcattcattcaccattcatttatccaccgtccattcatgcatacatccaccatccatctatccaccattcatccatccaccatccactcccactatccatccatccaccatctatccatccacacattcaccatccacccatccacaacctaccatccattcatccaccattcactcatccaccatccattctccaccatccatctacccatccatccctctacccattcacatatccaccatccactcatccatcatccacaattcactcatccagcgtccattcatccatccacccattcacacatccacccatctaccatccaccatcccttcatccaccatccacccatcattcactcacccaccatccaccatccatccatccacccatctatatgtccattcacccattcgccatccactcatccaccacccaccattcatctatcatccctcatccactgtctaccatccaccattcatccatccacccattcacccatccaccatccatccatccaccatccacttatccacaatctgccatccaccattcgccattcatccatccattcatccaccacccatcaccattcacatccaccatcggccattcaccatccaccatccaccatccacctattcaccatccaccattcactcattcaccacccatccttccatccacccaccatccaccacccaccatccaccaaccactattcatcttaccatccaccatccaccatctatcatccactatctaccatctgccgcccatccatccacttaatattcaccatctactcatcaccattcacttgtccattatccaccacccaccaaccatcatccacctaccatccatcatccaccatttatccattatctacttatctaccatccattacccatccatttatcatcctatccaccatctactatccacccattatccactatccactgtctattcactatccaccatctattcactatccaccgtccatctccatccacaattcaccatttatgcaaccatcatccaccatctatccatttaccatctatctattcaccatccaccatccatccattcagcattcatcactcaccaaacatccaccatttaacacccacttttttttttttgagatggggtttcactcttgttgcccaggctggagcacagtggcgtgatctccgatcaccacaacctccgccttccaggttcaaacgattctcctgccttagcctcccaagtagctgggattacaggcatgtgccaccatgcctatctaattttgtatttttagtagagatggggtttctccatgttggtcaggctggtctcgaactcccgacctcaggtgatctgcccgccttggcctcccaaagtgctgcggttacaggcgtgagccaccgtgccccgccaacacccactctttatgatctacctgtcggccatgtatccatttatgccattatccatccaccactccctgattaccatccattccttttcctttttttttttttttttttgagacggagtctcgctctgtcgctcaggctggagtgcagcgcacgatcgtggctcactgcaagctccacctcctgggttcacgccgttctgcctcagccccccaagtagctgggactacaggcgccttctaccatgcccggttaatttttttgtatatttttagtatagacggggtttcaccgcgttagccaggatggtcttgatctcctgacctcgcgatccgcctgcctcaccctcccaaagtgctgggattacaggcatgagccaccacgcccggccattcattcatttttcactcaccatcctcatccatccattcatcacccatccaccctctatcactcaccatccaccccgtcaaccatttaccattcatctgccatgcgtccatatgccgtacaccatgcaccatcaatgttgctgtccatcagctgtcccctactcaccatccactactctccaccatcatccacaatccaccctcctataccatccacataccatgttccatccaggatcttccttctatcatccaaccaccacccacagcccatgggacaggggcactgcgtggagaagtggacacccagttccaatggtgagcagactagctcagccctagcagcacacaggacagagaaaggggtgaattcaaaggtcgtttattccccctcccggcaagacacccattttacagggtaggtcagtctcgccaagcccttcttctttgcccttcttcctgagaacctaaggtgttcaggccctgcaggggcgggtaaggggaggctgagaaggtgcctcccaggggcctgaagagtcggccctgggcgggtctggaggtaaatgtgtaaccgaccctggtgcccccacccgacctgcctggtcacgtgggtccagtggggcaaagtctcctggtggggtgcaaggagccgaggcgagatgggcgtcctgggccgggtcctgctgtggctgcagctctgcggtgagccgggaccacaccggtgcgggcccggacggtagcggtctgtcaggacccagggccgaggtcgctctaggcctggagggtgaagatcttccgaggagtgggcagggagggctttggagggttgggggcgtgaaactcggccctgcctccctcgtctggcgagtgcgcagcccggaagtgcgcggccagtgcatcgggcggtgcgggagaggagaggaggggctccgggaacctcggccagccccggcctccggcggctcctgccctcgcggtttttccgtctgcgaaatgggcgcggtccccagaacctgccgagagcagcgagtgtgcgcctgcggggctcggcagaccgcctcagcttcccggtccccaagggagcactgagccctcctccgccttcacaccaggccggcgcgtgtccctggcgcccccttccctaaacccctcgcggctccctcaggacaaccccacccaccacattcagggccggcctgacctggtcctgccgcccccagccccttcttacttctcataccgggttgcgctctgtcgcagctcttcccggcccaggtaggactcctccgggaagccttcctgattccaaggccgagaagaggtctgtgctgccccatcctcctccatgccccagttgtcactgtccttaacaacgctgtcctctgctccagcgccaggcaaactgggggcagtgccgggaggctatctaggcaggcgtcctgcagggcgcgtttgagcgggctctgcaggtatcagtagaagtccgttggagagcgcccgggcagggcgcccacagtctggccgggagggaccagggtctgggtccgggcccccggggatggggttcctatgcgtcccgggtgatccgcgcggaccttccgcacttctctgggtgggtggccttccctgagaagggagcatcccggagagcatcccgggcactcagtcgcctcctccccagcactgacccaggcggtctccaaactctgggtccccaacacggacttcgacgtcgcagccaactggagccagaaccggaccccgtgcgccggcggcgccgttgagttcccggcggacaaggtgcctgggagcgccggcggggtcggtgatgg

SEQ ID NO: 6457 - DNA, 6000 bp, Homo sapiens; identical to SEQ ID NO: 677

SEQ ID NO: 6458 - DNA, 6000 bp, Homo sapiens
attctcatgcctcagcctcccgagtagctgggattacaggcacatgccaccatgcccagctaatttttgtagtttttagagacagccaagactctgtttcttaaaaaaaaaaaaaaaccaaaacccccccccaaaaacaaaacaaaacaaacaacaacaacaacaaaaaccgggcgcagtggctcacgcctgtaatctccacactttgggaggccaaggcgggcggatcacgaggtcaggagattgagaccatcctggccagtatggtgaaaccgcgtctctactaaaaatacgaaaattagctgggcttggtggcgcgtgcctgtaatcccagctactggggacgctgaggcaggagaatcccttgaaccagggcgtcggaggttgcagtgagccgggatggtgccattgcactccagccgggcgacagagcgagactgcatctaaaaaaaaaaaaaaaagctgggtacccacctgtaggcacccaccaccaagtcccagttacttgggaggctgaagctggaggattgctttagcccagaaggtcaagggtgtagtgagctcatgttttgtctaatatgtttatccaaatagcctccttctgttctgtaagtttgtatttatacagttactttttttttttttttgagacagagtctcgctctgtcacccaggctggagtgcggtggtgcgatctcggctcactgcaagctccgcctcccgggtttacgccattctcctccctcagcctcccgagtagctgggactacaggcgcctgccaccacgcccggctaatttttttttgtatttttagtagagactgggtttcaccgtgttagccaggatggtcttgatctcctgacctcatgatccgcccgccttggcgtcccgaagtgctgggattacaggcgtgagccgccgcgcccggcccctacagttacttttgtacaagtgctttgctctgggaaattaggtgccttgtaattgttgtgattgataatgacattggagaaggaacataagacgaaggaagctgactctgggtaggcaattctacttcattttgcaatctcttttcctttttgcatgcctgtgagaacattctaagattgaagaagttgtggagagaagagtgaactgtttgggaattctttcattatctccctttttaggacagtacaaagaacaaatcactgtcacctcatgcaagaaatgtgagaactgtggctacaaattactcaatacactactttgcatattatttccttactatttacataatttattgcgacatattctgcttcttttcccagagctgtcaaatctctgctatatcagtactggctaaattaggtgttaaatgattgagcttcaagatgggcaaatcatgacttcggactacattcctccttgcctggcggctgggaaattccgtaagctctgtgtgtttctatcagactgctcttgaaggcggtggctctctgtggatctccgcagagcgccaacgttggcttaaaaaaccccaaagctagattatccaaaaggtatataaaaggtagttatattatttacaagccatcttttagccttaaaacgtgatgaagcatttccagttgccttttcttgaactaattcagcaactcccttttttgttaggtccgcgctgctgctaagacttcagatgaaagacgctccggggactccggtatcctgggccccctcggcccggacatttttgattaagcgctgcctcctggcggcggctttgctgcccgacgccttcccagcttagtggagcccactttctttggtttggaatctggaagctgatgcaacagctaccccgagggggcggggagtcgggaacccggggtggaagagacggccttcgggagacccctcctccggctccgaggaggcacattcctcgccccgcctcccgcccccgcccccccaacaaggggcttcccgtctgggggcactaccgagattcagccaagcatctcggggccggaggcagttgtggtcaggggttggggcgctcgcccagactcctgtctggccgccagcttatgcagggttgggagggagggaagaggaagctgagcgttcatggggtggaggaccagtctctaagggtatccgcggtcattttcatttccccgcagtaatccagctgtgcgggagcgaggagcggacagggagcggtttgcgaggtctcggtgcttggacctttgcgcgcccttcgcctacacccaccacaactccctcttctagcgcttcctagagtcgggggaagggcgggggctgcttggccaggtggagggaacgcaagggacgcctgttggggtgaggtcctggtcccccacagccagacctgggcctcggggccaccctgttcttcagaggggtaatgaaggcggacggtggctgggtccgagcttgggaaggcgttgtcctagggccgcagactgggggcccaaaggaaggagggaaataaaagggagacaaacgacagggaggggcccggagaaagcgagggtggtgggggggtggggatgggagaaagggacaaaggtgagtgaggccagcaggttgggcgggggcggagagggggatgggaacgaccaaggggtaggccagcaaggatcgcgggccaggggagagcttttcaggggtagagcagcgggccggcgcatggtggggagttgagtgtatgcttcgaagtccgctgtagagcccacttgcatatgtgtgaacctgagcgttcgcctcccctcggccttttcctcccctgcccttcaccctttcgcggccatagcacttagctctcgccatctccacgccgcacccagaccggtcacctgagcttgggtgtgaggtagagcagacaagaatttcctggatccagggaaagagtgttagatgataggctttttgttttgctttgcttttcccattaatgaaacaaaagtccgtttcaaatcattctaggcctcccagtaaaactgtgaaagccatactttcttctttgcctttaacgcattactgtcaaaaagagtacctccgggtactccttgcttaggagccagagcggcagccaaacaggagggcctggagagcaaattcaaggacatgcgcaggagcctagccacctgggaaatcaaatagataacatagttcattcattcatttattaacccagcaaacatttattaactgtctatgtgagccctgcactgcggggatacagtagtgaacaaagctcttgtgacgcttacattctagtgggagtgctgacagcaaacaaatgacaccgggaatggacaatatcactgggaagcatgttccaggcagggagaacaggagttgcaaaagctgtgaggcgggagcatgcttgctgtgcggccaccgcagggaagccagtgaagctggagtggagtggggaagacagcagggaggcccatgcagacaaggacagcttctctctttctaggacctcccttacgacttggacccgactccagagtgcaattaaggggccggcaagttgggtagcaggctgagagtgtctaaaggacactaaaatatctttggaataattcaggtatttggtgccagtgtactatgatttctgtgtcttggtgaaatatgagttggctttcatccagtgacatagacttattgacaactccttacctggactgcttgtgtctggagtaattttccaacagacaggtgcaaattgcaggatgtagccctggggccagccagctgacagttgcttaaaggcgttagtcacagttgtaattccaaaaattcctgatgcattgtgaatgctgctccctgagggcaagagatttatactattatccacattttaagtggtttactatgcttaccaagaagttgtttgcttcagaagattgcatgtgatgaagatatgtaataatttttttcttttttttttttggactggagtgctcactgcaacctccgcctcccgggttcaagcgattctcctgcctcagcctcccaagtagctgggattacaggcgcccgccaccacgcctgctaatttttgtaaatttagtagagacggggtttcactatgttggccagactggtctcgaactcctgaccttgtgatctgcccgactcggcctcccaaagtgctgggattacaggcgtgagccaccgtgcccggctgatgtgtaataatttctaattttaaatataaagaggcttacacaatttgtattccaggaaaattgatatttcccccacctctgctaagtaaacgttcgacggatgtttaaataaaactggttcgaagggatgccaactcattagtctgcccagggtgccatggcccagttggctcttacctggcgacatatatcgatatcacctgaaccaattagagatctcagctgtgagtgagcttgcttggtgtttaaatgtgtgcttggctgtccccctataagtggtcttccttggcttgcattacctccccttggcttgctttaggggctgaaatggcactgacactcttgagatgggactgcagagtttccttcccctaaccatgggatcgtatcccctctgcagaactaaggatagtacatgagtgggagatgagtaggaaatgggatgagtggagttgcaagaggcatcagaggtcactgtcaatggaggggaaagcttaagtgctcagtaaatgtagggcaacaaggaaggggggggtgaggctgaggtagggaggagaaggagctgagactcaggtatttggtgccagtgtagtagagaaggtgcctggaggcgggcaggcactgaggtcctctgggtctgaccaggcagtcccagctccagcccgtcccctggcccctccccgctgccggccagagtcacacatgtgttttcctgttttccatttcagtccccgttaccctctgctttttctgctcctcagagtcaacagctgttgcagcatgagcgatacgcttggttctcctaactagcaccttcccctctcccctgactcagctggtagcccctcctccccgcacctgcccaaaggtcactggacaggtaagaggtgggagaggagggacaatgggcgagaggggaagtgcaggaggaggatggagtcctaaaaattggctgaatggagacccaagagcctcctgtttcttgatcccagccctgtccctccctgggctgaaccttctgcccagagacttcagcccttccttaatggaagccctggccacaggagtaaacaatttcttttttgtttcactttttttttttttttttaaagagactgtcttagccacagtggaatatagaaaaacaaacagagaactggggagggaggagctgagcttctagcttggagtgatggggaaatctagtcataccagagtgtatctgttttctgtttctgttgttaggggaggcagcacagactgattggagccaggaaggcaggacatggggtctctgggagagaaagtgtgttcttatagtagttccctgagcttggctgaggagccaagaccccgaattatgtactagttcctggagaaattgtgttttggtgttgtcattcgagggtgaggttagggtgaggggctccattggctgtcctgcccagcactgcatactggaggccctgctgccagtttctgaatcaaatttcttccacaagctgtaggatgagtgtgttgtcctgtaatcttcactgggtgttcagagatgaatgcatctcagacagggaaaggcaacaagggctgctgttatcttatggggtttctcatgtaaaacctggggtgggtcaggcacggtggctcacacctttaatcccagcactttgggaggctgaggtgggaggatcacgaggtcaggagttcgagaccagcctggacaacatggtgaaaccccatctctactaaaaatacaaaaattagctgggcgcggtggcgggcacctgtaat

SEQ ID NO: 6459 - DNA, 6000 bp, Homo sapiens
ttagaacttgattttaggccgtgcgtggtggctcacgcctctaatgccagcactttgggaggccgagtcgggtggatcacctcaggtcaggagttgcagaccagtctggccaacatggaaaccctgtctctactaaaaataacaaaaattagccgggtgcagtggcaagcgcccgtaatcccagctacttgggaggctgaggaggagaattgcttgaacccgggaggcggaggttgcagtgagcagagaccgtgccattgcactccagcctgggcaacaagaacaaaactctgtctcagacaattaaaaaaaaaaaaagaacttgattgtatttagctgagaaatcgtgttttataaattcatttccctgctttttaagagtttttgcatctttaacttagtttcttagtaatgggccttttgggaattttaggcttatgctactcaaaaaagagatttgttcacatctacgctgacggtagggagctagggaaataccaagggccaggcatggatggtgccagtacctgtcaatgtgtgtaaaagttgaaacttggtggctaggcatggtggctcatgcctgtaatcccagcactttgggaggctgaggtgggcggatcatctaagcctccatctaagccaggagtttgataccatcctggccaacatggtgaaaccccatctctactaaaaatacaaaacttagtggggcatggtggcagacacctgtaatcccagctactagggaggctgaggcaggagaatcacttgaacctgcgagtcggagaccacagtgagccaagatagcaccactgcactccagcctgggcgacagagtgagactgtctcaaaaaaaaaaaaaaaaaaaaactggcggggcgcggtggctcacgcctgtaatcccagcactttgggagcctgaggcgggcggatcacgaggtcaggagatcaagaccatcctggctaacaacggtgaagccccgtctctactgaaaatacaaaaaaattagccgggcgtggtcgcgggcgcctgtggtcccagctgctcagcaggctgaggcaggagaatggtgtgaacccgggaggtggagcttgcagtgagccgagatcgtgccactgcactcccagcctgggcgacggagcgagactccgtctcagaaaaaaaaaaaaaaaggctgaaactaggagggagagaggtgctctaagaaagacaggatgcagttgttgagcccccaaccccttcctgtttaactgaaaagctgaccctgagctaggaggcagggtccaggcacaaatggaggctgtgaccaggactgagctgcctattctctgcctttcctacctggctacagatcgttcagaaagaggcagagcgggccgaacgggccaaggagcgggagaagcggcgaaaggagcaagaagaagaagagcaaaaggagcgggagaaggaagccgagcgggaacggaaccgacagctggagcgagagaaacgtcgggagcacagtcgggagagggacagggagagagagagagaaagggagcgggacaggggggaccgagatcgggatagggaaagggaccgagaacgaggcagggaaagggatcgcagggacaccaagcgccacagcagaagccggagtcggagcacacctgtgcgggaccggggtgggcgccgctagctgggaaaacactagagctgcaggtaccagccactcggccccagggggttatggccacagagggataggcacagtctccaccaccctggagccaagggtctttcacatcacctatccctacatacataccaaatggaaaagtggccatccttttccccccaaacacacccccttaacctatctcttgggacttagcccgaccctccctctcatttcccattaagtctgagaggcaagagctaggttaggcaaggaggtggttggccagagatggggaacagccaggtgccccagtcctctgatttttcctccatcctgcttaccacctccctgggtacttacagccttctcttgggaacagccggggccaggactgggtcacctatgagctgaatcagcatctcctcctgagtcccagggcccctgcagttcccagtctcttctgtcctgcagcccttgcctctttcccacaggttccactttatatccaccttttccttttgttcaatttttatttttattttttttattattaaatgatgtggtctatggaaaaaaaaataaaaatctgacttagttttaaactgtgtgagtggctttctttgggcaggttaagaagccactgtggatatctgagcgtggacatctgaggatatctggagtaggagttgctctcattccatgtgttcctttaggctgactgcttcctgcttattgaacttcccacgtcttttatcccctgccttggccctgaccaacccaaagctgtggaccttcctcattcgggaaggcatggagcaacctgtgtccgtggcggcaccccagcagggctaggagggtgggtcctcttctggttcctggtcctgtgcacggttaaattaggggtttggtcacctgcctgccaccttggtgcctcccacaactaccaccagggggcggcagctcctcgctctgttggcccctgtaaccgagcttcccaagaagggttccactgcccgcctccgacctcccgccgatgtcgtgcctctgttcccgacccgctccctgggcccgggcctcggactctctggacccttctgccgtccttaagtgtcccccagctgacctgctaccgtgctttgcatgggctctcaaaacgccgccgccttgcagctgggattccatccacaccagtcccaaaagccagccgggaaccgggagcccggagccgggtctctccgcagtgggctccgaattccccacctcaccgcgcgctcgcccgttttccgctgcgggcggggactggcagcttcgcgctcccgggtgcacccgccccgccagctcttcggaaatggcctggcgccgtggcctggacgtcctcccgcccgagtgccctgccgggcgctgcgggcccggtccgggaggggcgccgcatctgtatgcgccccgcagcccaggagcgccgagggggcggacgcgcggcgccgcctccgcccccgcccccgccgcgcgggcccggctggccggggagggtcggaggctgggctctcctctcccgcgcggcgcggagccgcctcgctcctccgcaggcggagtcttcttcccccgccccctccgtctcgctcccttgttctcgccggggccgctcagacctgcagcggagccgcggcgcccgctccaatcggctcggggctgtgcccccgggacccggcgacgggggcgggcgggggcgcttcccgccggcctgggcccctcggcagtgccaggtaagggcgcctgccccggagcaggggtcgggaatccgcggaggggtaggagggggcccgcagcctgcgggggtcttcggaggggtgcgctccgtggctgggagcccgctgccggctcccttctcccgcgctctgcctctttcccttctcccctcgcacctctctccctctttcttctctcgatttctcttcacccttccttctctgcctgtttgccttccttatcccttccctctgtctccccaacccttccctctccctcttgtcctttttccatctcctctccctctttgcctttttctttctctacctttctcccctttcctgcctttctcttttctctttcttgctctcctttccctccctctcctctccccttcctgctatcctgtttcccactcctctatccccttccttctcgcctcctcatcccgccttctctctggtccccagccttcctccggtttcccccttccctcgggagcaaagggactgtcaggtgtgtgtctgctctgagggaggaggggcagaagccacagctacctgaggggtcctcccccccgcccctaggagaaaggagagcagtgggaagggtctcctctctagctcccttcccgtggcccctccctgcctccacccctcctgtctgctccttctcccagaattaagttcccgaggcctggcttgacacccccgaagctgaggtctgcccctgcctgcccggaactgcccccggtgacccgtttccaagcctggcccctaggactcctctctgccttcagacacccaggctgctgccctggtctctctcattctgtctcttgccactgttctgtttctgtctctcatccagtcatttctctgccggacagtccctgagtcagtctagccgtcagtcattatctgtctctagcctctgggtggacctctctccccggtcacctccccctgtcccccaccctgtatcctcttccttcagctctggctcccaactcctgtctcacgagcccagtcccccttcaaggactgcactggcagcgtgggctggagacagggcctggagagtggggctcccccttgtggggagggactttcacagactctcagccctgcctgaggctgcactccttgtcatctcatgctgaccctagacaccttaaggccacacctccatgaatcccaactccgtaattttaagccctttctctggtagccccgcctcctccaatacctggctacgtgcccaacctgggaggacagagaccagatttgggattccaagccctcccagcatcccctctcctgtgttcctccccagttctctactcagagttgactgaccagagatttatcagcttggagggctggaggtgaatacatgcagagcctgggtggaggaaggatcagcctctctgctctctgtcttagtctgagttctgggcagtggagtgtctggttccttggaggtctggtcttcagcatctaattttgcgggggaggagggctaggggtttccttgagcctgagcagctgcttgtcctgcaggtgtggatccatggggtagcctcaacgcatctgcccctccaccccagccagctcatgggccacgtggcctggcccagcctcagcacccagggccagtgaacagagccctggctggagtccaaacatgtggggcctggtgaggctcctgctggcctggctgggtggctggggctgcatggggcgtctggcagccccagcccgggcctgggcagggtcccgggaacacccagggcctgctctgctgcggactcgaaggagctgggtctggaaccagttctttgtcattgaggaatatgctggtccagagcctgttctcattggcaaggtaaggatgacccctcccatgtctactctgacaccaagccctcaggccctgccctgcaacttcatcacttctgcaatgaccttggtccctcaggactcccaacgctctacccaaacctagactctttaaccctgtctctgtacttggagccctctgccatcttttcgtgacccctgcagctgcactcggatgttgaccggggagagggccgcaccaagtacctgttgaccggggagggggcaggcaccgtatttgtgattgatgaggccacaggcaatattcatgttaccaagagccttgaccgggaggaaaaggcgcaatatgtgctactggcccaagccgtggaccgagcctccaaccggcccctggagcccccatcagagttcatcatcaaagtgcaagacatcaacgacaatccacccatttttccccttgggccctaccatgccaccgtgcccgagatgtccaatgtcggtgagcaccccagctctgaatgccccagttcccgtcttctggagctctctcacctctccttcccttcttgttgtctgccccagaacctgcccccttcaattcagcctccctcgtatctgcatccccccccatcggttgttcttccccatccttccctgctgctgctgaatggcgtgctggcatcccccacagggacatcagtgatccaggtgactgctcacgatgctgatga

SEQ ID NO: 6460 - DNA, 6000 bp, Homo sapiens
caatggacagtttgactaacatctcatttttcatttttatgatgcattaagatgaaaattattctgtaagcagattttttttggaaaagagaaagaaactaaaaaaatccatcagctaattaccatactgaactcctacactaaggggagataaggtatgatttatagagtcttagaaaagattagtctagtgaagagaatcgtatgcaaaaacacatcattacaatacaatgtgatggggaaaaaatgtgggcaacacagagaacggggcttcaaagttgggaagacagtgcttggaaaggctcccagcttgagctaaatgttgaaaggtaagtagattttatccaaggaacagggaatcactgaaagattttgagcagaggagtcacatgattaggttcacatttgggaaagaaaagactgaaacttgaagcagagagacaagcaggctaggcatttgtccaggccagagagatggtagcctgaactaagaatgaagtaacaaggatggagagatgacaaaaacaagaaagatttaggagtagaatcagctggacatattgattaattgactactaagggaaggaatcaagtttgtccccaaatcaaaatgaaatacgtttcaacttaaatgttcccagcattgatgacaagcagttagaatgtgttctatgtcggccgggcgcggtggcttacgcctgtaatcccagcactttgggaggctgaggcgggtggatcacgaggtcaggagttcgagaccagcctgcccaatatggtgaaaccccgtcgctactaaaaatacaaaaattagctgggcgtggtggcgggggcctgtagtcccagctgctcaggaggctgaggtaggagaatcacttgaacccaggaggcggaggttgcagtgagccgagattgcgccactgcactccagcctgggcgacagagctagactccatgtctgccttccatgtcctccctagagccccgaggggtgctgagcaggtctctggttagaaccttccccagggtggtgctcccaggatcctgctcaaaattttgcctgctctagagcagtataacttagaaagggattgggactcttgggaaatgttatataaatgcaacactttattcactcaacaaacacttatcagtgcccatgatgggctagttactgttcttggcacgggggagacaacaataaaccgaaagactctcattctcatgtgaagcagcagcagcagatttagccttctttcttaacacatattatactacacccacctgtgtgtcctctattgatgccgcgggtaatacacaatcagtcatacgttattaaatatttgagtgtctgttctgctccaggcactgtggcaggcatggggatacttagtttttgtaccaaggaacccacagtccagtggatgttcctgacaagtatacagggaatttcagttcaaactggagttccagttccccaggaggccagcatccaggcagctcctgcaagaaaagtgaggatgggactggggttgaagaagctcttggagaaagtgacatgtaaattgagactgaaagaccagttggacatagtcaggcaatattcagcacggagggagggtggagtagaatggggtggggagaatgttctagcagaaggaattaacatgtgtcaaggtctgaggacaggaaaaatcacagttgtttgtgggaactacaggttgttcagtatagccacaccatagactaggaggcaagaaatatataatagaagcaaggaccccatcatgaaaagcctcatgggccataaagagattgggctttcccttaggaggaatgaggtttgaagggtttcagacagaagaccgacatgatcatatctgtattttaggagagtcatgctgcaaagctaaaggatggattggtgaggggaataagatcagaggcaagaaaagatgattacaattcagttgtaaggattcagattgcagatgactatcatgtgcatcttggggcagtgggagtagagaaaagtagatgcatttggcatttaggaggtagaattggtaggccttggtgattaaggttgaaggagtcaaggactgcatggtcttgttggggatacaggtgaagtaaatcaaggacaacactgggtcgtattgtctgtacgtattgttgtatcatctgaattggtgtggttcagactggtcaagttgacccctctgtccttgtcaccctttctactcactcttcaacacttaagacttgctgggacttgagaaagcatcccctgtgcttttggactcttatgtctacaatggcagagtaagtaagttacctgagaagtcagccttcttcttcgtttcaatgtgcttcaactgctggcccagatcacctcctctttcctgattcccatagtgtctcttctgctcttcagcttctactctcagacagaagttctgctgttcagagagtgtgtgtgcccacaccctggaaatggaggaatgaggggcttgttctgggaatatgtctacttctgattggaagaacagtgaatgagattgaggtttcctgaaacaggaaactgttttggagttcagcttccaccaggtgtggtagagatttgcctactttcttgtaccagcctagaaacttaaattctctggccttttgttgctgactgtcaaggatcactttgtttttctcagaggagccagggcccatggtttaaataaagtcacccattaattgtgtctggtaaacttttaagggttaatgtgacacaccaaatttatatcacatacctaagaacataaaatcagaaggcttatgggagtgaggcccagtggtacttggagctttgggggaaagaaaaaagggcatctctgttataagagttcagcaagttgtgctcactttagcggcacatatactaaaattggagcagtacagagaagattagcatggccccatgtacagatgacatgcaaattcacaaagtgttccttattaaaaagagaaaaatatccgggcgcagtggctcattcctgtaatcccagcactttgggaggccgaggagggcggatcacctgaggtcgggagttcaagaccagcctggccaatgtggagaaaccctgtctctactaaaaatacaaaattagccgggcgtggtgacatatgcctgtaatcccagctactcgggaggctgaggcaggagaatcgcttgaacccgggaggcagaggttgcggtgagccgagatcgtgccattgcactccagcctgggcaacaagagcgaaactccatctcaaaaaaaaaaaagaaaagaaaagaaaaaagagttcagcaagtttaagtacaagctacccttggaattgggttataactgaaccgttttgggggaattttgcagcctgggtccaggtttatagaatttagtgaacaccaacagagcctacaagccttctggtccaagaaccaactaaacctcacaggatccacaccctgtcttccaagactgaaatatgatggagggtcaggctagccctcctgggctcagtgcagactcaacagaacccattctcatccaccttgctccatgtctcgggggacatcagccctgagaattggtgtgtgagatagcaatttttcaggcccaggctgaaaaagtaatgagtaggattaaaatagggttccccagggtggcatggcaggccaccctggatttcttggtgtccagtttttcgcttctccccgatccaggccagctgaggagccatgtttagctcatgctgaagagagaactactcagctcttggaaaatgctgagctgggtattcctgcctcttggctgagctaaatactgggtggtgattcagcagaaaccccagctccagcagctggcgcaggagctaacaggataagaaggaaggggaagagagagccaggaagggaggaggggaggggatggggcagtatgggcaggagcttagctggaagtgtttggtaaaagctgtgtgcctccaggagcactcacagccctcacagcttctctgcaccctcctcctctgctggtgtgtccttggaagagagaggcccttccggaaggctcagagcacctcctctcctttggagggggttccgagatttctaaaacgttgtaagtgcttcgagatgaaaagggctggagaaggggaaatgttactatcgtgcgataggcaagatctgtttcaaaaccacactccccactgtgcactttatagaagctgggatcaaagcgcagtttatgaggaagggctgctttgatttttttttttttttttttttgtctgttgtgtggctttttgtgggttttttttttttaacgtttttctctttcaccagtcaagttatatgtataactttatcagacaagttatgttacatgtacaataatccaggtgcggaaggactttataatgtgggcccctcacccgctctaaaaaatgtcttgaggtgggggtgggcggggaatagagaaggattctaggagggttctgtgaagctggatccgtgtctgcccactcccccacacctccaggcctctctgggtctttgacgaggaaagactgttccgtgtggcctgcgtgggcagaactggaaccttatcagagccttgggttgtgtgcgttagaggtcaaacaggcctccgtgttttctttgcctatcagcgccttttggcagccggcactgcttacctcctagatctggaaacgcctgcggttggacaggccaagccgaagcggcttttccacaattagaaacacgtgctcagttccttccacaagcgggggaggcggccaaggaactcggtgcagccaatcacagagccgagcgtagccacacccacgcccccacaggcccggcttccctgcccagcggctccaacctccagcctgggcacccagacccagagggctgctgggagggacatgcctcaccccttttgctccagctggaggggagggagtctgtgggagctggccagagcgtggcagaaggcagagaagtgaacgccccagcaaaaggtgaggctgagaagccaacccttctggcaggccatgacccaggtgaaatttatggcgtttcagagggctggggagctccatccagaaaggtgcctgttttgcaggtttggagaggaacagggcgttctgatttctacaaagtggcgtcactgcttcctttttcagcaaccgtctgcttagtacattccatcttgctgttttcagtcctggcctctctctgttctgctcctctcaagccctttttctctcccactcatctgcattgtcctccccttgctctctcccgccctgtggtttcttgtgctctttccctctcttcttcaccatctgtctttatggactttggcaagtctggacatttttccccctttctactgcctgttttcacttatctgaacagacaaggaggagtggcctggttctggaaatgttaaaggaaaaccaagcctttccaagccagtccagtccactcctgagaaaggtgcaagccagcgagaccgagaaatccaaatggagttccgggagtttggagggaacatgtgactgtgacattgattaagggggctggtgggaggggacccaaggtggagatccctgtgggaaatgactttctaaagccctgggagcaatggatgcacctttcttggtttctgaggcataactgtgaaagtcttccccttttgccatattggcatcttccttcctgctgcacagaaagcagtccaggctggggctaaccagtgtcttggtgacagacccagagtcccaagtggcactggcagtagtgaccatgggtaccactgacccaagcaggaggagagatgatgtgggagcggccaagggaaagcagagtgatctgtgtataatgaaggaaggcggggcagaggcagaacaagcaactgggaattgggctgtcccagtctggtctttgctgcgaat

SEQ ID NO: 6461 - DNA, 6000 bp, Homo sapiens
caggccctgcaattcactaccctgctcactagcctggctccatgaaggtcctttggcacagctctgctcctcccctgcctgccaaagcccccctttaggccttgggtggctggaaggctttgttaagggactaggagaaatgggggtatctttcccctttcctgccctttctgctcatctcaacctctcacagaggtgtcttctccccctaacctacagctttttgtacaagccattttgtgtaaattatttatatttaatattattccctgctttgtcaggagcaggtactaggctctggggcagtgaggaactagatccttctctcctcagcctagggtggaggtcactgcactaccacccacctctggaagactggctgtgaaaagtcaggtggcagaaacctggggccacatagagcctctctcttttcctgtttcttggctctagaagatcagcactgcactgttagctgagagtgcgggcaagacataaactgtccagagtttgaaggttctcggaaagaccggagggcttctccccacagaaggcggagagagctggggctcagacatgggtgtgcaccttaataaaccctgctgtctgcctccctgactctgcttcttgggagcatggtgagcagccctggtgctcagcagccatacctatgggacacacactacgaaaaggatgcctttagggtttgggggagattttactcctttcttcaacaactattcactggacaagttctctgctcccatgacgcgccaggcacagttctgcaagtatattgtgaatgtattgttctagtgggatacacaaataagtcagttaaaatacataaataaaaacataaacctgccatagattcgacatttgctggtgatggacgtcggcaggatgatttgaagaaactaactagatgaggggagagggcagtgaaggagactttagacaggatggttgggaggtgagatctgaactgaaacccagaggaggagagtctgaggactagtgttcccagaaggcagatgccgatgactgacctgagggccttcctccaagacttcattgtcatatgatgtcattagagaggtgtcaatgtggagagaagctgaccacataagggccttgaaatgtgccatcctggagaggccaccccaactaaaggcccagcctcagctttgcaccacaggatagccctggccaactggagactgctgctggccagtctaggcaccctcttccttaggtgacaccaagagggtataggccttttcacttggcttcccaggtagatcatctcaggatgacctgctcatcatccttctggacaaaccattttctggaggatccgcggttgcagatgaatgcaatgtgttgaaaggtcagtcttcaggactttggtgaaattgataagaccgtggcttagatagatcacgctagccatttaccacaagggaaaacatccaagctacaaatcaattgcttcagttctgctttcccaagatattaccatggcatgatgactggattgggggcataatcatagtctgttggcacccctgcacatttgcctcctcccctttaggttcctttctcatctcactctcaaagaaaaatgcactgtcagattctggggccaacaaaattcacccccatgtgttgaagtctatcgtccatcatcttccaaacagaatttcaagagattagcctggaattagaggtttcaattcaagtctctgatctgccatgtagttgtgcatccatgggtaaatcatgccagtccctctgaagtcctggtttcatcttcaatattagcatgatcataatggtcttacagggttattgtgaggacctaacaagaaaatgcatgtgaacagccccacaatgtataaattaagtgattattattccaggacagacacaaggatgcagacgataaatccccaaggaatattggctatacagcaccatagtaaaacctgaagagatgctgaaatgagttgggagaggggaagtggtaggaggctgcttgatgcattagcaaagaaatgtttcggagggatgcagtgactcgcacctgtaatcccagcacttcgggaggctgaggccggagtacggcttgaactcaggagtatgaggccagcctgggccacacagtgagaccctgtctcaacaaaacatcaaaaaattagccaagtgtggtggcacatgcatgtagtcccagctattcaggaggctgaggtaggaggattgcttgagctggggaggtggagactgcagtgagctgtgatcaagccactgcactccatcctgggtaagacagtgagaccctgtctgaagaaaagagtttcccatacgtggaaaatttctgaacagagacaagttaaaagtgtggttcagtggagagaagggggaaagatttcccggctgacaatgatagaacactgctttctagcccttacctaggattagagaataaagtacctatcaggtaacaaatctcttagagatgtgtgtctctacctttaatgtataatacctatgcctggagatctggataaaatacagattatgattcaagggtctgggtgaggcttggattctgcatttctaacaagctcccaggaatgctgctggtccatgaaccacactttgagtagcaattctagaggttagggaagactcctgtgtagcaaagatgtttaggctgagagctgaaggatgagaaaaatgtgactaagaagctttttaggtgcaggaaccagcttgttcaaaggcctcgtggcgctgggaaaactagaagaaggtctgtggctggagtgcagagagtttggggaaagaagtgagatggaactacagacagcatgtgaccaggcatgtagaaccatgtatgaggtatctagatttttaatattcactttgacagtgaggagacaccactgaaggctggttagcaggaaagatacatgatcagatctgtattttgaaaagatcattctatctgactataaatgacatatgggtgataaggaggtataaacaaagcggacgctgaacaccagttaggaattagggagctaaagtggtctttgcaacaggtagcttgactaataatggtagagatggagagatgtgggatgtctgagaatatataggaagtaaaatgggcagaattttgtaaagaattcaacatggataaggaagagaaagctctaaaggctgttgcctgagcatttggccacaatgcgatgttgagggtgccattcgctgcagaaaaaagcagtggaagccaaccaagttatgggggaaaagcaaaaatttcgtcttgaacatattgagtttgaggtccctgtgagtcatccaaggtgaaggtcaaataagaggtggcttcataggtctggagctcagaacagaggtggaagctggagatgtcagtctgggcgtcaggtttgtattgtttgtatgggtggtgattgaagctgtgggcataggtaagatcccaaagtggagacagtgtgagatgagaggagggcctaggactaagtctgtgaggattccagacactgaaccatggtgtctaaatgatacagacgggaatggccctagaagccagcaccacagcctcatcactaccaatacagacccctcctgcagttgcgtcaccccgctggacttcaatcattgcctcaagaaccgggaggataatggcctgcccatgctcagcaccaatgccatgagctggaagacgatttctgcaatggagaaaaggggagcaagagagactcagcagcaaaggaagagagtgtttagaggaagaggggtcaacagtgccaaatgctgttgagaaatggagattcaaacaggatgggagtgatgaaacccaagaaagtggtctccttgtagaggactgaagctagggctgatacagggccaagacagtcttccatatgcataagttgtactgtaatagccagtttacatgtctgtctccctggagtaaaggtctccaaagtggaacttgtccaccctgttatccttaaagtctagtgcaagtcctggaacgtagtggacacttaaattttactgattagtgaatgggtgaatgaatgaatgaatgaatgatggcaaatgattggaagcagaggaagaatctctggcatctgcctggactagctactatccttcagctttttttcttttttaccgcaatggcccgcagacccaggaaagagacgacagagccccccttccctccctcccctgggccctggccccccttcctctctctgacgaagagtctggaccgaaggttctgctgacgtgggaaggggaggagagtctagaggaaggggaggggaaagcagcgcagagatcgcagagaccaaggaggcgcccgcggctgcagagctgcagagcgggatctcttcgagctgtctgtgtccgggcagccggcgcgcaactgagccagaggacagcgcatcctttcggcgcgggccggcagggcccctgcggtcggcaagctggctccccgggtggccaccgggacccccgagcccaatggcgggggcggcggcaaaatcgacaacactgtagagatcacccccacctccaacggagtaagtgcccgagccccaggtggcgacgccatcctctcccagcacccccgcccccgcggagcgtctggcattttcctcctgcgcatccctcgcccctgactgccttcctagccctccctcccacctgccccctgcccttgctctgcggtttcctccgcttcacccttctcctgccaccccctgccccccaacagcaggtcgggaccctcggagatgcggtgcccacggagcagctgcagggtgagcgggagcgcgagcgggagggggagggagacgcgggcggcgacggactgggcagcagcctgtcgctggccgtgcccccaggccccctcagctttgaggcgctgctcgcccaggtgggggcgctgggcggcggccagcagctgcagctcggcctctgctgcctgccggtgctcttcgtggctctgggcatggcctcggaccccatcttcacgctggcgcccccgctgcattgccactacggggccttcccccctaatgcctctggctgggagcagcctcccaatgccagcggcgtcagcgtcgccagcgctgccctagcagccagcgccgccagccgtgtcgccaccagtaccgacccctcgtgcagcggcttcgccccgccggacttcaaccattgcctcaaggattgggactataatggccttcctgtgctcaccaccaacgccatcggccaggtgaggcggccaggcgggccgcgggtctgggggcgggcagagagcggcgagggcggggcctcacgcccgctgcacccttctcacatccccagtgggatctggtgtgtgacctgggctggcaggtgatcctggagcagatcctcttcatcttgggctttgcctccggctacctgttcctgggttaccccgcagacaggtgagggctgtcgtgggggcagggctggtagaaaggagggggtgctagggaagctaacccaagcagcgggcgtttacaggaggtcgaagacgattcgctggactctgcagtcttctctggacttctattcaatggtctatccatgtctcaacttcactctccatcaagaaataccccttccctacctcttccgcgcaagggaatgactcgacctctatggactattagtcccattcccactaattagtggccccctatccgtgaatcaatggcctcatctccaaagagaatagtctcatccccactaacagcccacatggactgttcgctccatctcagtgacctcattcctgaagatcaatatgttaattcctaaacaccaacagctccattcccactgatcaatagttcaacttcacaaacaaattaccccatttctgaccagcgacccctcccctacaagtcaactaactatctccaa

SEQ ID NO: 6462 - DNA, 6000 bp, Homo sapiens
caatctcggctcactgcaagctccgcctcccaggttcacaccattctcctgcctcagcctcccgagtagctgggactacaggcgcctgccaccaagcccggctaattttttgtatttttagtagagacggcgatgagtgttacagttcttaaaggcggcgcgtccagagtttgttccttctgatgttcggatgtgttcggagtctcttccttctggttggttcgtggtctcgctggcttcagaaatgaagctgcagaccttcacggtgactgttacagctcataaaggcagtgtggacccaaacagccaacagcagcaggatttattgcaaagagcgaaagaacaaagcttccaccctctggaaggggaccctacccgattgccacggcaggctggggcagcctgcttttaatctcttatctggcctcacccacatcctgctgattggtccattttacagagagccgactggtctgttttacagagagctgattagtcctttttgacagggagctgactggtgcatttacaatccctgagctagacacaaaagttctccaagtcctcactagattagctagatacagagtgctgattggtgcatttacaaaccttgagctagatacagagtgccaattggtgtattcacaatcccttagctagacatacaggttctccaagtccccaccagatcagctagacacagagcgcagattggtgcatttacaaaccttgagctagacacagggtgctgactggtgcatttacaaactttgagctagacacagagtgctgattggtgtgttcacagaccttgagctagatacagagtgccgattggtgtatttacaatcccttagcaagacataaaggttctccaagcctccactagactcaggagcccagctggcttcacccagtggatcccccaccaggccgcaggtggagctgcctgccagtcctgcccctgcgcccgcactcctcagcccgcactcctcagcgcttgggtggtggatgggacagggctccgctgagcagggggcagagctccttggggaggcacaggagcccacggccgggggagggggggaggagggagtgggggtaggggggtgaggggggttagggtaggggggtgaggggggtggggtaggggggtgaggtgggggggtagggtgaggggagtggggtggggggatggggtgagaggagtggggtgagggggggtggggtggtgtgaggggggctcaggcatggccggctgcaggtcccgagccctgccctgcagggacgcagctaaggcccgacgagaaatccagcacagcgccagtaagccgaaactgttgggggaccaggcgcaccctctgcagctgctggcctgagtgctaagcccctcactgcccagcgccggcggggccagctggccgctctgagtgcagggccgccaagcccacactcacccagttcccgcccgtgcctctccctccacacgtcccggcaagctgagggagccggctccaacctcagccatcccaggaaggggctcccacagtgcagctgcgggctgaagggctcctcaagcctggccagagtgggcgccaaggttgaggaggtgccaagagcaagcgagggctgcgagggctgcgagggctgccagcactctgtcacctctcaacagtagtaaactccatgagggcaggcctcacagtgttcaccactgtgtctctagcacctggctatgtgggtggtacacagtaaactatgtagatacttgatgaatagagaaatgagtgaatgaataaatgaataaactctccatcaacagtcatgccccaagtggacccacagctgacctgttctatgctaagcacttagaagatgtggtccctttcctggaggcttaaattttacatttctccaacctcatgtaaattgtgggaagacacgatgcaagagaaatccctatttattccaaacctcatgctctttattttaccagagtactcaaaatggaggccctgagcctaagggagggtccccaagttcatggaatcctggcaggaattacagggctcaaatggtctgaagtctagtgttctactgctagctctgccagttctgttgtcattcacctctggtgaatgacttcccctctgggccttagttctcttctctgtaaaatgggaatgcagtgggggaggagtggtggaccaagctgtgtatgaaaataggggcaatttagtgcatttgactatgtactctgttgtgtgtaattggacacagtgtcctccttcctaaaaaggcttagaggcagggatagaactagatgcagagtctaagtaaactaaggggagagggaagacagtgtgtgcctacttctgtctgtaaacagcaaggtcaggatgtgctggccctctggtgagaggacagacaggacagaggggtggtgggctagagggggccttgccataataagggccctctcaaacatgtctatatgtctttgcctctagatttgcaaaagaaaagattctaaagccctgggatcttcatgccatcaccaagcatgatgccctcctccccattcagaagcaatacacccccttctccttcagagggacaacccagagagaaatgggtggtggggatggaggatggggaggcctggagaagcattgatggggccagggttcctagcagggtcccatttcaggcatcttcagaaagtgcaagagcgtgagcctcctggtccccctccagtgctttcttccggaggatagtggactcagtggacacccgcatccatgccccaaagctttttggcttcagtccaagcagctgacaggttcatccttctccctagggccccacaaacaccacttccggccctcctgcctctatctgggctcttcctgcctggatctctatacccacgcctgcccttccctctgcagagctttctccctcccttcaggagccttatttcgctctctcagtctccatatctatttctttcccccttcttccctcctcccctgcttttctcctccttgccatccctcccgagccccagtatgggtctcccctccttcccctctctcaggctgcatctcccccctccttagtgctcacccctgcacctctttctttgtattcttctcaccctctcccagcctcgccagcatctctcctcccccgcccggcttcggcctccccctgcctccccatcttcagctcagtctcctccccctcgctcctcttccctcccctccgcctcgccccactcccagcccgcatgccaggatttctctcctccctgggggtctcagtgcatctccttctcctctctgcctgcctcctccctcaccgaagggttagcggacacccatccttttctgcttggggaccccaccaccacccgcaacactgccgctgtctcttcttcaccgtatccttctctacccaccctcttctctcttctcttctccctgcccctttaaatctgcctggcccagcctcccccgtgatgctgggatggagcaaacattgatttgtgctgggatggaatcggaattttgatttatttttcctctcccaaccataagaagaaaaaaataataaaaacaccccctcttgagagccccctccccctttgcatccagctcccagctcttcttccctatctccatccaaggcagattttttcccctacactattctcatcttcccccacccttgccactacctcgcccccccacccagcctgctcctccagctggggagagaggggactctccggactcccccacctttcctctctgggttggagcagtctctccggaaggggagggggcttggcttgtccgggcgaggtgggagtggaggtatcctgccatggatgctgtgccggggaggcagcctgagccccagcccacatggtgagtagcctgccccctcccttctgcctgtctgcccgtccccaccctggcctttcccctgcagagcctcccctgggccccatcccccgaaaaaccccccgaaaaaccccccgaaaaaccgtctgcctaccttggtccgatctccccgctacatattctaccccccacccccatccctttgccagagacgccgaagaaccggggcagaggggtcctgacagcagccagggaaacgggtgccctacgattctgcccagccccctctcaggacccccaaactgccatccacactcgacacttcggggttctaggttggagaattgggactcccgcttggggttggggccccaagtcctgggaggggcccgctccacaaagacagaaatgggggaagcccccattcccccaaagcttgggggctgctggaagatgctgccaaaggaggggggtggattggggggcggcgctgatgccccagagccaccgggccagggagcggcgggcaaagaggaggggcctctctcgccacttgcccccctccctctttctccgcagccactcaggatgagggtccggccctgcctgccctcgctggggcccccccgcccggccccggtctaactgcccccgccccgaggcctcgcccggctccaaggcccccagcaggctctccagtcccaggatgcgctgagccgccggggggctgaggccgcgccaactacatgcatgtcccccgggggcaagttcgactttgacgacgggggctgctacgtggggggctgggaggcggggcgggcacatggctacggcgtgtgcacgggccccggcgcccagggcgagtacagcggctgctgggcacacggcttcgagtcactgggcgtcttcacggggcccggcggacacagctaccagggccactggcagcagggcaagcgcgaagggctgggcgtggagcgcaagagccgctggacgtaccgcggcgagtggctgggcgggctgaaggggcgcagcggcgtgtgggaaagcgtgtccggcctgcgctacgccgggctctggaaggacggtttccaggacggctacggcactgagacctactccgacggaggtgcggggcccggcccaccagtgtctgtctgctcgtccgcgtgcgccttccccagccttgggccttcgcccgccatttgcgcccttgcgcccatccttctttcccccgccaccattccccatcgatgtgacccccagcccccaatttctgctctctcccaccatgattatgctttcctcaattgtctgtctcctgctcgcttctccctcaccccttccctgtctgcctgtcctcacacctccctctctacctgcctgtccccaacacctctgctctccgtcgggtcggcgtgcccctcagagtactgtttgcctatctaaacgccctgaccagcctgtccttcgcatgcctgccgggccctccccgtttcccctgtttacccgcactgccaaaatccacgtagggctcctgctacctgcccgtcttcactctgctctcccacactttccggcccagcctggcctgttcccggctcccagtgcccttccccgacctccacactaactgcctccatctctcccgcctgacgcttgggcttccaggggcgcttgggacttggggcgcaaggagcccagcggcacgtcctgactctttctcccacccctccgccgcccgcaggcacctaccagggccagtggcaggccgggaagcgccacggctacggggtacgccagagtgtgccctaccatcaggcggcgctgctgcgctcgccccgccgcacctccctggattccggccacagcgaccccccgacgccacccccgcccctgcccttgccgggcgacgagggaggcagccccgcctcgggctcccggggcggcttcgtgctggccgggcccggggacgccgacggcgcgtcgtcccgaaagcgcactccggcggccggcggattctttcgccgttcgctgctgctcagcgggctccgagcgggcggacgtcgcagctccctgggcagca

SEQ ID NO: 6463 - DNA, 6000 bp, Homo sapiens
tcggggagatgttcagcagggagctggatgttagttctaaacttaagtgaaggctcaggcctggggatatatttgagagtcattagaatataggtgggaagctgggccatcagaggagtcaagacactccaggacagcatgacatgagaagagcagtaggccatggtcatgccatacatttagacatcggaagcagagcatgagaaattcacaggagatactacaacaaaatggctggaaaagtcaagggagtagagaatttctagaaatgagtggtcagtaggatcagaaacaaaaaggcccagtaagataaaaacaaaaactacctatagggtttggtaatatgattttgctgttggtctttccctgagcagttcagtgatggggttgggaagattatttttgcagtggaaagaaggaggcaggaagtataaattcctttccagtagagtttttgaaagtaagagaaataaaactaaggcaacaaataagtagggaaatttgttttttatttttatgggtaagactgggcagaggggatttagaggcagaggggaagaggccaacagggagggaagggttgaagttacaggagactgtatcactataagggtgaaaggcttaatcatgattggcttccaccaatcttagggcatctgccagggctgaggaagcaacccatcattcccgggcttattgcaccctttacctgaacaatatggggtttctaaaaccaaaaaaaaaaaaaaaaaaaaaaaaaaaagaggggatggctgttgggagaggttccaatagtgtctgccacaccaaccctctctctacttaaaaatgtcacagcagaattgcatctgcagtgattcatatcaaaagcttgaacagtcttttcatattgcacattttaatttaaatactttctcacttcatggttctccttaggcctaacctactttcaattaagcctgagtctgtgaagacatactaacttgttcgagtctattttctctacatgctagcacacacaccctggaatttaatggatagtaaaattatgcaaagaatcactgtgtgcaacaagaactgggacatttcctgccaagcccacctccaatacaaacatgtacacacacccatcggtgctatacatagaacttgctcttaaataccaacatccatttgccacactgtggagcaaatatgcttccattctcatgattaaaataacaggaagtatcatcattcttgaagtcttggtatttataacaacaatataaccacaaaaaatatgtaactgtggagactcttgataaggtctattggcaaggcatctggtagcatccttggcttgatgaaaagccctgtatctaaataatcttacttttcaagcaatgctgtgatgtaccctgaggatccaatccaagaagggtaaaaactgctacagacgtcctctataacccccagcctgaaaggggcctttgcctcttcagccagtctggcaggtcatggaaattctactcttgcaaagagagctgtggatacaagcaaagtatttcttcagtatttactttgactggtgaaagagccacggcagatttttttctttttccccaagacacaaaatgacattttaaagaagaaaccactcttggtgccatagcgtcttttaaaaataatatcagaataaaagctcaaaggcatgttctcttaagcacagctgtccaaagcctcctatttcagggagaattcagccactttatgcagacaggaaaacaaaactgttcgttttagcatcttctctattggaactatttttttgtactcagattgcatcagattcaaaactagtgacatcctcttatgctctgtttccccaaccagatcatgagctctttaaggtcaggggccacattttgtactcctttatttcttgcagagttgtgtttgtcatggtgtactttcaggaaattgttgttgaatggatgaatgaatgaaagaatgacaaaaatgggagagcagtggtaggtgagttgctaggcagcctggtaaagaggattacaagagtcaggtcagattagcaggaaaggtggtgtaggggaaagaatgttgcattctgagccagcagacatgggtcctagtcccaggctggcttgcttgtcttcactcattcaacaaacatttcttacacttcaagtgagccaggcaggcattgcggcagacactgaagaaggcaaaatccctgccctccaggtgtggtggtggtggtggtggtggtggtggtaagggaagcatgtggagatcaggattatgggagagatgtgtgataggaggtatgatcacggcaagcacagggcacatggaagcaaggagaaagggcttctaaatcagactgtggattccaggaaagcttcgtccacctgaaaggaaaagacagaggcacaaaatataacaaaacatttacttgagccaaagtgaggacagttgcccggaagacttagacccaagtaaccctggatatgagcttcatgccgcctttattacaagcaggttttttacaggcagaaaagggggacagggagtaggccgatatgaaattgtttgtaaggaattcacattggtttacagaaacaacattgctcactgattggctatgcactgttaagctataggctatgagtgatagtgtccagtgtgacattattaggttaatgtatagttacttgtggcaatagcaagcagtttcaaggatgaatacatagctcaaaagggggcagtagtgttactggaaagagttcctgatccagaccctaagagagggctcctggatctggtgcaagaaagaatttggagtgagtctacaaagtaaagtgaaagtgactttattagataagtaaagaaacaaaagaataggcagagcagtggcgtcggctgcttgactgattatacttatggttatttattgattataagctaaatggggtggattattaatgagatttttgcaaaagatgtggggaattcttttctcttcccagattcctgaaggaggagggttttgattcaagccttaaagatgagaaggtgttggcttgaaattgaccaagaaattgaccttttactgtaggtaaaaggacttacctgtgaggatgttgtattggagaattaaagtctcagcttcaggtgagacttcagggtggctgtgacgggagataaagttagagacataaactagagctactttccaaagggccttgctgcaatataatttagtggttaggagtggaggtttagagatcagacagaattgggttcaaatctcagctttggtacttaccagccatgtgataataactgatttttttaaaatcccatctgagctttagtttccttaacacaacgactacctgttatcagttgtctattgctgcataacaaattatcccaaaatgtaatagcttaaagcaacacacagcttcttcagcttctgaagctgaagctgtaattctcagttttggttggtctggaatcccaccaaaactataattataatctaaccaaaactataattctcagttttggtgggtctggaatctgcacctggcttagctgggtcctctgcttcagggtctcttgcaaggctgcaatcaaatgtcagccagcgctgagataccatctcaagacccaactggggaaggatccgtttccaagctcactgacatggttgttggcagaattcagttccttgctgactgttggccagaggctgccctcctcagttccttgctatgtgggcctccccgacataacagcttgcttcatcaaaatcaatgagagggaaagtcaactaacaaggaagaagccacaatcttatttagccttcttctcatcactcttgccacactatgtttgttagaaatcacaaggccagtccacactcccagggcagagattatacaggggaatgaacaccaggaaatggggatcattggagaccatctcagtgtttgcttgccccaaagctcatagcttagtaccactaaataaatgttagttattattattatgctgaatcgagagataaagtaaaactacagagggccagtagttttatatcagggagtaacttcagatgatgttgggcaagtcaagtcatctgtctttgaactttcatttcatcctcagtaaaataaaaatacctgaccccagaaagaatgagaaaatatatgtgcaagcataaatatatttttggaacatcaaatatacaactctccactctgaggaagcaaactgctttgggccagttttccattttgtgtctgctctatgagtctcacagtctgatgtcttcacgttttttagcgtttggtccagtgggcccataggaataaacacctacaaagagcagtgtgtctctggagagtcctttaaggcatttccaaggatttgctttttggtttttttctttctttcgttctttttaaatatctttgcttttaaggacctcatggggggcctgggagagaaaacagactgtctgggaaattttaagctcttgataataaaaatggtaataaaatctcctccagctcctgaggcttcgcagaggggatgtttatggtggatggggttccccttctcctgcgcagctggtttcgaggttgtgcggtttccagtcctgcggagcagctcaggttaccgcctccgtggccgcgggggagggcatctccgacggccgcagcaatgggcaagagatcagggtcttcccatccccgcgactcgcccctttctgcctggtaaccaagcgggatgcctcatcctactccccaaacggagcggatcacacacagtagtatttcatggtctttcctgctgcggttttcccgggggaaggtacttccagagggtggccaagtcttccctagcggccggccttcgggagggggacagaacttaggagtcagccctctgccttcgtacaaaggctcgcttctcctcagggcgtctctgggtggagcgaagcggccgaggggaccacgacaatgtccctttgcttttcggaccgatggccaggcctccagagccaggagcgcccgggaccccagggcagggagcaaagctcataccgcaaccccgccacccgcccgcgccctgccagcctgttggggccacagcgcgcaggccagcagccgcactcgccgctgcggggttccctttgcgctgagctcatctcctgcaacgccgctgccccaaaccttgcgggccatttggtcccgggggtggggctccttgggggccgcggggcagcccggatgagaggatgacccgggagctccctgggggcggagtggaaggggcagctccaggcagccctggccaggagcttttaccccgccagccccgctgctccagcggccgctgccttagaaaagttaacgagaaccagatgtggtggccactgccgaactttctcagagccggtgattggtccccagccgagggcctcagccaattagcttgctgggtgggcctggagtcccgccccgcccaggcgcccgcggagatccaggttcgaggctggcgcggcgcggagagtgggctggaggccggggcgggacgcgttgtgcagcgggtaagcgcacggccgagcgagcatggagggggaccgggtggccgggcggccggtgctgtcgtcgttaccagtgctactgctgctgccgttgctaatgttgcgggccgcggcgctgcacccagacgagctcttcccacacggggagtcgtggggggaccagctcctgcaggaaggcgacgacgaaagctcagccgtggtgaagctggcgaatcccctgcacttctacgaagcccgattcagcaacctctacgtaagttcagccccctcctggcacttttcccgcagcttcttccctggggtcggtctcacggaaaccctgcctccagaggggaggaaacagaccccactcctggagccccccagcacccttgcggtgg

SEQ ID NO: 6464 - DNA, 6000 bp, Homo sapiens
gtaatatttagatacacttttaatatttttttaaattaaaacttaaatatactgtggttgatatggttatcttacatgctagtcacctacataaaaatggaagatcagttggcatttatttttttaaaaatcaagtgggtgaacaaaaactatttcaatacctcatatagagcttactttatttttaaaggaatttttttaaaaagtgaagtataacttagtgttgtgcacaagtctgaagtatatagctcaatgaatttttacatacgtatacacctgttaaactaccacccagatcaagatacacaacagttgtagcctccagagcattcacttatgccccatcttaagtcagttaccctccacacctcccaagaccactgacctctatcaacttagattagctttgcttgtccttgaacttcaggtaagtcaaaatgtacagtatgtgtctaatttctttctgtgtttatgactaattttggttatttgtaaaagataatattttataacttccatagtaatatctgccgtatatagagttagaagtttttgttttaaataggcatgtcaaaaccttattgcccttgattttaggagacatatactgaagaagtatttagaagtaaagtgttatcaggtctacaatggactttgaaatgattcagaaaaaaatgtacttggccgggcgcagtggctcacgcctgtaatcccagcactttgggaggccgaagtgggtggatcacaaggtcaggagttcaagaccagcctggccaagatggtgaaaccctgtctcaactaaaaatacaaaaattaaccagtagtggtggcgggcgcctataaactcagctacttgggaagctgaggcagagaattgcttcaggctgggaggcagagtttgcagttagccaagatcgtgtcactgcactccagcctgggcaacagagcaagactctgtctcaaaaaaaaaaaaatttactcagggccaggtacagtggctcatgtctgtaatcccagcactttgagaggctgaggcaggtggatcacttgagcccaggagttggagaacagactgggcaacgtggcaaaacccccctctacaaaaaaaattagctaagcatggtggcgtgtgcctgtagtccccgctacttgggaggctgaggcagaaggattgcttgagcccaggaatctgagattgtggtgagccaagattgcaccactatattgcagcctgggttacagggtaagaccctgtctcaaaacaacaacaacaaaaaaacaaaacaaaaaaccaaaaaaaaccagtactcagaatgagaaagagaaggagaaagcaaatatagtaaaaatggacatttggaatatctgggtgaaaggttcttgtatcttttctgtaagtctaaaattatgccaagataagtaaaaacaaaacacctattttctttttacagttcttcctatttttcatggatttctgaaaaggcagagactagaagaaacttgtttagctatctcattctgctcatttaggggctctacttttaaaattaagatggtaaaaggaaagcattttacccataagtaaaagaatgcttccctttatggaccacctctcgtaacagatgttttagaagaaagacctgctttcttatctgaacatttactgccctttctgaatgcctaatagactgtgtttattccaggtatatgagtagaccagtgatgagtggcccaggactctatgaccctacaaccatcatgaatgcagatattctagcatattgtcagaaggaaggatggtgcaaattagctttttatcttctagcatttttttactacctatatgggtaagttgaaaaggtaaaatgaaatatgctttcactttgctgctttaaaagtttgcaggcattatggttttcacacctcaaaatccatttgaagaataacttagtgtcttaagtgtgcatggtgcacaccagcaaattcgcacacattcagtgtggcccacactggtgcttgtcaaggcagtaaaccagcctgccatcagaggcagaaggtttggtcagggatgctgcttcataagttttcagacacattcagtcagtaaaggatggtcctcattctccatggcaaagtgatgtcattgaaggatagggatgtgtgagtttgcagaaatttctgcttgtcttcagggtctctccagacattatgtttcattttttccttatcattcttcataagtggtgtgctctgccctttattttctgatttgcttgatttgagtggtatgaatgaaagaagtagttctaccttacagggtggtgcagtttccgatttttgttctttttttttgagtcggagtctctgttgcccaggctagagtgcagtggcgcgatctctgctcactgcaacctccgccccaccaagttcaagcaattctcctgcctcagcctcctgagtagctgggattacaggcgtgcaccaccacgcccggctaatttttgtatttttagtagagacagagtttcaccatgttggccaggttggtcttgaactcccgacctcaggtgatccgcccaccttggcctcccaaagtactgggattacaggcgtgagccatcgcgcccagcctgatttttttccttttatactctcatggactcattgttcctctaggtcagggtgtctcagcttcggcactgttgacgcttctgggctgtgtgggaatttctgtgggaagctgtcctgtatatcatgggacgttcagcagcatccctggcctttacccactagttgccatgagcaccctcctgccccctcatgacaaccaaaaatgtctctggacattgccagatgtcctgaggggcaaaattgccctgggtgagaaccactgctgtaggtgtgttgtaggtgcagtgaaatgactgcttattaaaactagaaaaggacactgttaaatgtagaattatatatttctttaagctatgtgaatatacttttacacatcacttatataaaatactttctcattttttattaatacatactcaactagagaggactttctccttgattttcagaatatttccaaaaaagctgtaagctttaaaaaacagcataagcttcccttctctttttcattacttgaaaacttgctaagataggcttatattcatattcatatttctcttcatacataagtttccatcatagaaaagatgaatggttagactgaaatttaggaaaaaggtatttttggtatttttatgcctttagaggctattactgtgaaaatgagtatcctttagtgcatatgcagatattactcatctatgaaacaaagaagtgctctgaaaagtgaaattctatgtgtcactttaatttcctgttaattttcatttcataagtttccatagcaaatgtctggaacgggctggtgtatgataggcacttcatacgtatttgttgaatgaaagaaatgaaatgaatgattgaataaatgataaagttggagatgtgcagttgtgggaaaatgttcagcaggatatggtagcaccaggacatttgttgtgttttaaggttgtctatcaagcttgttcaactcctttgtatttctgtttagagttatgtgctttttgaatcatgcccctatgccgttcccatagcactctgtagaattgcccttggcagttcttaaacctaaatcaaaaggtcattgccttttattttgctgttttccccccttttcttttttaaccacttcctaaaagttgctattgcttagatcctttctgtaatgggaaagatccttgattgatcattcctttctatacaatggggatacacatggtacctgccttctaggactccttgaaggattaagcaaggtaatgtatataagagacctaacagggcctggcgtgaagtgagccctccagagatactcattctattattagacacaactccagagtgtgtgatgtttggatggcttctctaagctctgatccgccattaagctttcagctgtgccgttctacttgctaaaattggaagggaataggggacaactacagcatatgcactgagccaagtcatatgttaggcaaaagtccataaatgcaaattaaaatcactgtgaacttgtcattagtcttgtcattttctgtgatactagtttgctatataaagcatactctctcatgctctgagtttttttttaataattagtaatgttcaaattaacatcttttttcttcttttcagcatgatctatgttttggtgagctcttagaacaacacacagaagaattggtccagttaagtgcatgcaaaaagccaccaaatgaagggattctatccagcaagatcctgtccaagagtagcctgtggaatctgatcagttactttaaaaaatgactccttattttttaaatgtttccacatttttgcttgtggaaagactgttttcatatgttatactcagataaagattttaaatggtattacgtataaattaatataaaatgattacctctggtgttgacaggtttgaacttgcacttcttaaggaacagccataatcctctgaatgatgcattaattactgactgtcctagtacattggaagcttttgtttataggaacttgtagggctcattttggtttcattgaaacagtatctaattataaattagctgtagatatcaggtgcttctgatgaagtgaaaatgtatatctgactagtgggaaacttcatgggtttcctcatctgtcatgtcgatgattatatatggatacatttacaaaaataaaaagcgggaattttcccttcgcttgaatattatccctgtatattgcatgaatgagagatttcccatatttccatcagagtaataaatatacttgctttaattcttaagcataagtaaacatgatataaaaatatatgctgaattacttgtgaagaatgcatttaaagctattttaaatgtgtttttatttgtaagacattacttattaagaaattggttattatgcttactgttctaatctggtggtaaaggtattcttaagaatttgcaggtactacagattttcaaaactgaatgagagaaaattgtataaccatcctgctgttcctttagtgcaatacaataaaactctgaaattaagactcactttcagtgcattgtttgagattaaaaatagtatttcttaaacttgcttaatccatgataaagacatgttgctgtcatttttaaaaagtgacgtactacattatgggttttctgaaaaataccatgcctagatctaaaaaggaaaatttttaaatgccgagcacattaacctcttttgtcatttgacaagattcataaacgtggatggcatagcatcatcatttctcttaccaattaagaaaaattatggtggcacttaaaatattttactttgatttttcctttttggaacagtcagttttaaggtaaaatggcttgtaaatttgagtttttgctgctgcttgtaaggcaggtaaattatggcttgcatgttttcataagcataaataaatcttgtgctttatttgggatgaggaagttaaggcagttgaaaataaaataagtggtttggaagtttcttgagaagaggatcaaaagaaagagaaccaatatatagaaatttcacatgatcaaggaagtttatggatgcgtttgtggaaatcttactctatgaacttgttggattagatgctgttttattctctactaagtgaaaagtgctttatttcagtgctttcccatggttgggagagagtagctgttaactattctgggtaatgggggtgagtatgttgaggaagagatttagaaccagaagagtgaagagactcaaactgttccataacaaggaaagctttaaagaccttgtatttcacagtctggagaactagagggatctgactcttggtcagttcatgtaacaaattatttattgagtact

SEQ ID NO: 6465 - DNA, 6000 bp, Homo sapiens
tacataagaaatggtccaattattttctgtaaatgaaacttacttttgctttaaaactgttcttagagcatctttctgtcccattgtatactgagaaatgaagatgtcatttgctgcaaaatcaagacacaaaaatatatattaaattcctgaatatttattaaactttaataagctactaaaaaaatcttttttaactaaaagaatgtttaggaactcagccatagcattccacgatcgaaaaggacaaggaacaaattaagtgattaagtaataatataatcctcataatcccaaacccacagccaacatcatactgaacgggcaaaagttgaacacattccccctaagaactagaacaagacaaggatgcccactcttaccactcttttcaatacagtagtggaagtcccagccagagcaatcagacagagaaagaaagaaaaggcatccaaaaagtaaaaggaagtccaattacctctgttcactgatgacatggtcctatacctagaaaaccctaaagattcctacaaaatgcccctagatctgataaatgacttaagtaaagtttcaggatacaaaatcaacgtacaaaaatcagtagcgtttctatacactaataacattcaagctgagaatgaaatcaagaactcaatgccatttacaacagcggcacacaaaaaataaaattcctaggaatacatttaatcaagaaggtgaaagatctctacaaggagaactataaaacactgatgaaaaaaatcacagatgacacaaataagtggaaaacattccatgctcatgaattagaaaaatcaatatcgttaaaatgaccatactgcccaaagccatctacagattcaatgcaattcctattcaattaccaacatcatttttcacagaattagaaaaaactattttaaaattcatatggagccagacacggtggctcacgcctgtaatcccaacactttaggaggctgaggtaggcagatcacttgaggtcaggagtttgagaccagtctggtcaagatggtgaaaccctgtctctacaaaaaaaaaatagaaaaattagctgggtgtggtggtgtgcacctgtaatcccagctactcaggaggctgaggcaggacaattgcttgaacccgggagctggaggttgcagtgagctgagattacgccactgcaccccagcctggacaacagagggagactccgtctcaaaaaaaaaatttataaacatatctaatactaaacctctgcaataggttggtaataacaagataaccttcaccattgcaaaccttattctggattttatagcttctagtgatagcttaatttgggaagaaaaactaatttaaaatgaaaataataaaaactataagactacgtaataaatgtttaaaaataaattctacccttaagaagaaaattctgacacatactacaacatggatgaacctttaaaacattatgctaagtgaaataagccagtcacaaaaggtcaaatactatatgattctacttatataacgtacctagggtagtcaaattcatagagacaaaaagtaggatgcccagggctgaggggatgaaaaatgagcagttagtgtttaatgggtagagttgggagagatgacaaagctctggatatgaaaggtgatgatgattgtacaacaatgtgaatgtacttactgtcacagaactgtacattttaaagtagtaaactttatgttatgtatatgttgtcacaatttaaaaaaatcaatattattcttttacctttttgcttgttgttctcttctattttatccaaaggcaacacttgcactgcaacgtctttagaaaaatcctttgggatatgaaaggaagaaataggctaaataaacttcatgatttattatttatcaagaaccgtttactagctatgtgactactgtgttctgggagggcaggactgtgtatttcatattcttcatttccatcatcatgcaattctgatgtaccttaaagctactcaaagatttgttgaatgggtgagtaatacactatcagacaagtgaatgaatgagtaaatgaaccagcaagcaaatgtagcactgagattcagactcaaaccagtttgccacttgtagcagagcaagtcatttaacatctcagttgcttcagtgaaatgtgaaaatctgactcactgtgagtcaaatggagtagataaggatggcacaacatcacgaagatcacccatttattctcaattatacaataacagtgtatccatacatttgagaagtttagatatcattaaataaggcctgcttaaaaaaaaaaaagacaaaacaacaaaaaaacactccaaagtctaggcatttacttagggatcaagtacagcaaataattatacattttattgtgagcttttgacaaaattgtcatatagtctcaattgaattattagtttgccagcttcaattttcaaaatagcatattgtgaaactctcattatacagacttattaaactgacaatacataggtcaacactatgattagccgtcaaagtctgattagatctcataaccaaaacattgtatttatcaaatactttcggcattataaagttaagatgataatttcatgttattcttaaagaacctcccttctaagaaaaccaaaaccattctcacaagtgttagaatgacatgcaagcacacctcacattaaagaaaaattgtactgttagttgttccttttcttttacctaagaacatgttaagtctctgggcaagaacaccttttccctgaatagtaagagagtttcttttcagttatcctatctctttcagcggccattatcttactaataggtatttttgattctagggaaggccttttgtttaatgtctcaaacaccattcaaagtcacaattgtagtatataaaacatttgttttggtaagtgatatttaaataaaaacaaggcatgctgctaatcaaacataatttaagaatgcattatttgacaatactgaaaattttaacgtgagcataattaagaatccttttgcttacactttctgacaccatgggattttctaatagaggctggtaacaatttctagcagaagttaagtctgatgaacctaacaaaacaaaggaatagattttagtgattttaaaatcagatccttagctttagaaactgtatatgcatgattcaagatctataaactccatataacgcagaagttggaaagacaatttgcatgcaaaaaaagttaagaaaatgtatttaaacatatctgaatgaaagtttttacagttgatatttgggaaaataaggttcggtactgacaataaagtgagattaagcacgaaacattttaaaatataaccatacactattggatgtggacaaactatgggtagaaatatgtatacgatgtaaaggtctaatttaacagcagtactatttgagtgtcaccgctgtatcccccaaagaacagcattacaaaagcgttttgctgtttttgctcacatattcattaatttaatcctcacaattagcagcgaagtgggtaaagcatatgttatccttattttcactgagctctagacagattaagtgaattggaatatagaagccatcaattggcagaagtcctgcttttcccactatgaaaagaaagtagtgaattaggtaaaaagcactactttgggggaaaactataaaaaacactacgtgggggaaaataaagcacattatacaagttaagtgtatccaccataaatataaaaaaaaaaatatgcaaaagtcaatgcaaaaaaaaaaaaaaaaagcacaacaggggacgttaaagtttcattcattccatctattcaaacattttataggcttcctggccattttcccgggaaacagggtcagttttcaaacatctgtacaaactagacttatatcttacgtttgggaatttaaacaaataaggactaaagatttactaaactaaaactggttgaaaaactacatggaatcacataccacgtgatgttccattcaaactagtccccgttccaacaggaagacgtttatttgcagacaatgccggaggaacacagggcaactcatctttcagcaaaaccaaatgatctccatgattttgagaaactacctcacgaagtctcttcactggcatcttaatcttttttttcttctccaagctgacctcagagcctttcatattgttggtcacaaaacaagtcccacacttaaggacggaaaaactttctctgtttccttaagacttcagaacaaaattttcacctctttgcaataactgtttttaaaatgtcgaacatccacaaagctgaaaatctaaattctgatattgaatccaggattagagctgactataaagtcatatttacccattaatcccactcagtctattaatacaccacgccaaaatgtgaaagtggggatgacaagagaatggccacaggagcaacaataaccataacagtgcactccccaaccccagagctggtagggcaaaaccaaacacatgtagtggcgggcttaaaatttgttgagaagaggcagtcaagcaaataaaagcgaaatgctatttttaaaataatgacccacataagaagcgtaatagctttcttcagccacagagtcttacacacccctccagatgcaatcgtcggaaacataaattcacccctacgtatctccagaacgcccgagacccgcaccgtcgtgggtgtaatctgacaacagcgtcagttgcccgcaggtcaacacccacttcccttcaaacccgcccttgagacacaacacgcatgcgcgccaagaaactcacccaaaacatccaaccagaaagctaagcgctctctggtgctcttccattcctctccgggtggaaacaaactccggacataacaggggtttatttatttatttattttaaggtagcacattgccgcacaagaccgctctacagtctcatccaagacttgaagagctcccgacttgtaatactacttgtgtttaccagggactgttgacactgcttcgcttccgaagaccgttagggacgtgggattaggtaaattaggcttccaagaagtttcgacagattcgggtcattattggagaggaagtcgggaatagaaagcgttgtctaagcagaaaataaccgaagttaatccttaggagattttagaattcgctgatggtacctgctttttcttctagatttcctcgcgttataacgaatcggcgtctaagggtttaagtgtcacttgacattactgctcccacgtgttctttcccatctggcggccgcggctcctgtccagaccctgaccctccctcccaaggctcaaccgtcccccaacaacccccagccttgtactgatgtcggatgcgagagcctgtgcttaagtatggtgtctgttctctgccgtgagaatccggggttcccggacggggggtggcaggctacgctccaggaaagtggcggggtctcccgaggaggccgccgcacgtacctggagcagtggggggtgcgaagcgggacagcgcttcgccgggtcgggtgcagaccttcctggagatggtgtcacctgggcgagggtaggaactttaggccctgagccacccccaacccggatctggggagtcggggtcctgttttgggacactgaattagactataaggtatttacgatgtgaccttgagctgcccgggggaagatcctcctttaaatgaaaatcgtctttagacataataccaggtctaacaccccttccctgatctgctcatttcccaggatgcgctacttagagctttccctttacgccttactggaggctttagaataatcaaagcagaaaatgtaatccgatctaaaagctaaataactaattttatttcttttacatctcggcagtctaccttcatagaagtctagacttaaaatggactttaaagtct

SEQ ID NO: 6466 - DNA, 6000 bp, Homo sapiens
aatcacattacctacttcgaattgtactacagagctatagtaaccaaaaccatgccagcatggtactggcataaaaaaaaatagaccaatggaacagagtagagaagccagaaacaaatccattaatctgcagtgaattcatttttgaaaaaggtgccaagaacacacactggggaaaggacagtctctttaataaaaatagttctgggacaacattacattcatatgcaaaagaatgaaactagacccctaactcttgttgtatacaaaaatcaaatcaaaatagatgaaagacttatactgaagacctcaagctaggaaaccattaaaagaaaacactgggggccaaatagatgtggtggctcatacctgtaatcccagcactttgggaggcggagatgggcggatcacttgaggtcaggagttcaagaccagcctggccaacatagtgaaacctcgtctctactaaaaacacaaaaattagccaggcatggtggcaggcacctgtaatcccagctactcgagaggcagaggtaagagatttgcttgagcctgggaggtggaggttgcagtgagccaagatcacgccactgcactccaccctgggtgacagaccaagactcagtctcaaacaaacaaacaaacaaaaacaagaaaacattgaaacattggggaaagtctcaaggatattggtctgggcaaagatttctagagtaataccccataagcacaggcaaccaaagcaaaaatggacaaatgggatcacatcaagttaaaaatcttctgcacagcaaaagaaacaactaagtgaagagacaacccacagaataagagaaaaaaattgcaaattatccatctgacaagggattaataaccataatatataacgagctcaaatagctctattaagaaaaaatataatgatccaattaaaaatgggcaaaatatctaaatagacattactcaaaagaagacatacaaataaatagcaaacagacatatgaaaaggtgctcaatatcattgatcattagagaaatgcaaatcagaactacaatgagatgtcatctgactccaattaaaaaaactagagctaccatatgatccagcaatcccagttttttatatattatggttattaatcccttgtcagatggataatttgcaattttattctcttattctgtgggttgtctcttcacttagttgtttcttttgctgtgcagaagatttttaacttgatgtgatcccatttgtccatttttgctttggttgcctgtgcttatggggcattactctagaaatgcttgcccaaaccaatatcctggagagtttccccagtgtttcaatgttttcttgtttttgtttgtttgttgggtatatacccaaaagaaagcaaaagtatattgaagagatatctgcactccaacgtttatcacagcactatattattcacactagccaaaatttggaagcaacccatgtgttcatcaagagacaaatggataaagaaaatgtggtacatatacacaatggactattattcagtcataaaaaagaatgagatcctgtcatttgcacaacatggatggaactggaggacatctgttaagtgatataagccaagcacagaaagacaaacttcttatgttctcacttatgtgtggtaaattaaaattaaaacagttgaattcatggagatagagagtagaacggtttcccagaggccaagaagtgtagtgctgggaggctggcaggggcctgaggggcatggaggtgggacagttaatggtagatataaaaatatagttagatacgagtgaataagatctagtattcactggcacaatggggcacctacagtcaacaataatttattttatatttcaaaacaacaaaaagattataatcggattgtttgtaacacaaagaaaggataaaagcttgaggtgatggataccttatttaccatgatatgattattattcattgtatgcctgtattaaaatatctcatataccccataaatatatacacctactatgtacccacccacaaaaattttaaaaaaaatctccaggttacagttgaggaacctgggttgtagagatgttaggtaactttaatattgaggctggaaagaatttcatcttggttaaagcttgttacttgtggcgctcttcctgcatgtccccacaccgtgtttccccatgatatatggtttggactaagttaagaagctagtgctaaataaatgctcctcatttcttcttttcaaatgatgaacaaaacttcttttccaaaaaacaaaagctgaaaacaaaacgtgacagttcttttgtctcaactcttcttgctaagaaccttttaaaagtgacaatcctattttctctgtgtctgaaaagcattttagagtaattcgtaacttagagcaactatgtaagccccagaatcccattgccgactgtgtgttttgcccataaatcttcaaattagtcaagctttgtcagttcagagcggtgcaaaataaataatattaataaacatgaatcatttcaagtcatagcataaacctgaaaatttcttcccccaaatagataatttttatacatccaaaggtggagtctaataaggaaagttagtaatgaaaattgctaacactgaaatcttgtgctcatctcttttcagcagtgtaaaatagaatactttatcaaaatggaactgtcaataatgttcaatttcctttaacaactacactctaaatagatttaactggctatttccttcacacattctcaatgagagtattgattagtatgaaagaaattgacaaataattagaatcatatccccaaacttcctatctattaatcataaggaaacacagaggcttgcttaggtctcccagttttttaatgatgactttcattcatgtttctcagagaaacaaaagaatatacttcatattattttgtatgtaactcctttgcatagcaattctcaaatattagtattcatcaataaccactttaaggttatatcattagaattgtctatgttcttgtcttgttatcagtaataaaaccatgagaaattcccatctagtatttctgatgctttagggaatactaagtaatagatttgaaaaaacttacaagtgccctctaattacaagacaggattaagctccatggaaatacagcagtggaataagcttttcaacttaacggttttttaaatacactcttgttttcccatggaaagatgtttaaaaatcattatgattcatgataaccaattattttgttgtttttggatgagattatttttatagatttattgagttataactgacaacacattaaattgttcatatttacagtaaacaataagttttgacatatgtttgcacctgtgaagctataaccacaatctagatagtgaatatttccatcatgagacataattttgagtatgtcaaaaatgtaaaattttggtgaccatcagatttccagggatatctggcttcaggaggccatatttattgtttagtgaatgatttttctctaatttattgtcatcttttgaacattagtgcactagcagaacaaaagattaggcagactctgggctttttcattttagcattattgaggagcacctgaatggtcctgaagttggcctttgaatataccaatggacaggtatgaaatcctcaagatgcgcatggtggccaagagtcccacagtctcacagtgtgtgcggtaccgtctgcgcccacctttcctagagaagaaacagcagaaaaacctattccttcaccctgtgtgttgtggtgaatcttagtttttaaaggcacattattttattatataaacaacttgggaaccaataaaacacaagacatttgaaaagatgggtcttcgtatgggcacaacatatgataaggcaagtcactttcctcctctgagtttgggtttatttgctgactatcttccattttatcacagtgaactgtaaagaaaaagatgcaagcttcatggaatgtccaaattctgaaatacaacggactgcacagacagcttatgattaggatggccttggctcagtgtttctgaaagcaaatgtacagcttttgtccttgcctattgacaccctgtttgccctcagggctggtcagggtgagatctgttaagctttttttggaggctgtcctgataactcatttctttactccactattttcaggcccattctggaaacgcaggatttaaccgcggggttgcagcttccctggtctccatctgccatcagaacccatctccaccccttccccgttcagacctgtgtcccctccacaactcatactggtcactctcagaactgtggccctgagttctctagctttccctctttgcctcgggacccaggacaccagtcggggcttaactttctcagttgggaaggcgacgctgctggtggctgctgctacttgctggttcttccttttttttcctccccaaacgagaggaagattcgagtggatttggcacatcccctaaccggggcctgccatttgcaggttgggggctgacgtgcccaggaggacccggaccaagcaggccattttcacctgcgtaataacaggattgggaatagcgaagcagcggcggcagcagcgagtggagtaggaggaggagcgcaggcagcggccgcggcggggccggaggaagaggaggggggagaaggaggagctgaagcgggaagagcggcaggcagcggctcggcggagttgcagcagaggcggcggcgacgctgagacaccgcagcttccctgagcgccgagtccctccggggacagcagcagggagcgcccgcgcagccaccgagcctctgcccagccaagccgccgtcgccgcgccgggggaccgccagccatggccgcgccgggggatccgcaggacgagctgctgccgctggccggccccgggtcccagtggctcaggcaccggggggagggggagaacgaagcggtgacgccgaaaggggccacgccggcgccgcaggctggggagcccagcccggggttgggcgccagggcccgggaagcggcgtcgcgggaagccggctcgggccccgcccggcagtcgcccgttgccatggaaactgcatccacaggtaaggcgggcgccgctgcccctcaaatggcgtcggggaccagggccccccagtcagtccccttctgcgcggctctcctgggcacctgcctcgcgctttctgccttgagcgccgaccccacccccgcgtcgccacgggcgactgggaatattcgcgggctggtagaaaacaacaattttatttttcccaaaggctcagaaaaagtcaagatgcttttgatccttttatttcattatcatgattatttccgctttaaaaattgttctcataggcaaacagcagcattctggctgctggcgagtctgggtacaagtttctccctcctgccaggaggctccgagctgtagggcccgtttgacaggttgtggggattttggggggcgtgtttgcgcgcagtgtgcgcgccggctacaggagatgctgacaaccgagcggcgggcaggcccgcggcccctggacccggctctgtccagggcagagatgtggctgtaactgccccttacccttgccctccacgaatcgccaccacaccttactccccccacatccctccgccttttctcccgcagaaaacaaatcccagggagtttgtccctaattcgggaggcacagctttgcaagagggttgggtgctgtggctgcccccgcccaaaacctgtatttcgccgctgcccggatggccccaccttgcagggagcattgaaacttcaagtcctaagtgcggcgggcctggctgtgggttggagggcttgggtggtggtgagtggacgtggtacagtttaccagcagtctaagcgcccccccccccccaccccggaaattgc

SEQ ID NO: 6467 - DNA, 6000 bp, Homo sapiens
gatatatacccaaagatacataccaaaagacatgtacacatatgtttattacagcactgttcacaatagcaaagacttggaaccaacccaaatgcccatcaatgataccttggataaagaaaatgtggcacatatacaccatggaatactatgcagccatgaaaaaggatgagttcatgttctgcagggaaatggatgatgctggaaaccatcattctcagcaaactaacacaagaacagaaaaccaaacaccgcatgttctcactcataagtgggagttgaacaatgagaacacatggacacagggaggggaacatccacaatggggcctgtcatggggtggggggctaggggagagatagcattaggagaaatacctaatgtagatgatgggttgatgggtgcagcaagccaccatggcacgtgtataactatgtaacaaacctgcacattctgcacacataccccagaacttaaagtataataattaaaaaagtagctaatgcatgcgaggcttaatacctaggtgatgggttgatgggtgcagcaaaccaccatggcacaagtttacctatgtagcaaacctgtacatcctgcacatgcatcccagaacataaaataaaataaaataatattttttaagaagaagaaaaaactatacaagaaatgatgagagtagtgtgcagggggtagagtggaaaggagttggtgtgagagaaatttggatgttagaagtgacaatattgacaactttctgatgtgtcagtgaggaagagagaggactggacaatgactgggcaggtttctgctctgggcgcgaagttgatggggagacattttactgatgttgggaacacccagggaagaacaagtacagatggggtgtgggaaggcaataggtgctgggtgtaatttttagctaggtgaatttgggggtgtttgtgggatgtttagttggagataaccattgaatctttgctagttcaaatctgaggctcaggagaggagtgcttagaggtttgtatttattagcaaaaaattggtagtggaagctgaagaaagaaaacacatgagacaaaaagtatggaaagagtagactgtagtacatcagcattgaaagaacaggtagaagaggaggccgcaaacagatggagaagggatgttaaagagaggaggagaacagggcgattgctgccttctctcaatgctggagcatttctctctaattagctgttaccttcacctagaatccagaaccctttttttcaaatgaaatatttttgtgagtctcaatattttaaacagaaataagtatagatgttttggttgaagtggggtcaagtgtaaccacatgtaaccacaatctatgccctgaaatattatgctatctcaacacatgtttttagaattaactttagttaatttaaagtctttatttaagtctttatttaaataatttcaagtcctaataattcacttaaatagagaagtgtgttttggccaacactatttttgaactttgatgatgatgatgatgatgatgatgacaatgatgttcttttgtggctgacactcttggttgtctaatagtctttttcttgtcaattgcatttctcatttctccctactgttcgacttttcattgttggcaaagttctgatttggtttccttgttttcctttcactgcttaagaaaagcgaacttcccagcttcaaggcataactggtctacatcagtcgtggtggtttcatttcctttgtcagtgatttgcttaggaatgaatagaacgtgtaactcacttttggtgtgtagaactgagggtaattcttctgagaagtttctggaaaggcttttttttgttttcattattgaaaatagctgcatggggaaaacacacctattattagttggctgtcatcattgactatgatatctgaaatgttctagctttcttgtgaccataaggggaggcattgcatactgagaatggcacagaagagagaagggaagaagctggagtcttgaagatgttattcagtagctgaaataactggcccaaagctgctctattcttgggcttctagttgtctgatacaataaaattctttattgttcagacctctgttagttgaatcttccattacttgcagctgaaaggatcataatagtttcaactcctcttctggcataaaggttatgatcctgaaaacccattcattcttttatacatttaataaatattaattgaacatgtatatgcaaagtgttacctaggtgctgagaatacagtagagaagagcacaggtaaggagctgtcatcaaggaatgtagtaaaaacagagagaaacttagtgtgtctggagcatagtgagtaagggggagagagttatgaggctcagttagagagaggtggaggcaaaactgtgcatggtgttgtaggtaaggttgaggattttgaactttattctaaaaacggtggaaagaattgaagaattctaaatgaaggagatgttacagatttgcattttttaaattgactctctggcttctgtgtagaaaatgcactgaagaaagtctaggatagaggcataaaagcagttatttacgattgtccagtgagagatgtcattggtttgaactaggaggtagtcacagaaatggagataactgtgtgacttcaagttataatttggtggtagaattattaggatgtcacaaccaattggacctggggagtaagggaaggataattgttaaactgataattgttaaatttctggccctgggtagaagatggtgcaatttttgagataaagaacactggagaaaaagcaaactggggtagcatatgatacaagaattccacatgcatgtttatagtggcacaatttgcaattgcaaaaatgtagaaccagcctaaatgcctatccatcaacaagtggataagcatggaatactactcagccataaaaaggaacaaaataagggcattcgtagcaacctggatggagttagagaccattattctaagtgaagtaactcaggaatggaaaaccaaacatcctgtgttgtcacttataagtgggagttaagctatgaggacacaaaggcataagaatgatacagtggactttgggaactcggggtgggggggggaagtgggagggggtgagggatgaaagactacacattgggtacagtgtacactggtcaagtgatgagtgcaccaaaatgtcagaaatcaccactgaagaacttttctatgcaaccaaacaccacctgttcccctaaaactatccaaataaagataaataaatagaaaaaaagagaaaaaagatacaagaatttggttttgaaaatgttaagtatgagataactgtgagactttcaagtgaaaattttaagaaggaaagtggaggtgcaagcctggatcttttaaaaataagaagcctatcaggagataaagaatttaaattatctaatactgaatcagtgttaacagatttgtgatttgtagtccagctttctgtgcctgacaactaaatacatgcgattgcgagatgtatgcttatgaagtctttcaccagagctttagccataaaaaggagcaaagttaacagagaattgagcctgtgctctaggtctcatgttgggcattgaataatgtgaactaacctgcatctacatgtcacagacactcctattgacaaaactctcaaagtacatcccaaattctacttattttgctcatcttcacagctacagtcctaatccaggccactataatattttatctggaccaatgccatagacttttagtgtctcttggcagagatgccaaataaacagttggatgtatggttttggggtcaggagagaatctggggttacagttctaaatttagagtcattagaatgagaggggagttagcaggaatcagggcagtattccaagaaggggaggaatgtacaaaagcatagaagcatgagatagtgttggtctggagaactacaagatgaaaaaagaaaccagtattagttaagtataattagtcactgaaataaacacttataatagagaagacaaggaatctgcctaaggtgacacgattaggtctttaaaaataatacagtagattgttatttaatcaacgtggcttaaaatatatatgggttgggctagtagttgggagtggatgagagagattaatacttagaaaaaaggctgattcagaggcaactatatgatcagtcttacatgctacacagagtttttagattttatgttgtaacttcatttgcttgcacaaatgtcagaagaagcttgagtgatgatgagagaaacaaaataattcaaatccaacaaataacgattaagaacctattatgtacactctggatgatacaaagggctgtggcctttgagatgattatctggttggggaaatgagacactccaactaataactacagtacaaggtggaatgtgaagccagtggaatttaaagtcaggatacgtggaaagttaagatgttccaaagaagggtgggtgaagaatgaaaggcacaaagaaagcttttgtgaatatgtgagtttgttttctgtgcaaaagaaggggaaaggactgaaattgtcaggagagggtgtggtggaatcagaaagagatgaagactgaatttttttttttttttgagacgtagtctcgctctgtcccccaggctggagtgcagtggcgcgatctcagctcactgcaagctccgcctcctgggttcacgccattctcctgcgtcagcctcccgagtgtctgggtctacaggcacccaccaccacgtcacgctatttttttttttttttttttttgtatttttagtagagacggagtttcacgtgttagccaggatggtctggatcttctgaccttgtgatctgcccgcctcggcctcccaaagtgctgggattacaggcgtgagccaccgcgcccggccgaagactgaatttttgagcaaatgaaagacaccaacaaaatccaacacataaagattcacacttgaaacagattaatcagggtaaggttaactatgttaccaaataatggtttcgtgaaagaattaactatagagtaagcagtgtgctctttccaaggacaagagagaattttatctaagagattttctttatacaactctagctctcacaggaagcaaggtaggtcctcgtttcaaccctccgcccccaccccacacaccatcggcactttcttttcttctttggtggacacggctttactgctgcatctcatttcctgcccaaaaaacaaggagcacacacaaagtagattaaaaatgtaggtaatgaaaagagattaatagcctgagcaggtagttgggcggctgctttgggggaagctgatcactttccgttataggctaaggtcattgtgataatgttggtcaaaatctgcccagaggaagcaaactgcttttaactgtactgctgttggttagcaaaccatcatactggttttgtgtttgtttattaattctccattaaatctggataatactgttaagcataaagcagtaagcttaaaaatcagaaatattttggaattttctctgaaaccataacaacatatcttaaagggcaacagaaagcaaaattgggtttgtcaaagctagacatttctgctagaaaaaattgagatttataagataaaccaaaaaagttatatcttgctagtctgagattcagaacaaatgggaaaaagagtctaaagatcttagtactcatgtaataacttattcgatgtatattaaacaatttttgcagtagtaagacttgcattctgaagtggtgtgtttttgagaatacaggtttctgtctctcccctggcccacccctccctaccatgagcttcagagattggaggtatactgcattgtatgtgtgcatgtctgtgtgtaaagcttttgctaaattggatttttcattgcaatctt

SEQ ID NO: 6468 - DNA, 6000 bp, Homo sapiens
agctcttaagataaagaacaatgtcttactcgtctttttaacttctttaccccctaatgcctatcacatactttgcccatggaaactcaatagacatttgtaaatggaatttaatttctgaggtccagtaaagcctttttccatccttcccctactacacagtttgtctaaccatgtcttcccttccatcatccaccttataaacgttattactcattcttccatcacattcttgacacctcccatgtccaatgtcaaacaagtaccatttgggaaacagaattctaggaatctggagacctagagctcttcagaccctgaaatccagttttctgagctgagacagtttcttaatttctcactccaactccgtttctcctctttctcaatggatattttccaagtctccattaggcatatagcaattccagaaaacattcaattttcccttctcttaatgtcatgctccaaaacaccacattccctctagacattgagcattggagagagatggaaaagtactttgaaaatgtgtgcatgtgagaaaaatgctaagtgttctgtctggtcacttcaatgacaagtttgctactttagaaacttgactaaacagagtgtgaggaaaaacatgaaaagaaaaaaatgtgttcagcttggctgaataatgaccagcagggtgaaaagataagataaccacccgctcacaggatttctatcctcaagccccagaaggttgacaacagcagacactgaaactactcttaatggagggtgtgctaaagaagcaacattatagccgcttttaggaaagcaaataggaaagttggtgaaatagagaagatgcctaagcatgtgagataccacctccatcttggaaaataaccaaggtgatacaatgttatgcaggaccccttaattaaaacagatttagtgattaatatcaggagcattgtcaagaatcacaacaacagcaattagttactattgagcaatttctgctaagtaatttgcaggagggcatctcacttaattatcacatccttttatagatgagaatatagaggcttaaaaaggtgcttttcccaatgttattcagctataagtggtcagtcatgactcaaacataggtcaacctgacaacaagatcttcactcttaacttctcttctgtgttgtaatacccttgatccatggaaatggaccatcttcatatactgcttttttgcctccggaatgtccaggtatggattgggtaatgctcaaagacagagaggaatagagtattaaaaagatccctggcctcattttctgaagacatgagcctaagctgagctgtaccatttaccatctatgtgaacttgggcagattttttgacactgctgggtctcaattcctgtaactgtcaagtggaagtgagcctaactgcatagacttcactgggctgttaagagaataaaatgaaataactgtaaacagaagtgcctagtgcacatgcaaaggattattggggctttctacccttcagggattagaagttgatagtaggcaacaagttataagaaatacagtcaattgtctgctgaccagggctagagttaattgtctctggaaaaaaggacttgcctctctttctcttcttcctccaaaacttaagacgtttgcagctgaatccccaacaggattttgttttcctttgggagagaggaaacagaccaatatacccccaaaactaaccccataatttcatttcagcagtaaagtgaggtccttgataactgccctgcccaacctgcagggtggttgggaaactctgaatggtcatgcatggggaagcattttgtccactgtaaagagctctccggagatgataaatctcatcagaaggcttcatgcttgaggcatggattcttggaaaaacaatcactctacgtatgtggtcagaatctaaaggagatgctggggagaggagctaggtcagtctccaaagtggaacagtagaaactaatcatgtggagcctaaacttatgaaggtttttaaaatcagaattggccaccttcctttggaccatgagctcagattgtgaggtgtgactaggtcacgtctccttcctgcccctgtttccctcctctccctacctgtccctccttgaccccaggaaaaattgccgggatatgaaagttaattatgacccaagggaattggtacagatggggaagaaagaaatgcattcaagagcatttccatcagtattgaaattacacagaaggctggtgaatttgggctatccattcttgcctccctctgtgcccataattccttggcctccttcaatttcattttccctttggttcagaggaatgcttgatggcttaagctagcctcagttggccaagcattggagaaacagagaggtgtatgacacagctacactcccatggggcttacagggcaaggtgagagaagacagaagttgtatgtgctgggtgccacgtggtagctacaaactagaaatgagaccaggttcggaagaggaagagggcttgcagacctgagtcatggggacagtttcttcaggaaatgggatctcagctctgccttgtatgcagggcttacataataaatatgtttcattgttgttgttgttattgttgatttaataagattttgttttaagaagattttgtaaaaacaactgaacaaatgcaatctcctgccagagcaggcagcagcaaaggagattaggaatataacccccttggagacgttccttcacctacctggtgctggattacctaaaagcttcagctaagtagggtcacccccccaagaaattattttaaaaaaattgaaatctgatatttttagaaaatcttatcaaggatatttaattggactatttacacctatttagggtcagtcggttttggacaagtatgcaggggtcttggaatcagaccactggggtcaaatcctagttctgtcacttcctagctgggtgaccttggacaaagttacctgacttctaatagcttcagattcctcatgggcaaaatagaaatgctactagtacttaatagtgctctgagaaggattcaatgagaaggattaaatgtatgtaaagcacagtgtttgcccataggaagctgttatttataagggaggggagcatcctaaggtcctccgaatttaggagaactaaaaatcttacactgacttctcccttcaacagcaccttcagaatctccttcatttttcatactgttctttcaaccctttgatgaatgagaaattaggcattctttccctgcagattttcccaaaccttctgctttggccaataaacatatttttagtcccaatcttgcatgctcctttgggacttttcatctgataaacatcccctcctgtgctcttgaatccaatacccttcttccctgccctccacccagagtctccttgtatctgctgttaggcacaatgatgaccccaccaaggtcagacaatggctgtggcctcacctggaccttgatgacccacatagcctagagcccagggatcagccactgatggaggcccagagggcagttggaaaacttcacaagacaatccagcctgattgttttgacatgcctgacttcaggctgctaaaaatgagctcgaggaatcagataggaaaaagagataggtgatgcaattttattccatctcccaattttctgagtcaagagttgtttgtttaactccagttaaattagtatttatccaaatttcctgggtgcttgtccaaagaaaagtaccccagatctacaaattagaatctgggactgggacttaggaattggcacttttacaattataccagatgtttctaatatgggtacttcaaccactacccttatagaagtgctgcctaggaccctctcttctggcaggtgaagtggaaggaggttttgtcgaagggagattctccacttcaacttgagtgtctcggcttgtatccgctttgtttggttctatttcaccaaaggctttcatcttcacataaattttcttcagctttaaataattagttttggtaaccattggtatactggaaagaacattagatttggagtccaggtggcttgagttcaattctctgctctgccatttaccagctgtgtgacattgggcaagttgccaacctatctatgtcatttcctcatgtaaagataatcccacttcaccaggccacttttgaggacccagtgaaatgatgtgtaaccattttaggaacactggatcattctacagtgcaattttttacatcagcttggagcctaccatgtaggcattcaaatccactgagtgtatggagctccgtgcacaaataaaaggacttctcttttctgcccgtgtacaactttggtttccttaatcaatagaatccatgacaatcctgggccatggtataaagatgggactttcttcctgtgaaggagtctggtctgaacatcttccaaactccaacataactgatgtcatttctccacccaaccccatttgctgtctcctgactcaattgctagagaagccacttaaggaaggttcctggagttaaggctgtgtctgggccagtgtagcgagcagttttcaacagtcagtcctctttatcttctcttttcctgcgagcctttactaagcactgcctcctcctgtctccttactgcatctcctgatggaatgcacaggtaaatctccttggagagtaccagccaggaacagtccacagccaaggccaccgatcctcaccgctgagctccatctttcctttcaagctgtccttcccctcccctccccaccatcaccatagcaacacagtggtataaaaaaatgaaagcgctaaggcatctaaatatagtctgagtatcaactcttccagcatggagccgaaaacctagggaatgacagctagaggcatccagacgataactggcagccaggagggtggataagtcaaaggaaggggtcaaggaaagaggggaaggaaagggaaccatcacttgctgagcctgctgcctgtgctttctcatgtcacccgcacgacaacccaatgtgaatgttatcatctccaggtaactgctgaagaaacggaagctcaaagaggtaagagatttggccaaggtcacacagctataagcagtagaactaagattttaactcaagtttctatggccccagagtttatgtgtttctctctccataccacagggacaggtgcaagtgagagattttgctggaagcactgggctttttgagcaggccatataaaaattctgagcccagagctcaactaaattattggaagagactgggccaaatataaggcttctatctaagcagcacctgtgtttctcaaggactgaggaaaatgaagggggagggttggcaaggctgcatttcccagggtgcgtgattatatggcatgggggtgggggccattatgatgcccggacatggaacttacaccagtgcagaaagggtgtgattagaagccctaagccagagaatgttcagtgtgataaatgccattattttttccctcattcattcaatagattttttttttagatggagtctcactctgtcgcccaggctggagtgcagtggcaccatctcagctcacggtaacctctgcctcctgggttcaagcaattcttgtggtccagcttcctgagtagctgggattacagatgtgcaccaccacgcctggctgatttttttttttttttttttttttgtattttttagtagagacagggtttcaccatgttggccaggctggtctcgaactcctgaccccaagtgatccacccacctccacatcccaaagtgctgtggttacaggtgtgagctaccgtgcctagcctcattcaacagatatttttattaagcatctgatgtgtgcttaactctggaaatataggggtgattagaacaaatgcagctcctgcccttgt

SEQ ID NO: 6469 - DNA, 6000 bp, Homo sapiens
cagatatgggtttcagttctgattctggttcttactagctgtgggatttggggcaagttacttaacattctctgtcttggtatacacttctataaatggagaaagtggttgtgaatactaaattggataaagattataagcacacttagcataggttctgggccacattactccaaaaattttagcgaatattgtgtaagctgtccttcattggtttgacacaggtgctttgaaatgagttgaagtaacaaaactgtgcttttgtcttctgtttctcagaccctaagtaaaccacaaactgggtatattttgctatcactacactttaaaaatctggagttcaagagtttccagataataacttaaaaaccattttgttgtcaaatagtggcccggcagcctgtttgaatctcctaggccaatagttctactgtatcaaaatcacctggaggacttgttttaaaacatagattgctgggccccatctccagcgtttttcattcagtgagtttggggttggtacttaagaatttgcacttaaatgttcccagatgatgctgttggttggggatgaggtcactcttcaacaacttctgccctaggcctaggagaaagaataagcaagcttccttgacctgtagctctgtccttataatagacctgcgttcaaatgcaaacacattctaagaatctttcagtactcctgtttcatgctttaacatctggcctaatgtcatcctactgggaagttagatggaaactcatgtggattcatagagtaattctatcagtctttaaataagtagtcaaaagtttttttaaaaagtttaaaaatttttaaaaagtagtcaaaggtagtaaaatcttagggacataaagcattttaaaccttacctgtccttatgataactaatactgtcatgcaaaatccagtgagacgacttgttcagagccgtgtgtaggagcagctgcctacgtgatgtgattttgagaacaccacaaaagacttcctgttcccaaatatctcttctcactgtgaatgatgccaacaattattgtaccatctctagcttttttattccacaattagcaaaatggtctaaaatacagataaccctgctaaaaatcatccattgaatttattaaattgactctgggtaatccagtgtatctatataaagcagtgttttgtttatatacgtcctccactcctcccatacacaaaccagttttatctgcttaattcttttataagtagacagtgtggatgaaaacatgctttcacttttgcctgtgtttggttgggaggtagagttgggaattagagctagaggaagataggaagggtatgggggaaaacctaaaagcacggagggccataaatgaggagggttgcttagaggggggattcagaaaggggagacagcaaagcttttgtctcattgttagttttgtttgtttgtttgttttttgagacagggtctcattatgtcacccaggctggagtgcagtggcacaattagagcttactgtaggcttaagtgatcctcccacctcccaagtaggaccacagacacacaccaccaccacactcgactaattttttctttttctttttttttaattattattttttttgagacggagttttgctcttgttgcccaggctggagtgcaatggcacgatcgtggcttactgcaacctccacctcctgggttcaagtgattctcctgcctcagcctcccgagtagctgggattacaggcatgcgccatcatgcctggctaattttgtatttttagtagagacagggtttctccatgttggtcaggctggtcttgaactcctgacctcaggtgatccgcccacctcagcctcccaaagtgctgggattataggcatgagccactgtgcccggcctttattttgatttttatttattttttgagacggagttttgctcttgttgcccaggctggagtgcaatggcgccatctcagctcacagcaacctctacttcccgacttcaagcaattctcctgtctcagcctctcaagtagctgggattacaggcacccgccaccacatccggctaatttttgtatttttagtagagacggggtttcgccacgttgggcaggctggtctcgagctcctgacctcatgatccacccatctcagcctcccaaagtgctgggattacaggtgtgagccatcgcacctggcctaattttttttattattttggtagagacagagtctcactgtgttatccaggctggtctcaaactcctgggctcaagcaatttgcccatctcagcctcccaaagtgctgggattacagatgtgagccaccatgcccagcctcattcctttttaatcactggaattatatttgtttatcagaagttttaagtttgcacctttttttcctagacatattaacagtgcattaagctcctgaaatttgccttgcctttccagtagtttcttagaagtggctggtaaatattcccactgcttccccaaagggcaactagaagcttgcatgtcaaggcttgaaaccttgcatagagtcttctaagctgttggccagggctgacatgacagagcctaagtgataaagagttctccatggctgcttacaaaagcacaggttgctggttatcactttaccccaaggcttgtaacagtgaattgaaccatcataagcactaccttagaaaatttattcatttaaattaatatggcatactaatctattaaaacaattttaagctggaatttgcaacatcttgctttcataaaaacagacatttgggccgagtgtggtggctcatgcctgtaatcccagcactttgggaggctgaattgggtagaccacttgaggccaggagttggagaccagcctgcccaacatagcaaaaccccatctctactaaaaatacaaaaattagccaggtgtggtggtgcgtgattgtagtcccagctactcaggaggctgaggcacgagaagtatttgagcccggaggcagaggttgcagtgagcagagactgcgccactgcactccagcctgggtaacagtaagactctgtctcaaaaacaaaacaaaacaaaagacttatttgtatgtaattgttagtagtgtaattctgaaaagcttttaaaatctgctcttacagggtgaaaggttgagccatgcagtaggctgtgcttttgcagcctgtttagagcgcaagcagaagcgggagaaggaatgtggagtgactgctacttttgatgctagtcggaccacttttacaagagaaggatcattccgtgtcacaacagccactgaacaagcagaaagagaggagatcatgaaacaaatgcaagatgccaagaaaggtacaatctgttctacagtgtgtatttatggaatgcagtttttcccaacaaggtattattttgaagctaccaggggtaaattttctcataatcaaagagaacccttagcaatataaaaccttataacaaagttgaaaatcttaaaaaccgcttcctttagagtggctagtttaatggcttcaaaaatatttactccattatagtaagctatctgaggaatcagagtgcagttgaagaagctgcagagacatctcttacccccttcctcccatcctgaaatacctttttaattctgatgtatctgatctctttgagaagcaaatgaatcaagtacctgcatcttaaaggaagcagcagaggtcccagggcttaaggctgcaaagcatccacggactatgatgctagcagagagatttaacagtaatactgtttatatgatattattgctgttttttagtgctttctagtcacaaaagtctatagattttgagaggtaagcctataactctttttttctatagccctgttaatttaatttagtgtgtgattttatagagtgtgagttttatttaggtacacatggcatcacagcagaaatgcctgtacaaacattcaagttagttggcagtctataaatgtgagttgggtatattttacaactaaatgatagggcttgaaaatacttttgaattcttgtatataagtagggttaaaaccaacaagacaagcacaaacaattcaagttaactaatagacattaatataattttgaggccaggtatagtggcttacagctgtaatctcaatactttaggaggctgaggaggaaacatcacttgaggccaggagtttgtgaccagactgtgcaacatagactctatcccttaaaaaaaaaaaaaaaaaaaaaaaaaaaaaaaaattgccatatttggtggtgcacatccgtaatcctagctgcttgggaggctgagaccagaggattgctggagcccaggagtacaaggttacagtgagctgtgatcataccactgcactcctccagcctgggtaacagcaaaaccctgtctcttaaaaacaaacaaatatatatatatgataattttttttactataaccttttagttctaaactagtcatttttgttgttgttgttttggtttgatttcggtgttttttttttttttgagacagagtgtagttctgttgcccaggctggaatgtagtggcgcagtctccgctgactgccgccttcacctcctgggctcaagcgattctcctgcctcagcctcctgagtagctgggattacaggtgaatgcaaccacacccagctaatgtttgtatttttagtagagatggactttcgccatgttggccaggctggtcttgaactcctgacctcaggtgatctgcctgccttggcctcccaaagtgctgggattacaggtgtgagccaccgcacctgaccttaaaccagcccttttggttagcatcattgactaatactgacccaaacagctctaattcttaagccccctccaaaaaaaaagcatacatatttttatttgaaatgaaattattgatagtgattttttttcatttcttgtaaatatttgcaccaggaagccaaaggggggaaaaatcatgctatctgtactagaaaatttaacctgtattactgttatctaatatgctttagtggtcttcagactattcactaattaagcatgttctttaataccaccaaataatattcattgttatgcacaacaactgcaaagagattgagtcccaagatctacaaaggattgtgagagttggtggttgagatttgtcacaatcagaatgggactcaactggtacccacagtcttacatttactcaaatttaatccagttcaaaattttactactgcatgcttttattcaaatgaaccacaaatgcatgatttaaagactgctttaggtcgggcgtggtggctcatacctgtaatcccagcaccttgagaggcggaggcaggtggatcacctgaggtcaggagttcatgaccagcctggccaacaatggtaaaacctcgtgtgtattaaaaataccaaatgagttgggcgtggtggtgtgcacctgtaatcccagctacttgggagtctgaggcaggagaatcacttgaacctgggaggtggaggttgcagtgagccaagatggtgccattgcactccagcctggacaaaaagagcaaaactgcatctcaaacaataaataaataaataaataaataaataaagactgttatatatgacattctttgacacctaatcaaagatatatggttaagcttatgcttatttagacctttctaatgctacagttcccaaagttctcctcccctaacacacaagcattgaaaatcatgaatcattctttaaaagactacatattaggaattcataggaactgagtttttaagatctttttcacagtcttaatttataaatcactgaatgagaataaaagatctaacatttctgtcttagtagatatgctttgtgacatatagtacattactaagccttttatctgtctgaaaaatggatccgaaccctgcttctaacttatg

SEQ ID NO: 6470 - DNA, 6000 bp, Homo sapiens
cattcccaacccctcagcctgttatagctgttgatgtccctttctggcatgatttaggcactagtgatacactgtctcactacgaccatccaggtatcaggtctgagtggctcgaagtacttgatgcgacagggcatggtggctcacggctgtcatcccagcactttgggaggccgaggcgggtggatcacctgaagtcaggagttcgagaccagcctggccaacatggtgaaaccctgtctccactaaaaataaaaaaattagctgggcgtggtgacgggtgcctgtaatcacagctactcgggaggctgaggcaggagaattggttgaacccagaaggcagaggttgcagtgagctgagatcgtgccattgcactccggcttgggcaacaagagcaaaacttggtgtcaagaaaaaaaaaaaagtacttgatgcaagaaattagacactctaataggaccactgatactcactgtagaaacaaagccaggtttctcaaacaatgggtcatggaaaatccaaggaataaggtctcttacccttagtgttcctcattgttcaaatgtgtactgtagaagcatggtcaaaatctgaaaacatatgttagtgagttctaggaatgtgataagcccttggcactttaagggctagactaactgtgcagttatgtaaaaacaaaaaaaaaataccataaaagaatacttacattaacaaatgggaagaaaaaagccacatataagtatgtacattgggctatcgttttattaaaaaagaatactccaaaatatagtagtgtttatttttggataatgagactacaggtgatttttgttttttcttttggtacttcccatgtttcccaaactttctgtattgagcatgaattactctcttaagttactttacaaacatctcaagtttggtgccaactctgtgttcccatatatggtgttgttgctggacaccacgtatgactccaacgtgtccagaaaccaccggggtcccccaatagggctagtagcaatctagcagcaactccaggcctgtaaggggttagtgctagaacattacccacctcagtggctctgatcagtttgggaaaacctcaataattatccaacttggtaaaatactttaggtgtcccctttgaaccaaaagagatctctgaaaaggcccaaggaactactttatacatcctctacacgtttaagataatctgaacacatagtagagatctgccagactatggacatgggagctgtaatcctcacaagccgggagagccggggagagggtccgagtgggccggcgcggggggcgccaggttgccagccccagacccgaaatcccaggcaggcccagggagaggggactctcgggtggcttctccttacttcgtgtctttgcctttgctcttgcctttctttttgtcctttcccttcgacggcatcttggcttccccaggggctccgctgtcgtagttgcccagccgcggccgccctggccagctctgtctccaagggaaccgggacgccgagctggcaatgccccacccgcgccgctgacggcgcgcggagagcgcacgcgcccgtgacgtagcccaggcgccgcggcgcgcggggtggggcggaggtcgcgccgagggcggcgggctgccgcgcaagggtggcgcgcgcgcggtgagtgtgcgagtgtcggcggcgccggatcctctacgtggggcccgggctctgcgggcgggaggcgggagctggcagccccaggcggtagcgcttcgtcctgcggcctgggtgtgtcaggagtcgctgcggtcggggcgcccttgcctcaggagacttagatccccgctgatccgcccgtcccgccgcagtggtctgagccgcagccctttcccgtgccgcccgcgggtcccgttcctcccgtgtctccatgccgcagccagcgtggccgcggctaccttgccctcgcccccgctccgcttctgccgctcccggcactgccttactcctttgggttgcatctctttcctggcttttcacccttgctgattctgtaagggatagtgcagccagcggacgtcccaggccaaatgttttttgataggcagtcgaggactttcccgagggcggtggttgagggcgaggctgccagcctccgaagagcagcggcacgccagggagccgggcggggaggggagtgctgccaccgaggtcgggagcagggtcctcggcctcactaggtcctgtgtggccgatacttcctgcccacgaccgccccccggatttccatttgctaataccggtccgcagccttctttcctgaaagttgcataaagttggaagctcttcaacttgcctccccgactcctgaaatcccgaatacacctctgaaaaggagtgtactcacaagtattctcatttttcaatgagagtcagtcagtgagtcattaaggaaggtacggtattctgagtgccaagccaatagttaggagacttgtggttgaagctctgctctgttatactccatttcaaattaaaaagtttattttaaatgtggttgtagatccttcgtcaccatttctctagggaggacttaatccgtacactccttcccgatgtctttgacctctaattactcccctccgccttgtttcccacttgcatagtttctgtttctgaatttctgtttcttctgagggaacatgccgatttggtaatgataagccttgtaaacttttttttttttttttctgagagagagtcttctgtcacccaggctggagtgcagtggggcatctcggctccctgcaacctccacctccttggttcaagcgattctcctgcctcagcctccccagtaagtgggactacaggtgcatgccaccacacccggctaatttttgtatttttggtagagatggagtttcaccatgctggccaggctggtctcgaactcctggcctcaggtgatccacctgcctcggcctcccaaagtgttgagattacaggcgtgggccaccgccccggctgtaaaccttttttttgagacaagagttttgctcttgttgcctaggctggagtgcaatggcgcaatctcggctcaccacaacctctgcctcccgggttcaagcaattctcctgcctcagcctccccagtaacagactataggtgcgtgccaccatgccaggctaatttttgtatttttggtagagacagagtttcaccatgctagccaggctggtcttgaactcctggcctcaggtgatccacccgccttggtctcccaaagtgttgagatttacaggcatgagccaccgcccccggctgtaaaattttttttttttttttttgagacagagttttgctcttgttgcccaggctggagtgcaatggcacgatctcggctcaccgcaacctccacctcccagttcaagcgattctcctgcctcagcctcccgagtagctgggattacaggcacacaccaccatccctggctaattttgtatttttagtagagacagggtttctccatgttggtcaggctggcgtaaaccttattatacataccatctgccagcatgatcatggctttttcttttctttttttttgagatggagtttcgctcttgtttcccaggctggagtgcaatagcacgatctcggcccaccgcagcctccacctcccaggttcaagcaattctcctgcctcagcctcccgagtagctgggaatccaggcatgcgccaccatgcccggctacttttgtaattttagtagacacggggtttctccattttggtcaggctagtctcgaacttccaacctcaggtgatccgcccgcctcggcctaccaaagtactgggattacaggcgtgagccaccacgcctggccgatcatagctttttctgagtgtatttctggtatactttcacactcccgtgagtccataggcggaatcgccatatattgaagagtttatctctgatgtaaaatctataaagttaccattaattttgtatgtgtaaggttctgaaaaagcacactgttgataagctgcagaaaagagagtagggcatcttctgtcacaggctgtatatttggaatttattctagaaattggtaactttataatatgaaagtcagtccaagactcctcatttgaacataggcttacagattaatgtatgaacataaaaatttgactataacaagattattaatgtatgcgtagtaccttagttatagtactttatagtttcttttattggtttttgggttttttgatggtttttttgagatagggtcttactcttaaccatgctggagtacagtggcaggatcatggctcattacagcttcgacctcctggacttaagtgatcctcccacctcagcctctggcatagctgggactgtaggcatgcaccaccatgcctggctaattttgtattttttgtagagacagggttttgccatgttgcctaggctggtcttgaactcctgagctcaggtgatcctcctgccttggcctcccaaagtgctgggattacaggcatgagtcgccacacttggcctagtttattttattgtattatatatattttttattgactaagtttgattttgtagataaagctgttgtgacatgaatatggctcagggaaatgccaagatttcatactctggtagaggtggatatagagtctacattcttctgaatcccctcattttctaccaaagaactggatgttgttactgtcatctgctggtgagcaacaactgatagtacagatagtagagtaggaagttgctatttagtagtttatctggtagcatttccttccacagttactggtaggtgcctttactatgaagttccaggaattattactaaataaattttccttgtttcattgtttagaacactaatgcttttaaacttggaataagccacttcatgttttgttgacttggttttgtaattctttttctgtccagttttccttgttcctggtcaacaaagaaatgtggagtgtcttggctgaatcctcatacagacaagatcattatggtgctgttaggtaggacttgtatccagatgtaaggtaatatctccactagcttaaatttataaatgtatttcaaatgttcctgaatggtggttttctttttttcctgaatttaattctctgttttttgccaagtgatgttaattttgtccaacaagccatatataaaatttagaactattatgtatcaaaatagatagaatttctggctggtcatggtggttcatgcctgtaatcctaacactttgggaggccaaggcagacggattgcttaagcccaggagttcaagaccagtctggacaacatggcaaaaccctgtctttacaaaaaatacaaaaattagctgggtgtggtggccatgtacctgtagttccagctactcaggaggctgagttcagaggatcacctgagcccagggagatcatggctgcagtgagccgtgccactgtattccagcctgagcaatggtgtgactgtttctcaaaaaaaaaagggggggcggggggtgggtagtacttctgcttttttcttctagtaggtccaaaactgggtttactttataaattcatctataactttattcgggtttaccttagaggccatgtttcccttcataaatcattcttgagatcaccttatagcagatggtactttataggtggatcagtctaagtgaacaactttagattttgtttctacatagcctttagaatcctgaataaatatattattatccaaactgtttcttatgggagttactttctttttttttttttttgagaggtagtcttgctctgtcgcccaggctggagtgcagtggcacaatcttgtctcacttcaactctgcctcccaggttcaagcaattctcctgcctcagcctcccgagtagctgggattacagatgcctgccaccatgcccggctaatt

SEQ ID NO: 6471 - DNA, 6000 bp, Homo sapiens
gaaatctcatctctactgaacatataaaaattagctgggtggggtggcacacacctgtaatcccagctactcaggaggctgaggtgggaggatttttttgaacctgggaggcagaggttgcagtgagccaagatcataccactgtactccagcctgggcaacagagtgagactccatccttaaaaaaaaaaaaaaaagaaagaaagaaacagaatttttttttttttttttgagatggagtctcgctctgtcacccatcctggagtgcagtggcacaatctcaactcactgcaagctccgcctcctgggttcacgccattctcctgccgcagcctcccgagtagctgggactacaggcgcccgccaccacgcccagctattttttttttttatttttagtagagacggggtttcaccgtgttagccaggatggtctcgatctcctgacctcgtgttccacccacctcggcctcccaaagtgctgggattacaggtgtgagccaccacacccggccagaaacagaattattaaagaattctctatgtggaaactttaagagcaactggtatgtaaaagttttaagatctggaaagctggccgggcatggtggatcacgcctgtaatctcagcactttgggaggccgaggcaggtggatcacgaggtcaagagatcgagaccatcctgaccaacatggtgaaaccccatctcgactaaaaatacaaaaaattagctgggtgtggtggcgcacgcctgtagtcccagctacttaggaggctgaggcaggagaatcacttgaacccaggaggcagaggttgcagtgagccaaaaccacaccactgcactctagcctggcaagagtgagactccatctccaaaaaaaaaaaaaaagatctggaaagctctggtggtgtatctcattttaaagcaaagcataatctaagactgataagaaaaaaacaataatgacatctttgctggtgtgacagatgcctctagttattagatactcttaagagttttcttaggggtctaacttgagagcagaagacagttaatttctttctcacatccttcattcctcagcatacagggaattccttgaagatttcttttgataactggctgtgtcattctaaaagaaaaaaatacataaaaaattcagtgcagttttctcacatctgagctctgatattaaaccttaaagttgttgtaggatttatatgaaccagaattctctaattgtgtattttgaattattactttaatgctataacaacacatgctcacattcctatgtactgtcaaaggtttaatgaatttagtggtttttcttctaaaaccaggtttgacttaatatgactcccacatttattgtattaacaatagtttacttcttagacatgagtggaagtgcaaagtaaagtgctttactaaagtcaaaaatcagctgggcatggtggctcacacttgtagtcccaacactttgggaggccaaggcggacagattgcttgagcttaggagttcgagaccagcctgggcaacatggcaaaaccccatctctagaaaaagtataaaaattagctgggtgtggcagtgcatgactgtggtcccagctacttgggatgctgaggcaagaggattgcctgagcccaggaggtcgagcctgcagtgagccaagactgtgccactgcactccagcctgggcaacagagtaaaaccctgtctcaaaaaaaaagtaaaaaatcttgagacaatagtatatcttactttatagcctacggttattatattacttctaagattttagtcaaaattaaagtatcaaaaaaggtctgaaatggaaagatatagtctatagggaaagaaagaagcccaaattttaaaatatgttaggatgattgataggagagaatttaaatctggtgaaactttaaaaaagacttctctgttgccttctttatgttcttgactgaagcgatgttttcagagagctgaaaatattccattcttttccagattgcaaaagttgagaagctcaaaccattagaggtagagctgcgacgcctagaagacctttcagaatctattgttaatgattttgcctacatgaagaagagagaagaggagatgcgtgataccaacggtgagggggaaggcgactcttacttcttaagtgacccataaatgagacagtctccaaactttcaattctggtgtacccttttctcagttttgccaaggtgggtatatggaggggaaattgcttgcttcgctgttgttgctgctaaaggtaaatgagccttgttagattttcaagagagtagaaactcctactgtgataggcaggtgacaacatcctcaattagtctatacccacatcaaactgatagcaccaatctttgtaattttcaacatttatatataggataatgaacttttatttttatttatttacttatttttgagatggagtctcgctctgtcgctcaggctggagtacggtggtgcgatctcggctcactgcaacctccgcctcctgggttcaagcaattctcctgcctcagcctcccaagtagctgggactataggcacaagccaccatgcctggctaatttttcgtatttttaatagagacagagttagccaggatggtctcgatctcctgacttcatgatctgcctgcctcagcctcccagagtgctgggattacaggctgggattacaccatgcccagccaggataatgaacttaaaaagaaaaattatctgaaatcctactgttagacctagggacagagtgaagttaattaattgcctttacccacctcccctgccattgtttagccagctgaggaggctcacttcattatgtttacaatgcttttgtttttttttagagtcaacaaacactcgggtcctatacttcagcatcttttcaatgttctgtctcattggactagctacctggcaggtcttctacctgcgacgcttcttcaaggccaagaaattgattgagtaatgaatgaggcatattctcctcccaccttgtacctcagccagcagaacatcgctgggacgtgcctggcctaaggcatcctaccaacagcaccatcaaggcacgttggagctttcttgccagaactgatctcttttggtgtgggaggacatggggtaccacctacacccaacaagtcaatgagggacttctttttaatttggtaggattttgactggttttgcaacaataggtctattattagagtcacctatgacaaaaaataggggttacctagataatgccaaagtcagcatttgtcctgggttcccttgtgtgatctgtttggactatgttttcttttcttctcccacttgctcagcagcttgggcttccattctagttcttttaccaagatttttgtgtgaccatgttgacttcatttggattgccctctttcaatttccttgtgaaaacacccttaactttctctttacccttagctgaaatgtttacatagcttctggtgatatcttttcatgattttatatctcttaaaatggtgatggatgtgacacctcataaaagtgagctttgaactgtagataactcttaaagaaaatgtcattttagacaattaaaatatttgtgctcaactgcttgaacttttttcgtgtatgtgtatttaattctatgcaatattatcacatgtgtagattcatgtgaccaccatcacaagagacagaacagttctgtcacatggatcccttgcactgcccttttacagccgcagccacatccctttcttataccctcaccccaacctgtggctaccactgttctgtcctccatctctgtaattttgtcatttcaagaatgttgtatgaatggaatcatacagaatgtaatcttacgaggctgatcttttttcattcagcataattcccttgaaatccatccaagttgttgcatgtatgaatagtttcttcctttttttcttttaaaaatgttttatatatttagggggtataagtacagatttcttacatgcatatattgcatcgtggtgaagtgggggcagttccttttgattgctgagtagtattccatggtatggatgtaccacagtttgcttaaccattcacccactaaaggacataagagttgttttcagttttttgccctaataaagctgctgtgaacattcatgtacaggtttttatgtgaacatacattttcattttctgggataaatgctcaaaagggcaactgttgggttgtatggtaaacacatatatttttgtaagaaactaccctactctttttccagagtggctctactttttacatacagccactcatacaattcagacagcaatgtatgattgatccagtttcttcacatcctcaccagcatttggtattactactattttttatcttaaccattcacatagatgtgtgtaatgataccacatgtggttttaatttgcatttccaatggctaatgatgttgagtatctttttgtgtgctaatttgccatctatgtatcctcttcggtgaaatgtcttcatgtcttttgtctattttctatttaggtcatttgttctttttactattgagttttgagaggttttttatatatcctagataaaattcctctgttagatatgtggttgcttgaatttttaacataacttctaccaaggaaaaataagtaaaatttccaacccttgcatggccagtcacttacttaattcctgtccttcagtgttccatctagagaattaagagatatgatgtataaaatagacatcgagggccattaagagagtaaatacttaaaaatacatgttatgaaagcaaagccaataatcactgtaggagtatgagttgcctaagggccaaaactaatgtaaataagagaaagtgtggatataaatgaccattgtttataaacagttatgaaaaatgctgtgacttgaaatctttcccacatctcccaagaaagtaggtaggagtttatcctttccgtaatctctttttaaccctgctgactattacagggcttgtttaatcacagtggcaagaattacatgtatcttacagtaaagaaacagaatactggaatcgttagagaaccctgatgtgttgacctggataaagtacaaaggtggaagagggaatgagttatgctgttaaaatctcaggctattctgttaatgttcctgctactatgaacccaaactttttttttcccccttttgactccttgtgtcttcctctcctgtggcataaaagtagttctgtcgttaacttgtacaacattgccatctgctgttgagaattggtaggtactgcttctgagaacctggctgcagatccttagcataggcagcaaatgttgagaaagtctatctgtagtattacatatactaagttacagaggatgcatccaagtagagaaaataatatgtgggttaagatacatccttaaacttttttttttttggggggggggggacggagtcttgctgcaacgcccaggctggagtgcaatggcactatctcagctcgctgcaaccttcacctcctgggttcaagcaattctcctgcctcagcctcctgagtagctgggaatataggtgcacaccaccatgcctggctaatttttgtattttcagtagaagcagagtttcaccatattggccaggttggtctcgaactcctgacctcaagtgatctgcctgcctcagcctcccaaagtgctgggattacacgcgtgagccaccacacccagcctccatctttaaacttttaaatgtgaaatttctatcatgtaccgttagcctaacaagattttctttcctatttctgactggtgcctttcccctttttaggagcaacgaaagctactctcttagttatgttcttgtgatgtgacaaaatgtcaagaagataggagaagagaatattttatttcgttgatgcttttgttccca

SEQ ID NO: 6472 - DNA, 6000 bp, Homo sapiens
tcaacttttaaaatgtaagcctgctgcttcaggtgtgaacaagattgatttaagcttcctaatgtaaaaaataagtgtctgatagacaagacataagctgatgaaacaagattaacagttaaaaatcaacagtaggagtctaaaaggaggaagtggtccataaatttggatgggagcagagggaaaattacacctttattttcactaacttttactagaaattcagtatttcttaattatgaatataggcaacgaaccatagtaatattagcattatctgtgcctttgacgttatctaaaattacagcagtttttttgttttgttttgtttgagacggagtctcactctgtctcccaggctggagcacagtggcacaatctcggctcactgcaacctctgccttccaggttcaagcgattcacctgcctcagcctcccgagtagctgggattacccacaaccacacccggctaatttttgtattttagtagagacagggtttcaccatattggccaggctggtctcaaactcctgactgcaagtgatctgcccacctcggcctcccaaagtgctgggattacaggcgtgagccactgcacctggccaattacaggtattacatttgtcactacttctaagttatagtagtttaagactcacccctagatcacatgtgatcatggtctttctatctaaatgctagtgtgatgaggttggacaacaattgggcaactctcctcctaataatcattcagtcactaaatgatgacacctcacactggtgacccagacatctatgctgcttcccagtacccccgacctatgattgttaatcaaaggccaccctcccagtgtactgatcttacacaaactaaacaaaaacagtcttcatgttgttgtctttagaaaacaaaatttaactttcccagatttgaaatgatcttattatttaatgtattagtaaaacagcacatattactatgttacaaatgtgttttaataactgcatttgaatgtaattagtactctttgtaataatatgtattttattttaagccttaaaaacattattctggtaaggaatccatggcataaaaaagttaacaactctgatctaaggtaatgtaaagtataaagccttcatttattccttcatttcgttattcagtcagcaagaatttactaagtacctactataatattaggtcaaactatctgcaatcgtcagtatttgactgtttctgacctaccaaaatggcagtttcatatagttcaatctaacatttgtcaggcccaatctgtaaacccactaataagagagacagtaatggagtaaaagaacaacctttaaaaagggaaagactgatacttgcagcagaagttaaaagttttatgaaatgggtaagaggcagcacaccgaaagcaaaaagtcagaagaagggaaagtaaccagagggaattatccatttaattatcctgaacaagaatgacccaaatatactttcaaatctctattagtttctatgacctaacagtgataagaaacgtttcctcaaagctttcttaatgcttcaacaatttttttcaaattacaagtaatcttgtatcttacaagaagcccaccataaattcaatattaaaaccagtaaaaataatgccttacatttgtatagcacttacaaagtaatttcacatacattatgctatttgagtctaaccagacccctacaaaatagcctgggagatattatctctatttttcaggttacatagcacacacatatccaaaaggactcagggagaatcttaaaaatgaattttacctttaaaccagattctctctttactctgtgtcaagcaataattaaaggaggcaaaagagcaaagtgatcaaaatccagaaaagctaagtccaaatctcaatgcatcacttactctctatgggtcactgaggaaatttcctgataagactgagtttaaaaaagtgaaaataataacaccttcagatttaaaaagatataagatatagatgagataaagcctttatcgtcatctgtagtagctatatttatcattatcattcttttttttttttttgagatggaggtttgctcttgttgcccgggctggagtgcaatggtgagatctcagctcactgcaacctccacctcccaggttcaagccattctcctgtctcagcctcccgagtagctgagattacagatacccaccatcacgcccagctaatttctgtttttttagtagagatggggtttcaccatgttggccaggctggtcttgaactcctgacctcaggtgatccgctcacctcggctacccaaagtgctgggattacaggcataagccaacacacctagctattattcattcttattgtgatgatccagtaatcatgaaattggactcttaactaaaagaactcaggaaagcagtgtgggtcaatggacacaacacaggctatagaactctaatatcctgcctcagagttactatggtaagttacctgacctctctatattaccaccattttatcattgtaaaggcttttgagaaaattagcaaacgtaactaatgttgtagagtttggacatgcttttcttcaatacttaaacatttcaaaatcttctgttgggagttctgagcaagagttcaccaagagctactacttgcattttacaacatctagagctgatgttcacttatgggcccagaaagagagccttatctcatttctcatagctgatagggactgagtaacaagaccttaaatgacattatggatagaagctaaaaccagagttagataatccccaaggaatgacactagataaaagagtacataagtaaaagagaagagtatatagtaaaacagtatataagagtatataagtgaaagagtacaaagcacaggttgaaagcaggcttgctattacttactcttgacttatgacctcctcatcctctgaggatgatgctgtttcctccaggtcccgggccatcacgattggcatttcctttagggtttgtcatgcagtcagcagacgggggcctcagagacctttcctagcagattcactggatcaagcaatttggatggcacagattcctgcaagaaatcaacttgattggatcaattgacctgaaacacaatgcagttgtctatttattggttattgctgataatctaagtaatgaaaatgactatattcctaaacagtgctcaacctctagaagtttactttccataacatatggaatgtgcctcaatatgtgcctcaatatgccacaaaaatcaagatttttttcaaacatacagtctgtgctctatatatttgaagagctgttactaagtttgagtttctcattatttactaaatcgaatatgcaccaaaaggatagactcctcactttcactcagtttgaggcaggtgactgattccctaaaacatatattccttgctagacaaacctggcctgggttaaaaataaataaataaaaactcaaggtttaagacccttgcaggccgggcagggtggctcacgcctgtaatcccagtactttgggaggccaaggcgggcggatcacctgaggtcgggagttcgagaccagcctgactaacatggagaaaccccgtctttactaaaaaaaaaaaaaaaaaatacaaaaaattagccgggtgtgctggctcatgcctgtaatcccagctactcgggaggctgagggaggagaatcgcttgaacccgggaggcggaggttgcggtgagccaagatcgcgccattgcactccagcctgggcaacaagagtgaactccgtctcaaaaaaaaaaaaacaacaaaaaacccctgccaacatttatttagactctatgacaagcacgctgacaagatgccatcatgtttccagtaaaataaattcaacaatgaaccgaaagatgaatatattctcttgaatcaaaggtccatataaataggtgggggaggggaggaatgcccttccactcttaaaaattattcttcctaaaaatcacaaagtttggtacgactctcaaatagacgatgaaattaggaaatttccaacactgcatttctaacttaaaatattttttctaaagtaaaaaagtacatgttcgttgtgtgtgtcagaagaagaaataggaactacaaataaaagaaacatgtttaaatgaccataatcccaaattactcagcgataattacttgctgtcaatccttcttaacttttccatgcattcataaatacgatgagactgtaaataagacaaaaaaaaaacagaccccgataatgatcaaagatcttcggcgcaataggcaatgtctaacaacttcaatggctttcttcaggggattctcaacgggatttcttgatctttcccaaaatgctgggaagccctttaagtttaaacaaacaaaacctccaaacgggaagggatgccaacctctcctaggctgcctgcagagcggggagaaacaggtctatcggaagaagagtagagatactcacctaaggagactcctctcccgaaaggaatctgcttctcagccccacccccagctcaccccaatcccacgtaggtccgcagatgctccccccgggaaggacgggacgaccccgcagccgcgattcaacgcggcgcgcccggaagccaacagctactcccgggctctgagcgggaagtcctgctgcaggcgccagcccggacccgggaatgctcctccctagggtagggaagcgcgcgggcgcaggcgtttacctgtctcatcttcccatggttcggggcgagcaggcgtggaccgcgctctgcgcctacctccctcctccttccccaggaaggctcagggcagccgccgacggctgcttccccggttactacaacaaccaacaagcaaccgcccgctcggagccactgcgcaggcgctcataacgctcagctgcggacgcgggcgaatgtcgtcaccgccgcgcagcgcgggcgcagagccctgccctcagctgaagggagtcttcttttttttttttttttccgctgtttttttctccgcccctaagaggttgactccaaacccggagttccgctaggtccaacaggagggcttacggcgtgagcggcgtacctggggagaggcttaggcagcggcaaccgctgattggcagtaaaggggttcactccccatctcctgctcgggcgaaaccgggacagccaatcagagagagtactgacggaaacggcccaatcctggagcagggctgagggagggggcggggacaaatggctcaggtggactccgggctggagctgtcctgggggagcttgtttgcggcagcggctgctgctgccactgctgtgctgggggcccggtcgccaggtaaggagaatatgggggagaagagggatgtaggtgtctgtgttgcttctgattgagaggatccggagagtctggaaaaatggaggtgggatggaaggaagataactggaaggcaaccttttggggggaaaaggtttcgagaggcgatgacaagggggagctaggaagatggagaaggcttggtgaattcaaggaacgaaggaatggatgagcgaatgagcagccactatgagcctagcactgtacaaagagccttcactttttgtcatataattcttacaatagcccttcgggttgatatttctatctccattttgcagatgaggaaaccgagactgaaaagtgtaaatgacttacccagggtcacacagctactaagtggtagggccaggataagaatccctttctcctgattaagttttaacagcacacctatgctgggctgggcttggctgggctgggccagggccaggacaaaatttggaaatagatgttgtatacactctaagaggcccttaagctttagggaaattaggttgagaaattggcagagcaattcagaagtgctcaggctctgtcctcatcagctatc

SEQ ID NO: 6473 - DNA, 6000 bp, Homo sapiens
atctgcctgcctcagcctcccaaagtgctgggattacaggtgtgagccaatgcatctggccctcaccagacatttcaaagacctcagaatatagctcttcctttcacagacagaccagtagcaattcatcgatcaagagacttttactcagtgtcaactctgggcaaatcatcctattaggaaatatggaagaaaccccaaaacatttccaacataggcaaggagctctcattttagttggaaagtgaagagagtcctgtggttgaaaagaggagccctaaagatgtgggagacgctaaggtgcttaaattacatgatcccatttgatcatcatcaccacaaataacagcagcattcttattcccattttaccgatgagaatactgagagcagagaggttaaatgactagcagctcatggtcacacagctggtaaatggcaataaaatgctcattcttagtctgcttgactctcatagggccagaatccaagtgaagttttcatattgattttgcctccctattgattttgtcagggataagcataagttttagaaaaacaaaatgacatttgccgtgcttcccttcactccattccttaaggggagctgaggaaccactagctttagatctgaagctgtaatgtccttttctgttgataaacgatatttctaaataaataatcgtccttgtccatttgtgtttccacgaccagatctccttttcctgactgaatactcccttcccccactaacatcttcccacgttcgcttagcttctttctctctttccctttcctcatacacacagattcagacacacaccttcccacctcacacccatatgcaaaataaaattagaaataccacccgactcacaaggtatttggggaatggagatcttcagtcagtatacccaaacccaagcaccccagccagcctccctccctgccaagcccatgtgagaggcagacagagcttgtgaaaaggggcccagacggccacgattatgagacaaagctgctctgaagggaaaagggccatgtgtgcctccccatgtctgtcctgtggccactggaactcacaaggctaccagctgctcacggccaccatgtggcatatactgttctttcacttacatgtcagatccttttagaatgtgaaaaggtttcctggcctcttttttattttgatgtatgctgataaattacagaggaaacagtgtgtggttattcaagaatagaggctgagctgatcagcatatggccctcatttcaagggattgctcttgttttaatcagccagttgagaaagcaataaatgtttatttattaagtatgccatcaccgagaggagaggaacagggcaggtaggtgagctgcgacacccaggaaattgaggatggtgatggcaccaatattcctgcagtgtttgatgtttttaaggctctgctccccccaccccccactgtttgatacacattggtgtcactaccctcttggcgcatcacagtacccaccttagaatagcggagccctggaaggggaaggaaatagaaataagaaggtgggggtgaggctcaaagaagaagctccaagttcaagctctgtgtctggataaactcccattgtctttccttctctcaaatcagagctgcccgtgggtcccagggtgatgctgggctgtgtagaggctgagtgcaggagcattaatgctagaaccaggttcaagtccaggctctgtcacttaatggctgtatgaccttagacatgagacttagcttctctgagcttcaacctcctcatctccagaatggggctcagccagcttcacagatcaggctgagaggattaaggaagcatcttatgctaaaggcttagcacaatgcctgctacctagtaggggcccgataagtagtgtctaattatgatctaatcaagcagtgcttgccctgggcaggccctgtttaagggttttacatagattgtcatttaaccctcatatctctatttcacagatgaggaaactggaatctaagatcacactggaatttacagacgaagaaactggaatctgagatctcacagtagtgaatggtgaatattcaaacccaggtagacaggctccagagtcccaactcccaaccctctgtacacagcccttccgaggagatgacgctgatcttcatgggtgttgccctggcaagctgacctctcaagcccccagggttccttcagtccgagtggagagcagggaaggtcgtgggacctagccgagagggaagggcaggatgatggctggagaatccacatcagggctgaatcccaatctcccagctggaacgggcgctgaaaccaggcagggcgccccagcccgctcaaggggaatcgagaggggaggagggggcaagtccacgatgctgagactggcggccagagcaccgcccccaggagcggagggaggggtggcggggctggggggtgcccagctgccatccccgccgcttcctggcccttactcgctggcgcccaagtgggaagccagcagctgcccgctccctcctccccacatccccgctacttgcccagttcccgaagcgaagcgcaggctgcgagccagccgggccgagtccacaactttgcagcctcgggcagggcgagagccggcgtccggggctcctcttgtcggcgaccagagctcggtgagttgatttcctcacccctctgcgacggcggcagtgcggcggcggcggcgcggggggcggcttcccgtgcgtccgggaggcagtggccgagaagcccgcggctgccggcgctgccggtctttccaaggctccggctgtgccgccctctgccgcgggcgaggcgggcgccagggctgaacggacagctccctacaccccggggccccacgggcggtctctgctgtcccttctcccgcgcagggccagggctgaggctgcctgccgagcgcccctcactcccctagcccctgtccttcgccgccttcccagcgctgcggcgcatctggctgctcccgcgcccccctggcgaccggcgccgggaaggcacttgcttcgccggagccccaggccgagggctctctggggtgggcagcaccgccgcagcccccggcggcgcaggactgggggcgtgcccagcccccggcgaccaccctcaggcgtgcactgcgctgcgccccagcggtagggagaggcccacgctctccgcggaggctgcgggttcccggggggcgctgggacctgcaaaggggattccaaggtgaccagtcgacccgtgcggacgggacagcctggacggaggccccgtggcatccacccatcctaggtgcaaccgccttcccagaacttttctcgcgcctccggctggccgattccttagcccctggaaaagttctctcgggcgcacggaatcctatttctcggtggcttccgaagctggccaggaaccccggctgtgaggcgtggggtgggatggggacgtggtgagggctgagcacggcggcggggtcgatcccaggaaaggctggccaagcatccactcgtgcgcccagggcgggcttgtcggcatggaaaggatttcggcgccatgagggttgtttgggtttctctcagcaggagggcgggaggcgggcgcgaaggggggattttaatttcgcctcaaatgaaaacgctcttcgcaaagaaatagcccgggcagccagcgttggagagatgtgctggccaggacccgctgacacaggtattctggttgcgcccccacctcacccggtgcccgagagcgagtgtgagtgtatcgattgtttcaattgatttttttaaagctagatagcagaggctgcgtgtctgtacacgcagatatatacatacacaaatacagatactcaagcgcacacagattacacgtacagagtcacagacaaggacacacacacacacatcgtggtccctcacgcacacatacctccaaagagccttgggtaacctggtgaggtccctgagtgctgcccaagatgtgtgtgtgggtggggacgcagggacggagaaaggggagtgtgaagcaggatttccagcaggtcaagtgccgctgattctcctgcccccgaccccaaatccttccctttctcctcctagggaggtctgaaccagaaatcccaaacctgggcttgtttccacatccacagaggggaggagtcctatcccccggtgccccccaccctcacaactcctaaagactgcaaacgagtccctccctcctgtgccagactctgccgcgccaaggcgccgagctcgctcaaaaccccaggcaacactcacccccaggtggggcctagacccgaggccgctgcgggctcgggtctctggcctgcctgatccggggttagggaactggggaggggaaatccgcgggacagggggttgggggcgtggagtcgcgtgcagtgccccagacgcgcggcacggaggagcgggcgagggcgccccctggacgccgtagtcagtcagtcctcttctcaccccgggccccgcaggaatgtaatcgaggatgctggccctgcggctgctcaacgtggtggcccccgcctacttcttgtgcatctccctggtgaccttcgtgctgcagctcttcctcttcctgcccagcatgcgcgaggaccccgcggccgcccggctcttctcgcccgccctgctccacggggcgctcttcctattcctctcggccaacgccctgggcaattacgtccttgtcatccagaactccccagacgacctgggggcctgccagggggcctcggccaggaagactccatgcccctcacctagcacccacttctgccgagtgtgcgccagagtcaccctgaggcacgaccatcactgtttcttcaccggcaactgcatcggcagcaggaacatgcgcaacttcgtcctgttctgcctctacacctccctggcctgcctctactccatggtggccggcgtggcctacatctccgctgtcctttccatctccttcgcccaccccttggccttcctcacgctcctgcccacctccatcagccagttcttctccggtgagtgggccttggcgggcaggttgggctctacacaaagacctcccaccccaaaggttgccgggccccaaaccccaaccccaaaagttgccagatttagcaaataaaaatacagaccgtcccgctaaattaaaatttcagataaacaactcataattttttagtataattatgtcccagatattgtatgagatacactgagaaaatttgctattggctatctgaaatgcaaattaagcggacatgctgtattttattggtaacatccccccttgcccccatcattctcatccatcatgctgtccatatgctcacagagttgtggcatccaggtaatacacctgctctgtgccaggcaggactaggtgctggccattcctccatgtagccccatgaggtacaaccatgctatgacattcctctgcctggtccccagttctgcttacatgtcacccaaggactctgctctccagaggtctcaccaaccaattgcagtaatattgaacttgttgccagcccagcccagcaggaggctaagctctgtcctcctgcctattatgtttgacctcaccagcctgttctccagcctgctgatggctcagagcagagggaacgtgggtgggagaggcaggttttttgttttttttttttaagacagagtctcactccatcacacaggctgaagcgcagtggtgaaagcaatctctgcttactgtaacctctacctcccaggttcaagtgattctcttgcctcaacctcccgagtagctgggattacaggtgcgtgccaccacgccacactaatttttgtatttttagtagagatggtgttttactgtgttggccaggcgggccttgaactcttgacctaaagtgatccgcccaccttggcctcccaaagtgctgggatt

SEQ ID NO: 6474 - DNA, 6000 bp, Homo sapiens
ttagcttcctcatttccactgaggttagaatagaatatctagtttattttctttgagccttacttagtgtactgattcttgagggaggaggtgtggcatcctttgctctcattgggaacaaactacaccattacctctgaaatggcatgagtcagcatgtttcttagtatattttgtcatgcttggtgttcacattttcagcatatgagggaggtgatggataagtgactttttaaaaaagctgctgtaaagccatttataaagaatgacctattttattttaaaacttaatatcatccggtggtttcctacgagccgaggaatgaaacaaagtaaaggaaatgttgttccagagatgatgactttttttgaccattttcctttgtttcttttggtctactgcattgggtcaagtatttagggagaaagaagagattgagtcacagtttcagaaaagaaagggtgagttcaatttcctcattttcagctttttatttatttatttatttatttttggtcatgaatgaattcaccatgtataactttacaaagtcttcttctcaattcccctaccacccctcttcccacagcatcccaaactctgggtgtctctagaggctgataaactgttctcaaaaccaaataagagtcaaggcacctggagaggtttgggcagtggggagaggggattggctatcaatgtggatccagactaggccaatcctaagtgaagtatattgttgtctcctaacagctgttctgtggcctctgtgaaatgcggtggtggctttcatccagataccggacagctgttgcctcacaaagagcatcgccacaattagcattaactggctctttgttggtggcctccactggcaactcattgaatcttttctttccctgcctatctcctaccatctttatctccctttttctcttcatttttgctttccctctcctttttatttcctttgtctttttctccccctctgtcttaccagtaggtagcctggaaaaaaaagagaagcaacagttcctgagggaagaatgcattaacaactcggatgggtgctgtctgccagcactgcagaggaacctacggagagggctgctgggagagaatgctcatacctcccaaggcgtcagcctgccctcccgcccccaagttgctttgctcaaggtgtgtcagagtttactctgggattgtgtattttatccattgagcttctcctttcatcacaaggcagagaacacggctgtgtttgtggaatggatgggcccacagggaattttgagtgattcagtagttgtggtgtaagccgttcgtcataactccctgtcaggcagagtcactggaggcagtaggttatacagtttgtgattccttgctctgataagagcggcgctgttttaggcgttatgtatggcaaccatattctcaaatccaaaatcagcatgcctgctgtttccagacatttttggatttataatgtgtttatttgacatgtttttaagaaagtaaaaatgaaatgccattttttaaattatgcacttgacaaatcactggaattagaaagaataaaattccacgaaacaaaggcagcttgaaagtccatggtatgagttgttaacatgacagaactgtctggatgctcttctgctctttcaaataagaataaggaaatagtaatggcaactgttgtgcttaaaatttccaagtctgctttcagattatccaactttattttctcaatctcaattttagagtcaagaagaggactaaagaaagtcttgtgactcatatgcttgttattttccaaccagaaagaggcaacagtaggacatgatgctcttttactatgggaatataaaaaagttaaacaattttgcaaaggttttttcataaaaagcccaaagcattttgccctaggctgcttctctttggaatttaaaacccgtgtggaatatcgtatggggaaatgcaaccgacatgcccctcgttggtttgcatttaactcattacatgttgattgctaagaacacatacatgaccaagaagatagccaagccctttgaaagaacatatgaaatctaaacaaggagcctgagtcgggacagtcttaaacagatgtgaagtcctcacagcctttgccattttgaagattaaattactagcaaaccactttcaacaagggttttggttctcatagtaatgaccaggacccataacagacattaaagaaaaaaagtgaggcttatttagagttagggaaaatatcccaacacccgcttggactccctaattttggtaatctgctttctctcatctatatgatgggaaaagtcatactctgtcaccttaggattattctgttacttaatgagtataaaattacttgaaaatcaatgtggtaaatattcttaataactggaatgagcaattgtgcaccatgcataaaaaaagaaatagctttggagaaatgtaatttcttggatggacagattgtctatctgctagaggaatggccctcagttttgtgatgtgtttatcgttcatttagaaaaatgattgaagaaatctgagaaatgacataaccagattggctgtgtatctttttgttctcctatttaaaaaaaaattcccttcaaacacttctaacctcaataaataaataaataaaaagaaacaaaagcccccaacagagtcctaattctaacttataaccacttaaagtctggatatgctttgaacttcacatttaaaagaaaggtttttctgattttctatcaatccctctccttagcttgccatttacaaacatactttcctccttcagagcaaaagcaagtgagagagaattggtttaaagctgctgaagtctccactgcaggggagcactggtttaattcaatcaaggtagaatgaaggtctgagaaggggagagattctaaggcctgggcaattgagtggaagcagcatttcctgagtctacacctccttctgccattgttggtgggaactatggcaatatagctttcacatctccaccagttaaaatactgtgctatcaactccctgcctttgttctttcttttttcccataaggacattgagtagtttgagaagatacatgcagtaaatgtacattgcatatattagtaatattattttgctaacattgtatgctagtcatagggaaggtgtaatttttctatgtggtttatattatttttctaagctttgaagtcttttaacaatttcgtccatgagatgcaaattcaaaactcattaggagccaaactaatgaaaaaaatgaaagaatttgtagggaatgctgagggttgtgtcacaagagagggcattgcacaaggccaccacgttttacaattccagggcacccccattcacatcatattgtatgtgaatggtgccccctagtgtagagcaatgcagaggccctctacatgccctgttcattcattcattcaggacgtcctcaatgagccaactgtgcgccaagcatggttctaggtgttggggaggtagcagtgaacaaagtggacaagaatccctgctctcacggaacctaaaggcattcttttttgattattgtttttttaaaggcaaaaaagcaacctgccaaccaaacaaaatgcattaatatgcagaattcagctaacaggacgacaaattaatgactcttgtctaggcttttaaattatttctgtgatcatgaaggttttagccacatggaaaaaatacgcaatacgctaaccacaagcttgcacctactgcttagcttatgcctaagctctggctacatagaaaactcagctatctattacccagtatctaaaactcagtatctatcactgagaaaactcagtgatctattaggtaacacaggatgaaaaagtagaataaagtgggggtcatgccattctgccaaagcattgtctgcctaaatacctgtcctaaagactcatgggagaggcaagccaatgaacaatggtcaatgtggcaccttgaaccaattcagtcggctcttaacttcccatacatttaattaaaatttttttcaaacaaaaaggaagattccttaaagtatcaggtctcttaggggttatgctaacagaagcaggtgaaacaccaaatttaaagagctttcattaataatttctcagccttatggcttcttaatgctattcaatggaaagttttaattttatctgcaaaatgaagctaaaagaatgtcgcctagctccttccctgtctggaggaacttggattttttttttttttttcattagaagcttgggtaaaactaaaaagaaacctgtattcaagtttctgcaagaagctttaaagaaatgctgggatggtactcaaatagtttacaagttttccacctacaactcattttgcattttcttaaataagataatgactcaaaaaaatttaaaggacctaggtcacagatcttacaaagggttggagtcatggtataaaggtataaagattgtatataaatgttcatattttccaagaaacagagcaaagaccgcctgtgataactcttccttttttctacctgccttccaggatcctttctttccaaaacccctcataaattaatgataatgataatcagaagagagagtgttggccatatcaatctgcacattatattaaattacttttcccaaagtttggaagcatttcctgaaggctgtcaagggtattagtttttttctctctttaaatcacaaagcaaaattccactgtctctccccaaccccttctaaaaaaaaaaagttgtcgagttttgcttttctattcactgcaatcctggccaaagtaaagccctctttctcaatgacgtcaagatctttaccaagattaggctttcacttctctattgcagcaattagccagggaatgtataaaaggcgtcagggagactcactgggctgcagagagaggcactttgcaccacagacagatagcaagaagggaaagacagagagtgagaaaaaagaggagtcagtcgctcctggggaagggagagagtgagactgggagaaagagaagcacagaaagtgtgtgtaaaacggagtaaagaaagaaaaaaaaaaaactacccttaaagcacatttaaaaaaaaaaaaaactctggcaattcaagaaagaaacaggctacgtttaaagagcatagagacaatgaaaggctaaagaaaattttaaaatctctgccacagtctcataggtgcttggaaatgaaagtagaactgcctgtctttaacggactctgacagaggtaactggattagggacgagtacgccagctttttttttttttttttttttttttttttaacatcttaaatcctgaaaaaaaaaaaaaaaaaaaaaaaaaggcagcagctccgaattgaatgaattgatgggcacactccaactgctgggctggagagactggacttagtcttgccatttctgcttctttgaaagaggagacaacttgggcttccttttaatttagttttttttccccttctcccccaacccccaaccttcccccttacctcccccaccccctttatcaccaccccccttttaaataagagggtgaaggggaaccagagcgcacaagggaactgactcaggaggcagagaagatgggcatcctcagcgtagacttgctgatcacactgcaaattctgccagtttttttctccaactgcctcttcctggctctctatgactcggtcattctgctcaagcacgtggtgctgctgttgagccgctccaagtccactcgcggagagtggcggcgcatgctgacctcagagggactgcgctgcgtctggaagagcttcctcctcgatgcctacaaacaggtgagctgagctgagaagggcttctccctaggtctacaggggcaggggctcatatgctggggaccagaggccattgggagcattggggggagagctgtg

SEQ ID NO: 6475 - DNA, 6000 bp, Homo sapiens
aagaaagaggatgaaaactaccttaacttctgtctccttctcctttcttaactcctgctgctgcatttcatttgccaagcccaatcaggagtcaactggaaacagcacaaagattgcaattcatagaaatcagtcttccattgcaccaaacaggaaagagaaagtctgagagtggatctggaggaatggccaaatagagaataaacagcacatattgtgaaataaaaaccaaaatagacctagcaagataatgttggaaacagtaaaaataacacctaagaaaactaaattgtcaataaaaattatagaatattaaaaattataaatataaactatagaaacatacccagatgtaaaatgaacaaataagtggagaaaatctaaaataataaatatagatgctaaagattcaggaactgcaaaattgtagggatttctagtgatgaacaaaaattgtggctgtatgtttctctcttttatctacagtttctggcatagtatagccctctgatagaaatgggtgggtggatggatggatggatggataaatacaaaaaacagaaagaacagaggaaaccaaaatcaataatgacattaatttttttaactaaaagcaaaacaaaccaacactaaaagcagaaacactcttcgaaatgggaaatgtaagtcaattttaaagaaacaaaaatcaagccagccttggattcttctgctgcaacaatgcctgttgcatattctaatatagaacctccaaaaaaattagtttcacctaagaatttggaaccaactcaactcattattcatattcgtattcattttctaaaagaaaaacatagaattcttctacaacaaattatggtgattccttccgtgacactggttttactgataaacatatgtcctattgctttattttcttctctgcacacacaataactttgtttgaaagcattttaagcagcaataaaactcaacatgtattgcaccaatgatctaggaagctcagttaaagtgatgacactttataaaagttataaataactgatttataaatatttataaagttataaataactgagacaaagtacatgcatgggtaggcaattgaccactatggtttcagtgccctctggctgacaatgattgtaagacacatcaattataagacgtgtctcaattcccaagctgttaacatgtgaaacatgcatttcttgccatatttatccacaaaatatggcatattgaaccttagcaattacaacagcaaagttttgctactgaaaagctcacgggagcataagaaaaagcctgactacatgtgattcagaggaaataattataaatattattgacacaaaaaataaaaacacagtgagagtctctcagaaccacatgataaaataatcaagaatttaaaagacaagaggaataacaaaaagttaaaactaaaaagccaaggttttgccatccctaaaaggcaatccaaaatactatctctttatctgagtataactttacatggagttaggaatttttttggaatcctttattgtgatcattcatggaatttttttaaatgtgcatgctggcgggcgtctgtaatcccagctacttgggaggctgaggcaggagaatcgcttgaacccaggaggtggaggttacagtgagccaagttcgtgccactgcactccagcctgggtgacaggcaaaactctgtctcaaaaaaaaaaaaaagtgtgtacaatacaagtcttaaaaagcaaaagaaggctagatgtggtggctcatgcttgtaattccagaactttgggaggccaaggcgggagcatcacttgagcgcaggagttcaagaccagccggggcaacaatctctacacacacacacacacacacacacacacacatatatgtatacatttaagtttgtgtatatgtattaaagcaaaggaaacagaataacccataaaaatagacatgaaagagagaaaagacatagcagaaaatgtacaaagcataaaatagaataaccaaaagtagagctggtctacagttatcaccataaatgttcatttattcagcagcatttattgagtacctcgtatatgccaggtactgttccaatcactaagggtacagcagtctcttttcctgtggaacttacacacttgtcagaagacactgataattaacaaataaaccaaaataggctgtatgtaagataaatgctacacaggaaaaaaaaaaaaagcaagataggtgaatgggaagtgccaggtgaagtgtgtgttgcgttgtgtggtgtagcatgtattgtggtctgggtgagcggccttgaagcagatgagggaatgagcagatatccgaggtaatctacatttctccattaaagacagagtcttattttggattttaaaatcttgaaatatattgccaggagtgaaaaacttaaagctaaagtggagagaaaaaaatataaataaagatttgaacaagtatgtgaaacacactgggagagaaagcagaggcagtaatgttcatattcacacagagcaggaattttaggctgaaagtattcaataaacaaagttctttctgtgataaaatataaatagtacaaatatatcatattgagtcaatgctctaaaagaatacaagatatgtaaatatacaaaaatgaactataaggaacatgagaaggaatcaactgaagtgccaaagtagaatacatttgaaattgacagtgttaaatctttaatacatgaagatcaagataagactataagggaacattccatgtagaggaattaagatgttgtgttgaaatatagggcacatgtagtatactatagctaaatttcctagggatgacttattgatgataagaccaagcaggtaaactgaacccagttttccatttgagtcaagctaaagaatttcatcatgccattaaaagattattaacataatcatatttgtattttagaaagatcatatggggaatatactggaaaatgtaagatttttggccaagtgatatgttgataagaggctattttaaaagctgaaatgtgatgatgagggtctggattagaaaagtggccacaagtatgaagaaaacagtggcaaattatgaatgaaaccagtgggagtttgtgaaggattggctgtgaaataggaggaagtgtgtatagtcaagagttacacatagggcaactggatgagtaatgatatgatgaacatcatccgtagaacacagtatccaagggacttccatttccaattgtggcttcagtttgctgctgagaataatttaacaaaatacttagataaattattttttaaattgataacctgaaaagctaatagaaacaaccaggccaaactctaagggaaaacaaaaccttggtgatatggtttggctgtgtccccaactaaatctcaccttgaattgtagctcccataatccccatgtgttgtgggaggtacctggtaggaggtaatttaatcatgggggcaggcctttcccgtgctgttctggtgatagtgaataagtctcacaagatctgatggttttataaaaggagttcccctgcataagctctcttgcctgctaccatgtaagatgtgactttgctcctcatttgctttcagccatgattgtaaggcctcccccagccatgtggaactgtgagtcaattaaatctctttcctttataaattacccagtctcaggtatgtctttattagcagcatgcaaacaggctaatatacttggagaggtaaagagggcacacagtaccaaagtccttttgacctgaagagatttacaaattcctgcaaacttagactttgaatttggtggactaatgaagagttatggccctgagtctacccaggtagtgagaatatagatggtgtgccccaccatacaccagaacccctgagggctctacccttacgataaagattaatcagaggtaaatccatacacactcacacatatccccaaggaatacaacaaagtcgtcttgttaagtgagtaggaaaagaaaaagagagaaaaaaacctgtctgagaggttatggccattggaaggcccctgtgagatttgcagccctgatttgcattgtctgggattacaggtgcccaccaccacacccagctaatttttgtatttttagtagagatgaggtttcaccatgttggccaggctggtgtccacctcctgaccttaggtgatctgcccgcctcagcctcccaaagtgttgggattgcaggcatgagccactgctcccagccattcatgattttttaaacaaacatttattaaagcatgaatagaatgtaacttcttgattaagagtatctaggggggaaagaagctatagcaaatatccaatcatattttctaataacacaccaaaagcttttgctatgtcatctaccactgcctctattcatcattgtattggagggctgaattagtctagacaggcaagaacaatatattaaaagtgtgagattggagaggaaggagcccagctattcctgtaacagattatctaattgtggagatagacaacctcaggctcgtgtagctgaagcagagtaagcattgcagaaagtcataggagataaggtcagagagggactggaattcataccacggtggcccttggagggcattgcaaggattttgactcttactgagagagaggttgaagccatggagagttttgatgaggagagtggatgaagtgacttaacattttgaaagtgttactttggatgcttttttgagaacagactgaagggagctatgggcagaatcacagagaccaattcggaggcacaagagagatgacagtggcttgtacagggtgatagtggtgacagaggtgagaagtggatggagtctacatatatcatgaggctagagtcaataggatttctgatggattcgatgcagggtatgagagagaggaattaagaatgacattgaggggaggagccaagatggccgaataggaacagctccggtctacagctcccagcgtgagcgacacagaagacgggtgatttctgcatttccatctgaggtaccgggttcatctcactagggagtgccagacagtgggcgcaggccagttggtgcgcgcaccgtgcgcgagccgaagtagggcgaggcattgcctcacctgggaagcgcaaggggtcagggagttccctttccgagtcaaagaaaggggtgacggacgcacctggaaaatcgggtcactcccacccgaatattgcgcttttcagaccggcttaaaaaatggcgcaccacgagactatatcccacacctggctcggagggtcctacgcccacggaatctcgctgatggctagcacagcagtctgagatcaaactgcaaggcagcagcgaggctgggggaggggcgcccaccattgcccaggcttgcttaggtaaacaaagcagccgggaagctcgaactgggtggagcccaccacagctcaaggaggtctgcctgcctctgtaggctccacctctgggggcagggcacagacaaacaaaaagacagcagtaacctctgcagacttaaatgtccctgtctgacagctttgaagagagcagtggttctcccagcacgcagctggagatctgagaaccggcagactgcctcctcaagtgggtccctgacccctgacccccgagcagcctaactgggaggcaccccccagcaggggcacactgacacctcacacggcagggtattccaacagacctgcagctgagggtcctgtctgttagaaggaaaactaacaaacagaaaggacatccacaccaaaaacccatctgtacatcaccatcatcaaagaccaaaagtagataaaaccacaaagatggggaaaaaacagaacagaaaaactggaaactctaaaacgcagagcatctctcctcctccaaaggaacgcagttcctcaccagcaacggaa

SEQ ID NO: 6476 - DNA, 6000 bp, Homo sapiens
acatctagtgtagctttaaaccagctaggttcctttattttgcagagactgttgcttgcagcttctgggcacagggctgggctctgcagtgtatgggaagtgattgtccagcccatcccttttcttcttcacactgtttcctctaacagtgccaatatctgtcccttgcactgaccgcgagcatctctcattaggtgggtgctaggaagaagtgaaacacacatcagcctcttctgatacctgctgtgcagtgaaaaaagcctggggcttggggtcagaaatacctgaatggaagcccttggttctgcccaagactagctgggtaaccctaagcaattatttaacctcatgggacctcagtttgcttacttataaaacggggaagtaatgagtcatacctttcatacagcacttagacaaggacagccagggcccccccacctgggtcctgtgcttttagatcaatatttctcaatacttaatgtgcacacaaagccctggggattgtgttaagccacagattctggctcagtagatcctagccctgagattctgcatttataagaagctccctggtgatgcccatgctgctggtccagggaccacactttgagtggcaaggcctttcagggttttatgagaatttttttttttttttttagctggagtctcgccgttgtccagggtggagtatagtggtgcgatctctattcactgcaacctctgccccccaggttcaagcaattcttgtgcctcagcctcccaagtagctgggattacaggcacctgccaacatgccctgctaatttttctagttttagtagagatggggtttcaccatatcagccaggctggtctccaactcctggcctcaagtgatccgcccacctcggcctcccaaatgctgggattacagttgtgagccatggtgcctggccattttatgaggattaaataagcagatgtacataaacatggttagaagagtgcctcacacatgatgggtgctcagttgatgtcattcctctctgccttcctccttgaaagttttagaaaaagactcagtggaggagagagttcacgcgaaattattaggaccacagtgatcaggttacagaatggtgaagctggagatgactctagggtgcctagaggggggttcttaaattccacctttcccaggcatcacctaaaaatatactgacatagaaaatcttggaatgggcccctggaattgttagtttaacaaaaaaagttccagtagcctttgatgcctttttttttttttttttaaattactgatctggtccaaaccctcattttatttttcctcaaaaacgttttttaaaacttttattccactttcaagagtacatgtgcatgttggttgtatagataaattactgtgtcgtaggagtttggtgtatatatgatgtcatcacccaggtaataagcatagtacccagtaggtagtttttcaatcccctccctcctcctgcctcccaccctgaagcaggccctggtgcctgtttttcccttctttgtgtccatgtgtatgtactcaatgccaaaccctcatttgagagatgagccccagaggggtgaagtgacagccctaagccatgcagaagtttcaatcaatgattcgttcatcattcaatatatgttttctgaacaccttctgtgttcaaggcaccatgctggcttctagggggactcagtggtgaaaagcctgaccccagtacctgttcttacagaactcatagcctagtgggagcctagatatcagacacggatcaggtagacagtatggacaatcatacatggtcataaatgctttccatcctgtacaaagtaaaggctgcagcgtcagaggtcgcagggggacctgacttagattggggaaccagagaaggctcctcttaggaagtgacctttcagatgagacctgaagggtttgcagaaaagaaccaggtggagagtgggcaaagccagggaaagagcatggcacagttgaggcaccgagggggtgccagtttgactgacggaggcaagggagcgcccaggtggggctgcagggccaccatgcaggccttttctcactggtgttccccggttctgtccatagcaaacgggccccatcagtgccaccctggtgatgacacgccccatcaaagggccccgggaaatccagctggacttggaaatgatcactgtcaacactgtcatcaacttcagaggcagctccgtgatccgactgcggatatatgtgtcgcagtacccattctgagcctcgggctggagcctccgacgctgcctctcattggcaccaagggacaggagaagagaggaaataacagagagaatgagagcgacacagacgttaggcatttcctgctgaacgtttccccgaagagtcagccccgacttcctgactctcacctgtactattgcagacctgtcaccctgcaggacttgccacccccagttcctatgacacagttatcaaaaagtattatcattgctcccctgatagaagattgttggtgaattttcaaggccttcagtttatttccactattttcaaagaaaatagattaggtttgcgggggtctgagtctatgttcaaagactgtgaacagcttgctgtcacttcttcacctcttccactccttctctcactgtgttactgctttgcaaagacccgggagctggcggggaaccctgggagtagctagtttgctttttgcgtacacagagaaggctatgtaaacaaaccacagcaggatcgaagggtttttagagaatgtgtttcaaaaccatgcctggtattttcaaccataaaagaagtttcagttgtccttaaatttgtataacggtttaattctgtcttgttcattttgagtatttttaaaaaatatgtcgtagaattccttcgaaaggccttcagacacatgctatgttctgtcttcccaaacccagtctcctctccattttagcccagtgttttctttgaggaccccttaatcttgctttctttagaatttttacccaattggattggaatgcagaggtctccaaactgattaaatatttgaagagagcttgtgtttggttcattttgacatcatagacgagtcagcctttggggttctagttctgtttaaacctgtttattgtgcgctggcttagaaagctctccagagagctagggcattatctgtgactctggcaaattgatgggaggggggcggtggggcagagaaataggggtcgtggggaagttagggggaggcatcatccctgagtcctgtttcatctgattagaaaacaaccaacaatccttctcttacgtagattatttccggtgctcctgcagaacaggaatgtattcaagttactttaaaccagtggccttcaaccctggctgcatagacggataaccagtagaactttggaggaaagattgattccccgggacatgcccccagacactctgatgtcattgggcttaggtagggcccggccatcaggatttttgaaaacttgactatgtagccagagttgagaatgtattgttataaaccctagaaagagaggtggacagatggggctggagccctagctgccttgccctcaatgtcttttctgctcattgtaggatacattattcttttcctggtcagggcctctggacatccttcaagtcttagaaccctgtgcaggggccaagagagtcaacattgcaagtcacaggagaacaggttgggatggctgtctttatgtgccatcccaggaatcaacccaaggcttcaggaaaaaagtgcactccctgatagctgaggtggagtctacagatccatctgagggtgctcccatcctacctgttggtgaggtattcattaaggacccccacagtgcctatcaggagttgtgtcctggacccctagtcttagtaggcattccacagatccttgtgatatggacaggagacagggaaatactgggtagaagagggtggttccctggcaaaggccccaccctcaagcctgggtacccatggccctaaatgaggacagccattcctgttttcatccctaaaaagttgccttttggcctgccatgtcccctatcctgtacccatataaaccctgaaccccaggctccaggctccagaagcagacggggagacaagaagatgagcagacatgaatggcagaaaagcacggcaaagaaggagagaagagaaggaacattgggaggaattcgactggagacgatctgaaaactggccactggatggccaaactccaggggaagatcatcttcccactccatcccctgtccagctccccatccatcctacttagagccacctccaccactcaataaaacccctgcattcatcctgcaaatccatgtgtgacctgatccctccgggatgctggacaagagctcgggatacaggaaactgtcacactggccctctgccctggcaaaaagggagagggtccactaagctggttaacgcttaagctgtccacggatggcaaggctgaaagactgcactgtttcagtgcctactcgggctttggaagtcacagacaccgaccccgggatgctgtcatggggctggggcccaaaagtgctcaccctggttcctgcacctgcctgtctgcgtgctccccttcccataaggggttttagcttggggtggctgaagagagagccacacccctgttgcacatcctgtgagggggccagggaattctcctgttccacttagtagtatcttaggccttcagtggaaggaaacagcatgttccacgccctgtagcatccaagaagctgcaagtcctccctcctcaccccaagagcatttctcacacccacaccacacacctcactttgctgttggctgtggttatttttttctctaactaagcacatctaaaccatgcctagttgtggttcttcagtcagggtcaagtggtgttagcaatcacatcagcaccaaatggctcaggatgctctggtttcaaagcttataaaacagagggtgattcccttgggactcactcagctcggctccgaaaagcaaaggccagaaggcagcagtgagcctgggtccctgctgtgtagggagactcaggggctgggaagaaggatggaatcagaaatgctgaaggtttacgtgagctttgcaccgagcgcctccgaaccactgcctctgggctcaacagaacacaggggtaagtctccatgaacttctcaaaaagaaaactgggaagctttctgtcttgatgatttgaggacccactggtttcagaggtgccacatttggaaccagatccgagtctttaaggtttgtgttttatttgttcatgtcaaaatgtggcttcctgcttctaagaaaagaaactcaggctcataaaagcagcctccaagggcttcttggacctcaaattgcgctttcaaaatgtggtctgatgggttcagtgtaaatgcaccagaggcatgtgggatccatttaccttaaaatacacttgggcctaaaaattaagagaaaaacagtccagggcaaagtgtatactgcaaagtcaagctccaaacatttgggaaacagttctagaggctgctggaaccccaaatgctacttgctttacctaccccttgggaatcatcaaatgttattttttgtacaagactggggatgagcctgctctctgatcccagtgctgtgctctgctgtgcagttctaatggggcaggctgtttcctggaccctgagatctccaggctccctgtgcctattccttgtcagctttgccccatccaggagctgggctgagcttgtcaagtgacctctgctttgtaccactccatcaggtcctgaagaatgaagggtaccaaggtggaaggggcgcaggattaagagtagggacgcctgcaaaagctctcgtgttaccacctcatcttccaactttcatgtgggtgaaaa

SEQ ID NO: 6477 - DNA, 6000 bp, Homo sapiens
gggccattcttaagtaaaataagggctatgtgaacacaagcactttgatatcgtggtggctgatctctgatcatccagacagctactgagtgagtgacagatgggtggcagagatggcatggatgtgctagacaaaggaacgagtcacgtcccaggcaggacagagcaggatggtgagagatttcatcccactactcagaacagcactccatttgaaacttaggaattgtttatttctggaattttccatttaatcttttcagaccacagttgaccatgggtgactgaaacctcagaaagaaaaaccgcaaataaggggggaactatttacatgtaacgtgcattaagtttcaaagcaggatggaaactgacgcctgtcacagacctcttcccatgacaaactttattaagattatgaaagacgctttcttataaaacggatctgcttcttgattttttacatgtcagatggaatatgttagcatctaccagatttttatcaatgttacaaatcataaaagacaatgatcattgaaaagtttgcctttttattttcagaattccagattatacttggtgagagtttttttgggcacagaatcagaccttttagaagttgtcctggccccgttgaactcccacccaacccatgcacaaccccgagctgataataatgacagcaatgacagccttttcttgaatccgttagtaattgactgaacccttgcccctggcttaggggactcagaaataaactagatggctgaggtccctggccttgtggagcgttgttctagtaacggaaacagttataagtgagcaaaaacgtaacttggggtagttataagtaccagacagaaaaaaaggaaagcataaagagttaaaggatgcttgcaggagaggggagctgcttttctagctggctgccttgcccctgtgtctctgggctgcctgccattcctgcaatccagcatggctcagtatcataatcctcttttataaacgaaaataaggatctcaaagaggcttaaagacctctccatagtcactcagctatgaagcacagagctggggtttggaccctctgtgtttccaaagttcaggctcttgtttcccttacaacatgcagctgaaactggggctctgttttgtacagaagaacttcccaggatcctccatgccgtgactttcatcctggcccccacctgtgtgtgtgtttcctgcctgtccctgcaccacatacggaccccttacagggcgctgtggaagcaggaattcctgggctggaatgccagttctccacttggagctgtgtgacctcaggctggtgacttgacctctctgatacacatctatattgaatgtgtatctattgaatgtgtgtcacctgtaaaatggaaatctgacccacatttcagggctatgtgaaggataaacagttatgtgaagtacctagtactgtgcctggaacaacagtggatgtttagtgaataatggtgacttggtcaatgggtataaagttacagttacataggaggaatcagttctggtattgtattgcagagcaagatggctatagttaataataatgtaaccagtggctcacatttataatcccaacactttgggaggctgaagcaggaggattgcttgagcccaggagttaaagaccagcctgggcaacaaagcgagaccccattttcttttctacaaaaaagaaagaaagaataatatactgtgtatttcaaaatgtctaaaagagaagattttaactgttttcattacaaagaaatgataaatatttgaggtgacgaatatattgatttctcagatttgatcattttacaatgtatacacgttttaagatatcacattatactccataaatatatacaattattatttgtcaattaaaaatttaaacagaatcaaaagaaagggatccagccctgccaatatcttgattttagtccattgaggcctgttttggatttctgatgtccagaagtgtaacataacaaatttttgttgttttaagcaaaaaaaaaaaagtagtgattattattttgcaattcaattttcctggcctgttactgtattttgaaatactaggcattggggctttcattagccctgagctcttaatctgtaggcagagtttgaaatcaactaaaacatacggtatttgtgtgagtcaaagccacagctaaaattgagcaaatctgacacagatctccccaatgctgaggtcagaaactgcagatgggaaaagattgagccagaaataatacctggagaaagtcattctggttcacagaacatgctgcatcactgcagaacagtctatttacatctacaagggaatacagatgagaatttacagcttatccagacacgcagtgaactgttcttaacaattctgctgagttatttcatttcagtaaacatttgttgggccctgaccatgtaccacacattgttgctagctttgtggcccagcacatggtttcttttggtaaatgtgccatatgcatttgaaaagaacgggtcttatacagttaaagaatactggtattctttaatatgctgttaatatgttaatatgctattctagtattctatatttatactgatttttcctgctttcctgatccattaatgcaggagagaaatgttgaaaaaaaaatctccaactgtgattgtgaatttatttctcctcttagttctgccagtttttgtttaatatatgttgatgctatgctgttaagtgcacagacacaatttattatattttcctgatgacttgattgctttatttttataaaatttcccccatcttgaagtgtgctttgtctgatatgaacatagccatagcagctttcttatgattagtgcttgtgtcataactttttccatttttttcctttcagtgtatgtacacttatatttaaagtatgtctcttgtaaacagtatacagttgggtcttgtatttattctgacaaactctgtcatttaatcagtacatttttcatacgtttatacgggtttcatctaccatcttggttattgttttccattggtctgatatgttctatgctccattgtccttccttcttaactttttggggattattcaaggatttcttttgtgtgcatttatcccctttattggttttttaaccacatcaccttgttttatctttttagtagctgttctagtgattataatactcatctttaacatacatcagcttaccttaaattaatatactacttcaagtacaatgcatattttacatatttgtatatattttatatatatcacatatataattttacttcatctccattacttttgctactatattgtcatttactttacttctgcatatgttttaatcctcaataccttgttatttttgctttaaatagctagtaggctttttaagaaaactttgaagtagtcttttctattgaccatatatttaccatttccagtactgttcattccctcctttaggctttatatctgagattgtgttctttgagcctgaagaactatttcttttgtattgcttgtagcacagattagttattctagagcctttgcttgtgaattctaactccgggtcctatatgggtctatatctagtgattatttcttctcttgattgtggatttcgttttcctgcctcttcatgtcttgtaattattttatgtcaaacttggtatataaaagaacaatagaggttgaagcagatgtcatttttttccctcaggaaatacagccctttcccaaacaagtgtgtaagatgaggagctgtcgttttgatcatatcagcgtcaataggagctatgttgcagttttatttaatttcttctctctggttttaaatgatttgaggctgaagtcaattcacactatcggtgcattgggagtcaagcactgcagtaccacagagtcattttctgcttttcagccctgcccccagctggctcttacacagcaaaattccctgtgtgggctaattagtatatgaagaaaattgcttttgtgtttggagggcttccagattcactctctcataccagcccacacaatcaataaagatttggctgatctttccttatctcaggtggattagctcttctccaagtccatacccagactaggcaacatggtcctcaagcatgaaggggctgacaatctctgctcactttagaagggattgtccttctttagagcttggtttcattgagattcgttaatccatagctttttaaaaaacatggtattttatatttttatttatctgatgttttcatatttcagcaggaacaagagtcttctctaaccatttacatcttagaacactttgcattggtttgaagtggctttttccatttttgtttgtttgtgttttgggaaaggtggatatgggttgtacttaaatattcttcttactcatgttgctctgtgcttttttttgttgttgttcttttgtttttttttgtttgtttgtttttgtttttttttgcaggaagatattttcgattcagataaagaagttcctatcgaatccacttttgttcgcatcaaagaaactccttctgaacaggagagcaaagtcttcgttctgactgaaaatggggagcgtacctacactgttaaccatgaaaccagccacccaccaccctccaaagtctttgtctgtgacaagcccgagagcatgaaggaattccgcctggatggtgtttccagccatgcgctgtcagacagctccaccgagttcatgcaccagattattgaccaggtcctgcaagggggcccaggtaagaccagcgacatcagtgagccatctccagaatcctccattttatcatccagaaaggagaacgggaggtccaactctttgccgatcaagaaaacagttcactttgaggctgacacctacaaggatcctttctgcagtaagaacctgtccctttgctttgaagggagcccaagagtggcaaaggaatcattgaggcaggatggacatgtcttggcagttgaggttgctgaggaaaaggaacagaaacaggaatcctcgaagattccagaatcctcctctgacaaggtcgctggtgacatttttttggtggagggcacaaacaataattctcagtcttcttcctgtaatggtgctttagagagtacagcccgccacgatgaagaaagtcactctctttcacccccaggagaaaatactgtgatggccgattccttccagatcaaggttaacctgatgactgtagaagctttagaggagggagactattttgaagccatcccattaaaagcctcaaaatttaacagcgacctaatagattttgcttctaccagccaggctttcaacaaagttccttcacctcatgagacaaaacctgacgaggatgctgaggcttttgagaatcatgctgaaaaactaggtaaaaggagtattaaatctgctcacaaaaagaaggattcgccagagcctcaagttaagatggacaaacatgaacctcatcaggactccggagaagaagctgaaggctgtccttcagccccagaagagacaccagtggataaaaagccagaggtgcatgaaaaggccaagagaaagtccacccgtcctcattatgaggaagagggagaagacgatgacctccagggtgtgggcgaggaattatcttccagccccccaagcagctgtgtcagcttggagacccttgggagtcacagcgaagaaggcctggatttcaagccctccccacccctctcaaaggtttccgtcattccccacgacctcttctatttcccacactatgaggttcccctggctgcagttttggaggcttatgtagaagacccggaggatctaaaaaatgaagaaatggatctcgaagagccagagggctatatgccagacctggactccagggaggaggaggccgatggctctcagagcagctcc

SEQ ID NO: 6478 - DNA, 6000 bp, Homo sapiens
accccctcctgcccagcaccctgcactgtgtttctgaggtatgtgggtcacaagtccccctctcctcctccaggtgtggcaggcgtgcttgtgggacacccgtttgacacggtcaaggtgagtctcatcgctgcttttttttcctcggcgcgtacattggagagaggctcacagggttggggtggctggaagcctgtttccgtgtacagccccaggtgggcagctgcttttacaccaggccgggttgaaccttcctcactgctttgtcctggcatctcccagctggggctgatccacatgctgggttcatggccaagtccatcctgggcttggccagctggaaccgaggtgctgaggttttctcccacccagagcaagggcacccacatgttcccatgcagaactctcccaaacagttccttgaaagaaagaaaagttcagagagaaaatacaaaaaaaaccaaaactcatatctcccatgaacatgatcttcacggagtggtgatcatccttacagagaatccagtgatggtttcccacgtgccagaggcctgaggaagggccctgttagccggttccttgataacaccccacacctccatgaaccggagttccaggttctcagacccccagaacggaaaccaaggaaatctatgccctccagctggaaattccccaataaaccccccaccctccgcttgtggttgggctgtgtgttctgaaagtagcccagcggggcccttccttgctctttttccttggccccagggcaagctgtgagtggcaggcaccagaccagccttgtgcttgctggcagcgctacacgtggccgctcttcccactgagcaaaggcacagctgacggcaaggcaggatgcgcaccctgagctgggtttgcgggagacttccagtctccttttctggtgagcctaggtgtgtgttggcagagacagtgacttaccataaggggtggattgcatccagcacaagagtgagggtctggcctttgcattggctgtgaccttaaaaagctctgtccctgggccttgtgcaggtccgggcccctctgccagccggttttctgcatgaccttgggcaggtccctgtatctttgggctcaaacgttgtcatcgtgccagtgctcaacagcataatttatgttggattaaatgctagctctgaaaaccacaactcttctatccactgtaggccaatttggggaggaggctgaagggccaggctttcttggcaggcagcggccccacgtttgctgcaccggcctgccgagagtgaggccgtgcagagcctgcccacacagcccccggccccagccatgcccacgcgctgcctagccaggccacccgtgaagcctcccccaggccagagcagcccaggacagcctggcagtgtccacgttgcactgtgtttatgtctcgtggtcatgtgttgtgaacgcctctcgcagccaagaagtgcttcacattcacttcctctttccagctccgtggaggcctgggctctctgagctatgaattggccagacctgctgggcttctgcccggccccctcaggcagcccctggcaggcctgggagcactttcgttctggtgctctgctgtcctgagccactgagcccgcgagcagcacccctgaagtgactcagggacaggagtttctccagcccatgagattttactccccagaccctacttcactggcgtctggagggtggtctttgagaagatctatatgtgatccttttgttttgttttgtttttgtttttgccactctgtcgctccagcagcatcacatctggacatacctaccttaaaaagctgaacttcttttctttgagatggagtctgtgtctgtcactcagtttggagtgcagtggcgcgaccttggcttactgcaacttcttcctcctgggttcaagtgattctcctgcctcggttccccccccaaccccctgggtagctgggattacaggcacgtgccagcacgcctggctactgtttgtttttagttgaggtccagcacatatagaaagtgcacacatcctggccaggctagtggctcatgcctgtaatcccagcacttctggaggctgaggcgggcggatcacaaggtcaggagatcaagaccatcctggctaacacggtgaaactctgtctctactaaacatacaaaaaattagccgggcgtggtggcgggtgcctgtagtcccagctactcgggaggctgaggcaggagaatggcgtgaatccgggaggcggagcttgcagtgagccaagatcgcgtcactgcactccagcctgggcaacggaatgagactccgtctcaaaaaagaaaaaagaaggaaagtgcacacatcctaggtgtacaagtcgtcgcaaaacacatgcgtggcgagctgccacccaggagaaacagaacatggccagccctctggaagtcttccctcctgctcctatcaactcctccctccccttctgaggcttccactggcctaacttcctcctttttttttgagacacggtcttgctctgtcaccctaggtggagtgcagtggtgcaatcatagcccactgcagccttgatttcccaggctcaagcaatcctcccaccgcagcctctcaagtagctgaaactacaggcacacaccaccatgcctagctcatgttttttttgaagttattagtagagatggggtcttgatatgttgcccagctggtctcaaactactgggctcaagtgatcctcctgccttggcctcccaaagtgctgggatgacaggcctggcccactgtcctcacttccaacaccacgggtcccttttgcctggttgaatataattgcagctgtaccctaggatcatcaggggccacccgagtctgtgtcagtccgtactgtcacatggccacagactatctcatggctgggacagtcacagtttattcccccaggcccttgggactgaaagaatccaagatctggatctcctctatagcgcccagaaccacagccaccgtcctgaagcacacggccttcacacgtttctacacgaagggagttttctgtcctgcttccttggacacagcaataatcagggagcagttgtcttgacctatgatgagggggtgaccggccatccctgggcatgggatggggagtgtgggtgggggctggctgtgggggctccgcgcctggatgtgatgttgaaattttgtgttgctttaaccgcctttactttctgagctaggggctgtctccatccatagcaaaagtgtaactttgttgtagatgggcgtaagcctcaccctggagagcgctagtaagtacagaccaggtgaaccagatcccagcctggaccccaccctgtcatgcccatctccccaaccccagagttccctccgtagcaggggacagggagggtgtgaggcaagcttgggctcagcacaggtcctggggtgggggctcgggctggccaaaaaaaatcagccccctctggattgggggtcctcatgtgggggtctctcggccctatggggagctgggagcttcctaaacttgtgtccaaatgactagtttcccaggggtgggtccgttcccatcaatcctcaaaggagagcctggcaccccaagattttaagagcctgagctataaatgacaagacttgggacactgggccacagttcctctcccagagagcaagggctcgtcacagactgaggggtactgaggggtcagaaacaaagtggggagaggcctctgcccacattggtgggagaagctgagttgacctaagcctgacattccccagccggctggacttgggcattcaccagtgtctgtgatctgcaaagacttcacaacactacccaggtggcactgagtatccaacctgggaagggacagctccatgtcacatcagttctactcacacagccctcttagtgccagtgttggggctgcaggaggaacagagatccccccagaggccccagaacattgaagggagagcagcaaacctcgcatcaaggtgttggccaagaactgggcctccagggtgggagggtgcttcgggccaatcttgaagcattggcttccagctgttgaggtcctgggggtactgagatggtacttgtttcctaacaaaacattttttataagtgcattcaccaatagagggcccacctattctggtggagagaattggaaaaggttccagaatccgggcagaagcctggctgttcccggtgagggctctcccttgctagcactccctcccaccctcactctgagcaacacagctgctcatgtccctggagaggacagctttggccaagttgttaaacatctctgagcctgtcttcccatcttggaaatgggggcagttgtcccaatgccgagataattgagtgtgaagccctcccctgtcccatgctgcctagtaccgaaggcacttgctctgtggccctggctgtaagaatgatcatttctgagtcagacctagggaaccagcccctgagaatgtgacttgacctagtttactcccaccgcccgctctgcaactctgagcctcctattgagcaaagataagctcataggcaacaaagagcactttgacatggaagaggttctgggccactgggctcggaggcagcggggcctgaccagcgccccaggccccagagctgctgacgtgggtccccaaggaggttgttggctgttctcttgccaccactctattaactcataactgctgttctcacgagaggctactggcagagaccaggcaggagctcctggagccaaggtcattgcttttatttttatttatttatttattgagatggaatgttcctttctcgcccaggctggagtgcagtggcatgacctcactgcatcctctgcctcacgggttcaagcaattctcccacctcagcctcctgagtagcagggattacaggcgtatgccaccacactaggctaattttttttacagacacgatttcgccacgttggccaggctggtcttgaactcctgacctcaagtgatccacccacctcagcctcccaaagtgttgggattacaggcgtgagccactgcacctggccaggctcatcactttttgcgcctattgcctcgaagccagtctctgatgggacattagggcaggggcccttcagcctagtctgggacatgggccgctcactcagcagtatgacaagcatcacctggagaacgggccagtctcaggaggtcgttcatgccccactggcagtgcactgtgcagccatagtgtaaacaagaggcttaacctgaattggtctgagatcttggggaccccctaccctgtctccagcagcctgtccctttagctgtttgcctactggcaccccatcctgagaaggcatagatacccggcccaccctgccctggaattacaaaagtcttagactgtgcctgagtgcccggcctccttgggagaccctcctaggcagcctaagcaccagacccgggagctgggtgctctggtcctgcctgcctgcctctcactggaccctctccttccaggtacggcttcaggtccagagcgtggagaagcctcagtaccgcgggacgttgcactgcttcaagtccatcatcaagcaagagagcgtgagtggcctgggctggtggggctcgggaggcacaggatggggaactagcttccgggctgccaccaccccagaccagagagccaggaaggaaggtgtcaggacgaccaggaggccagtcaggacctaggttctaacgaaattctgcttggtcctcaggagcccctggggtgggctggggctgccatcccccgacccccttccgcgtggagggcccgggaggtgcgcgttgccggctctgatggcgtctctgtccccgcaggtgctgggcctgtacaagggcctgggctcgccgctcatggggctcaccttcatcaacgcgctggtgttcggggt

SEQ ID NO: 6479 - DNA, 6000 bp, Homo sapiens
aggtaaacagtctaggccccagcctacgggaagtttcagtttgcagagaaggggcggggcgggggcgggaatgacgaataaatagttaccgtaccgtgtggtaatagctgtaataaagtctcactccgaaaagtgctgccggatctcagaccctgggacaagaaaagtactgagagcttagggcccaaaggaaagacatcacagttatggaataagcagacgtcctttgacaaacgtgtgacaaacatatgacaaacatgtcctgtaacgacaaacgtgttacaccccaaggattaaacaaagcagggttaaatgtggaagctgaagctgcaagtcaagggcccgtctgacaagtccggcagggccgggaaaggggttaaggcgagcaagtgggtgtggcccgtgcgttgattggcaggggtgggaccgggcttgtcacccgccccggctactccaacccctgggcgggcgggggtaccgcctgggcaagggccggggcgccgggccgagccacctcttcccctcccccgcttccctgtcgcgctccgctggctggacgcgctggaggagtggagcagcacccggccggccctgggggctgacagtcggcaaagtttggcccgaagaggaagtggtctcaaaccccggcaggtggcgaccaggccagaccaggggcgctcgctgcctgcgggcgggctgtaggcgagggcgcgccccagtgccgagacccggggcttcaggagccggccccgggagagaagagtgcggcggcggacggagaaaacaactccaaagttggcgaaaggcaccgcccctactcccgggctgccgccgcctccccgcccccagccctggcatccagagtacgggtcgagcccgggccatggagcccccctggggaggcggcaccagggagcctgggcgcccggggctccgccgcgaccccatcgggtagaccacagaagctccgggacccttccggcacctctggacagcccaggatgctgttggccaccctcctcctcctcctccttggtaagaaccgaaacgataccaacccccagccttctgtcaccgggccagcagctctaactccctccagtgcggccccgcactctatcctgcctgcccattccccccagcccctgccgccagccccagcactgccggccccaacccccaggaagtcttcagctgctccgctgggccctggtcctctctccggcttcccctagatcaccccaccaaccccacaaggccctgctgccggaccttccttccatggaagtcccacgccgcagccctctcccgccccccactccctcttccgattaactgcccggaagtcccggatggctcccttgagttgctcaggtgaagaagaaaactcctaaggagtgtctcacgctcctgccctttctcgttcctcctctaggaggcgctctggcccatccagaccggattatttttccaaatcatggtgagttgagggaacctctggggctccgtgggcttgggaatgagggagcagtcgagaaggactctctgttccctgaattccatgggacctaccaaagttttagaggggagataatttagcctttatttatagataaggaagctgaggctcggtgtggaccttcatctggtagttgctatgtactattttattttttctgggaatatctatgcttgatcgtcctaaccaggatgtagtctccctgagggtagaggcagtatttcctgctcctcctggttcagtggctggcacaaagcagacgtcagaattgttcgtgatattagtatttactggtgaagctatgaagaatgtggagagaaagagcgaagctagaaggctgtaactctaggctgtgtgtgggcaggggcagatactctgctcctccttgcagagcccagacttttggaaacctcaagcctccaagcggaaggggaagggtgggatgcaaaggggctgtctactacccgtgtcctaccttcctctctccagcttgtgaggaccccccagcagtgctcttagaagtgcagggcaccttacagaggcccctggtccgggacagccgcacctcccctgccaactgcacctggctcatcctgggcagcaaggaacagactgtcaccatcaggtgagaagcagaacaagagcaagaacccattcttctcccctgccccttcccctccattggaagtcttcagggatcacttctttttttttttttttgagacggagtttcactcttgtcacccgggctggagtgcaatggcgcgatctcagctcactgcaaccaccacctcccgggttcaagtgattctcctgtcttggcctcccgagtagctgggattgcaggtgcccgccaccatgcccagctaacttttttgtatttttagtagagacagggtttcaccacgttggccaggctggtcttgaactcctcacctcaagtgatccacccgcctgggcctcccaaagtgctgggattaaaggcatgagccactgggcctggcccattcagggatcacttctctatggaatttccatccttgtcaacaggtaaagagtagaatttgatttggcctagtgtgccctaaaagtctgactttttctgggtcagactcagtgaattgaggtggagctgggctggagtggacatctagcttgagtcctgcgcatctccaaaggacagaggcccctctgcaaacggtcctcagctcagatagaactgttctgaagagtccttccattcattgcatgtcctgcctgagattcagaactactccttaatcagcttagaacatccctcagcctctctggatcttttaaacattccaagtcaccccaggctcccctgaccttggtcattgtttggggatcatattaagtacctggctgtttgcctcacatagttcattttccatgaatttacccagaaaggggtaggcaaagagagagggcaatctgtggagaggctggtggggcaaagggatcagaatgccatggagaaccaatccaggtctcacatctggcacagtggggtgggataagatggtgagttctggttaattgaactgtatggtaatcaccagttactgctggtaccatacttgggtgacagtgctacaacaactggaatgcagtgcacctcttcttaactcagtcccagaacacaagtcaatttttccaaagggctctaggatatattttatggtctcatggcgataccatgaggtattcctaccatgttaggaagatccccattgactacattgacttaaaaataatttggctgccgggcatggtggctcacgccagtaatcccagcactttgggagaccaaggcgggtggatcacctgaggccaggagttcgagaccagcctgaccaacatggtgaaaccccatctctattaaaaatacaaaattagccaggtgtggtggcgggcacctgtaatcctagctacttgggaggctgaggcaggagactcacttgaacccaagaggtggaggttgcagtgatccaagatcacaccattgcactccagcctgggtgacaagagtgaaactctgtctctaaataaataaataaataggctaactgagttttcatttggccatttagatcatggataagcagatgtttatgcttcctgggacacaaggggcctggtggcaccaggggaggagaaagccagcagcagtcaagagtatctcatgtcctgctctcctctactcccataggttccagaagctacacctggcctgtggctcagagcgcttaaccctacgctcccctctccagccactgatctccctgtgtgaggcacctcccagccctctgcagctgcccgggggcaacgtcaccatcacttacagctatgctggggccagagcacccatgggccagggcttcctgctctcctacagccaaggtaggctggacagggatgtctgaggagcaggcagtgaaagccccaggcagaaggggaggatcctgagggttctggtgcttcacagcccctctccatggtgcctctgcagattggctgatgtgcctgcaggaagagtttcagtgcctgaaccaccgctgtgtatctgctgtccagcgctgtgatggggttgatgcctgtggcgatggctctgatgaagcaggttgcagctcagaccccttccctggcctgaccccaagacccgtcccctccctgccttgcaatgtcaccttggaggacttctatggggtcttctcctctcctggatatacacacctagcctcagtctcccacccccagtcctgccattggctgctggacccccatgatggccggcggctggccgtgcgcttcacagccctggacttgggctttggagatgcagtgcatgtgtatgacggccctgggccccctgagagctcccgactactgcgtagtctcacccacttcagcaatggcaaggctgtcactgtggagacactgtctggccaggctgttgtgtcctaccacacagttgcttggagcaatggtcgtggcttcaatgccacctaccatgtgcggggctattgcttgccttgggacagaccctgtggcttaggctctggcctgggagctggcgaaggcctaggtgagcgctgctacagtgaggcacagcgctgtgacggctcatgggactgtgctgacggcacagatgaggaggactgcccaggctgcccacctggacacttcccctgtggggctgctggcacctctggtgccacagcctgctacctgcctgctgaccgctgcaactaccagactttctgtgctgatggagcagatgagagacgctgtcggcattgccagcctggcaatttccgatgccgggacgagaagtgcgtgtatgagacgtgggtgtgcgatgggcagccagactgtgcggacggcagtgatgagtgggactgctcctatgttctgccccgcaaggtcattacagctgcagtcattggcagcctagtgtgcggcctgctcctggtcatcgccctgggctgcacctgcaagctctatgccattcgcacccaggagtacaggtcagtgggagtggggctggcagtagaagagtagaccctgagggtgaggctgggctgtgcagctacaggagaccacgaaagtgcccaccttggggagaggctcccatgatcagcttgtcagttgtgtcctgtaagggacaggtccagatcctgaaagcagtttcaagggaggagggacctcagatgacctttgggaaagccatggcacagctccagctggcctggcccgggtgtggaagtgggaggactgtccaggctgaggtggtctactctggccgagaactaccagtgactgagcagtcctcattccttctagcatctttgcccccctctcccggatggaggctgagattgtgcagcagcaggcacccccttcctacgggcagctcattgcccagggtgccatcccacctgtagaagactttcctacagagaatcctaatgatgtaagtcactccccacaaccctagcacctcctggtcccagttctgctgtggccccgcccctgtaccctccttcattcagcctttggccctctgactctgaggcctcctcatttccttgcagaactcagtgctgggcaacctgcgttctctgctacagatcttacgccaggatatgactccaggaggtggcccaggtgcccgccgtcgtcagcggggccgcttgatgcgacgcctggtacgccgtctccgccgctggggcttgctccctcgaaccaacaccccggctcgggcctctgaggccagatcccaggtcacaccttctgctgctccccttgaggccctagatggtggcacaggtccagcccgtgagggcggggcagtgggtgggcaagatggggagcaggcacccccactgcccatcaaggctcccctcccatctgctagcacgtctccagcccccactactgtccctgaagccccaggg

SEQ ID NO: 6480 - DNA, 6000 bp, Homo sapiens
aaaagggaacccggggcagagtgtggggaagtgggatggcagcatggcagggctttggaaaatgagaggtgagactgtgtccaggaagggtgtaaggagaggatggatcctgatacatggattcaggatcattagggtcctgtctgggacactggccttcctgcttacctgctctttccttcctccttggtcggaggaggggctggctcactgctctggcttcattttccagagctgcctgctgcagtcacacttaggtcatcttctctcacttttctccttttgccgattagtggacgtgacagagatgtgaatggggcagggatgtcctttgatggcatcaagactttagcttctggtgcgctgtgtcccagctctgatttcagttgcagccgtgatggacagttgcatggaagctgagactctcactgacagtgaaaccctcaaatgaacacaatccctgctttcctgccaaggatccttgtagggtcccccagcttccccactttttttctgtgtcctgacaaagaaacacagagtaacttgattgccctgtgacctggccagttgcatttcccctgcaggcttgagcccaagccagagccttgaaaaggtattcaggttgttgcccaaaacactgaaaaaaactggccctggccctgaaccaaataccttgaaccctcgtaaactccataccctgacccccttgttttggatatacccaggtagaacaactctctctcactgtctgttgtgaggatacgctgtagcccactcattaagtacattctcctaataaatgctttggactgatcaccctgccagtcttttgtcttgggcaatctatacttttctcagaggttcccaaggcctactgaagggacttaacatactcttaatggctttcctctctcttgttttaccttatgccctcacttcctgagttaacctcccaaatacaggatcacctgtacccaagcccttagctcaagaatacaggatcacctgtacccaagcccttagctcaagctctgctttggaagaacccaaactaagacagtgctcctggtgccctccccaagcaacctcaagttctggctgttacttgagcagaggcctttcttttcccttcccccagctctatccatctgccaggcccccctcaaatctcttcatttccaagttttgcttgacttttccaagaggagagggctgcttcttagtatgtccctactcatcctttcctttcttgtcttgtatcctggtgcagcctggtaatggggcctcttcatggttgtgtgtcatgactccctaaccattatgcctccatgcatcccctgttcctcctggaacctagcaccatgccttacatggaaaagctgtcattgacagcccggtgagagccctgagggtggagtgactggggcagggcctgaggcaagaggtgggaggaggtaggaggccaggggctcagccggaccaggagactggaaacaggcaaggataaggcaggtgggggactgagttgtttgggtcacctctgcaggccagagagaccaggcaacatacacactgcagaaggtgggctgggaggattggggccagagctgggggagggatgagaacagaagcaggaccaggattcagcagagtcctcctatttccttccaccaccagggaatcttactgccccacttcagcttgtgctgtttcctggcaaggcaggctctcacatgcctggacgcctgggtgcgttggtgatgggaaggagcagggtgagggaggggccccaggagaggcccaggatgagcctcatcttgtccctccccattcttgtcttaccctctgcaaatgtgataggcacaggacaggagtaggcacctcgcctactgctgcttaacctttcagcttctccaggcccccaatcctgcttgctcccagcttggtaagtagatctgtgcacgtccctttacaccccaccatccagttttgcccagatgtgctagaatggggctggacaaagaaggaggggccagactagaggagtggtggtagagatagtgacagcctggggtgatgactttatgcctgtttaccactgagctctgggaaggaggccaggagtggggcaggtcaactgactgggagcaggggatctgggttccaagaaggagttgtgtttgaggtggggtctgggtcctcgtggaagtcaggactcccaggcagaaaagaggcaggctgcagggaagtaaggaggaggcatggcaccttctcatcgggcatcacaggtggggttttgccccacccctgaacgccctctgtggcgccttccacccacctgtaggcccagaaggatgtcggtctgctaccgtcccccagggaacgagacactgctgagctggaagacttcgcgggccacaggcacagccttcctgctgctggcggcgctgctggggctgcctggcaacggcttcgtggtgtggagcttggcgggctggcggcctgcacgggggcgaccgctggcggccacgcttgtgctgcacctggcgctggccgacggcgcggtgctgctgctcacgccgctctttgtggccttcctgacccggcaggcctggccgctgggccaggcgggctgcaaggcggtgtactacgtgtgcgcgctcagcatgtacgccagcgtgctgctcaccggcctgctcagcctgcagcgctgcctcgcagtcacccgccccttcctggcgcctcggctgcgcagcccggccctggcccgccgcctgctgctggcggtctggctggccgccctgttgctcgccgtcccggccgccgtctaccgccacctgtggagggaccgcgtatgccagctgtgccacccgtcgccggtccacgccgccgcccacctgagcctggagactctgaccgctttcgtgcttcctttcgggctgatgctcggctgctacagcgtgacgctggcacggctgcggggcgcccgctggggctccgggcggcacggggcgcgggtgggccggctggtgagcgccatcgtgcttgccttcggcttgctctgggccccctaccacgcagtcaaccttctgcaggcggtcgcagcgctggctccaccggaaggggccttggcgaagctgggcggagccggccaggcggcgcgagcgggaactacggccttggccttcttcagttctagcgtcaacccggtgctctacgtcttcaccgctggagatctgctgccccgggcaggtccccgtttcctcacgcggctcttcgaaggctctggggaggcccgagggggcggccgctctagggaagggaccatggagctccgaactacccctcagctgaaagtggtggggcagggccgcggcaatggagacccggggggtgggatggagaaggacggtccggaatgggacctttgacagcagaccctacaacctgctgcccttccctgtccctttccaccccccacccaccctccagaggtcagtgttctgggacatttggggacccttctttgactagagtttggatctggctgggtaggattactatacacttggggcaggcccaggctcctccaaactgagggattatgagggtggtgatggtccctgttaaggactattgtgtgcttgcaagttggcatgtacccatgtgccagcattgcttacttgttgccaatagctgttattgtgaaatacactgggaagccattagatgatgacttaagtgtgcttcccctggtggttcttcatgcctgagttgtactgaagccacctagttccctgctgggtcaagccaggctgggcagtgccagccttcagtggcatcttgacctgccctcctcagcccaggtgccctggttccacaggccaacccatagaaccactctggaaataaaggagaaaatggaaggagaggtatgggagcttggatgaggggtaggaatgggatccattctctgaggcttataaaagcctctgaggaggaaatggctctgaaggggaaaatgaatctgtggggtttgaaaaggaagttttcctgcctgtcttgtatttggtccagtgagtatgagacaggcacacaaggagtggacagtggtgtaggggccctgggagtctgagacttaccttgccccctgaccatctgatcctccctgcaaaggccacctgacgtgaaaaggagccaggagcaagcactcagtcagggaagtttggaggttggccattggggtatgaggaatggcaggaatatttagaggacaggaataatttttcagagaagtgccacatattctttttctctttgccaagtctgggctccttctaagatgctgctagctattcctagcccgttccccaatacttctctgcccccaccttttggaatccttatctaggtctaaaaacggttctagatcctgacccctttgattgggggatgtagaatgggattcttttcaggggacatccacaagtacacatctgtggtcactaaggtgaccagctcatcccagttggcctggaactttcccagtttaagcactgaaaactccttgtcccagccctgccggtttcccaacaaactgagatggttggccgctcaagtggctaccctgaccatcaccccaggctctactttagcgactgctcacacctccctgcttcccagacagaagtcaaaacagcaaaagaaacccagtccccagggtcatgctagggctaccaaaactgggatgaactagcacctgtgaactagaacagcagggagtatgcttagagtgcctggtcctgggtgtggggaagaaaggccatcaaggtagatgcgggtggggaacagcttgagagaggaggcaaggacaacccagtttctgtctgaaggggcctctggttgaccctggagtttctgtccccaaacacaggcctcacgggattctttctgtcctcatgcactgggcagaggttccttaacttcctttgttgcacattgccattctctcacatcccgtgcggtcaggaagcccttcctgaactctgacttcagttcttgctgcggtttctgcccatttttttcatatcctctgacagctgcgaggtcatctctgctctggcttttctccaagcagaacaagtgggggctctggaaaggttaagggacctcagtggccaccattatactttgcatctttcctgagaagtgagagttgaaagggaagcaggaaggcccatggtcagattgaaggaaggactttttagtttcttttttttttttttttttttttgagatggagtctcgctctgtcattcaggctggagtgcagtggtgcgatctcagctcactgcagcctccacttcctgggttcacatgattctcctgcctcagcctcccaagtagctgagactacaggcacatgccactacacccagctatcttttgtatttttagtagagacggggtttcaccatgttggccaggctggtctcaaactgctaacatcaagtgatctgctcccctcagcctcccaaagtgctgggattaccggtatgaaccaccacaacctgccaggaatttttagtttttagcttttgcaggagacttcaaggaaaggagacattcctctgtccaggaaacgggtaaggggaccatttctgcattgctggtttcccctcttggcagggtgggcatgaggcatcactgttcctgctccctcactcctgctcctcatgctcagcctgccagctcggcctcaactttgtgtgtctaaagtggaactgaatagtaggctgtgagaagataggaaagaggtagtgccaatctccttgcccagatcataaatccagactcagcagggtaaccacatgggcaagcacaaggtaggtgcttggggaaaggggaagtaattggcattctgtgtgataccaaggagaccatttggattttggcttctaccaaagagaatggagaattggttgacctaaatggaaccag

SEQ ID NO: 6481 - DNA, 6000 bp, Homo sapiens
aggaattcgagaccagcctggccaacatggtgaaaccccacttctactaaaaatataaaaatcagccggacttggtggcatgtgccagtaatcccagctactcaggaggctgcactccagcctgggcaacagagcgagactccgtctcaaaaaaaaaaaaaaaaaaaaaacaaatttccccaggcaaaaggaaatctaattaggaaaatgaaaaatggttgtttagaagaatattttgtgctgtacttagaccacttcataaaaaggtatactaagagtttcagtttgggaagacaagagttctggagattaatagtgatatttacaaaacaacgtgaacatatttaatgccacttaactatacagtaaaaaatggtcaaaatggtctggccgtggtggctcacgcctgtaatcccagcactttgggaggctgaggtgggcagatcacgaggtcaggtgctcgagaccagcttggccaacatggtgaaaccccatctctactaaaaatacaaaaattagccaggtgtggtgcacgcctgtaatcccagctactcagaaggttgaggcaggagaatcgcttgaacctgggaggcagaggttgcagtgagccgagattgtgccattgcactctagcctgggcaaagagcaagactctgtctgaaggaaaaaaaaaaaggtcaaaatggtaaattttattttatacatattttaccacaataaagaaggtatactaatacactactttttttaaggattataaataaccatactcctttattttaagttcagtgatactctcacttcttaaaattttttttaatttttaatttttttttttttttgagacaggttctcactatgttgcccaggctggtctcacattcctgagcttaggcaattcacctacctcggcctcccaaagtgctacgattacaggagtgggccacatgcccggcctcacttcttaaaatattcgggttaataaacattcttcagaaactcaagttattttttaaattgtttaacaaattgcttgagcttcctcactacaggatctgctgaagagaggcacaagaagtacctttagatcaggtacgatggctcacacctgtaatcccagcactttgggaagccaaggtgggagtatctcttgaggccaggagtttgagaccagcctgggcaacatagtgagacactgtctctacaggaaatttaaaaaagctgggtgtggtggtttgcaccatagtccagctactcaggtactcaggatgctgaggtaggaggactgcttgagcccaggaggtcaaagctgcagtgggctataacagtgtcacggcacaccagcctccagcctgggtgacagagtgagaccctttctttaaaaacaacaaaaagtacctttaaaaaaagtaaaaatagggccgagcgcggtggctcacgcttgtaatcccagcacttcggaagaccgaggcgggcagatcacgaggtcaggagattgagaccatcctggctaacacggtgaaaccccgtctccactaaaaatacaaaaaaattagccaggcgtggtggcacgtgcctgtagtttcagctactcaggaggctgaggcaggagaatcgcttgaacccaggaagcggaggttgcggtgagccaagatcgtgccattgcactccagcctgggcgacagcaagactctgactcaaaaaaaaaaaaaaaaagtaaaaatatattctttagccagtgatattggctcttgtttacaaaattatccaaaacgttctttcaagtcttcctgattttgaaaaatagagtctcaactgatatctctaaaatttgaggctgggtacagtggctcatgcctgtaatttgaacactttaggaggttgaggtgggaggatcccttgaggccaagagtgtgaggctgtagtgagctatgatggtgccactgcactccagcctgggtgacaaagaccctatctcaaaaacaaacaaaacacaggaaaaaaaaaatcaaaatttagattgcaaatggctccacaaaacaaatcttgagggcaaagatgttttagtaattttacaattgccagctctaggcagtatgtgacatctttctaggcactcagtgcttttagaataaatgaccttgtgctgaggaatgtgaaaaaaaagatgtaaatcggtgctgttttattgacaaatgggatatgaagaatgaaatgtgcggccgagcacggtggctcacgcctgtaatcccagcactttggaaggcggaggcgggcagatcacgaggtcagcagatccagaccatcctggccaacacggtgaaaccccctctctactaaaaatacaaaaaattagccgggcgtggtggcgggcgcctgtagtcccagctactcgggaggctgaggcaggagaatggcgtgaacccgggaggcggagcttgcagtgagccaagattgcgccactgcactccagcctgggggacagagcgagactccgtctcaaaaacaaaaacaaaaacaaaaaagaaatgtgcaacatagggtttagatgaagtgacaggagactcagcatattatggaaattattatcttgattttgtgtatatagaaataaagctgtatccggctgggtgcggtggctcatgccagtaatccagcactttgggaggacgaggagggcagatcacgaggtcaggagttcaagaccagcctagccaacatagtaaaaccccgtctctactaaaaataccaaaattagctggacgcggtggttcgtgcctgtaatcccagctactccaggggcaggagaatcacttgaatccagaaggcagaggttgcaatgagctaagatcgtgctactgcactccagcctggcgacagactgagaatccgtctcaataaataaataaataaacaaagctgtgtatctggttttctatactttccaggtcaaatctcactagcagatgttcctgttatcttcagtttgacatcttatctaaaatgactcctaaaatgtgtaataatgttaattataatatctaaacctactgactctaacatcacaaagaattttaagaggtcgaggttaaaaatctaaaattgtaagtcatcagctaacaatgacatttcaagtcatgagcttggataaaaataaccatggaaatcaccattcagcaaaatacaggcatagtggccaggcgtggtggctcacgcctgcaatcccagcactctgggaggcccaggcaggaagatcacctgaggtcagcagtttgggaccagcctgggaaacatggtgaaactccgtctctactacaaatacaaaaatgagccgggcgtggtggcggacgcctgtaatcccagccactcaaaatcgctcgaatcagggaggtggaggttgcagtgagctggatggcgccactgcagccccgcctgggcaacaagagtgaaactctgtctcaaaaaataaatacacacacatacacacacacacacacacacacacacacacacacacacacactctcgcatacaggcataggatagtttgctatagttaacaaacataagaatatcctattttcttgagctttcatcaggctttactttgccagaatacatctatcccatttttcagtaactagatctagctaccacatttcctcagttttaacgtgtgtgtttaaagagacagggtcttgcgtcgctcaggctggagtgaagcagcgggatcaaagctcactgcagcctttttctgtctataaatcttcaacacttggctgcgctgcaatctctctgagcctgcccgattcgtgaatcattctttgctcaaaatgttaaatttaacttggctaaggtttttcgtttaacacttcctactaacgctacagcctaaaacctctcctgcaaaatgctttttcaggtggcaacgtaccaattctaacaagtttgtgggagtaatggggaggagggctaaccctctattttctttcagaaaaagggttaggcacaaggagctctaaaggcttgtccgaagtctgctgaaaactcacaaaccactcagaaccaggtttcccacacccaattaattccaagtggtactgtatccgattacccccattttccaagagatagtttattttttcccctcttttcccctccccactacactttccacttagccctttttgaactgcaaaataacctctcaactcccctcaccagaccattctctacagagcaaattcatctacgagatccaagacgcaactcccaccgccaggcggtcgcctcagaagggtaagcagaaagcatgcccacttggccacttttacaacttatttctgctcagaaatgcaccaactcaactacccggtagataaggcaccagctagcagagacctcttgctcatttcctcttgtaccttataaaatgcccgcttttttgctccaaagacgaagcgggctggcttcagaaataaaatccctcttcttgtatactagggctcgctcttgttaattggtgtctacgtgtggcgagcaactaactctcttttccgttagagcactcaaagccctggtcaatctaccccccaagacagcagagaccagcacaacgatcccaaggaaggctgttggcttcaccccgcttaagtcctcaaagtcagcgcctgcagcatatccttgcccccaccacctgcctctagctctggtcacttacacttacggttagttcgcatccactgtaacagcgcctggcggtcggcaggagccacagtgcgaagcggccgcagcatcactgcctgcctcgcagtgggaaattttaccttgctggagcaagccgcgcaggcactggctggcattgcgcatgcgcaagcagagaccgccccaccctccgcggaacaagcctccggtctgcaaagccctaagccccgcccctctacggaggtctcacgtgcgcctggggatccctgccttcagtcacacctctatctctcatctttccgctcttagctgggagtgctccgcctagtcacttttcttaaggtggctcgtcgaggcctgacttcttccccgaaatcacgtccctagacagcctcctattttaccactaactttactcctgcagttattcagcggtaggaaactgaaaccaaaaaccagtgtaagcaagtaaacatctaaactgtttcaggagccgcgtagaaggaacgcggcggtgtgccccggaagcggaagtagattctcctatagaaaggctggactacgcggagtggtgacgtttcctcattgggcggaaggttcgctggcactccgttggtcttccagctggtgggagttgacgacgtggtgctgggcgttgggaccctactttatctagttcgggaagttgggttgtggggtcatacctgtctgtctgctcccagctttcttgggtttcttccgacggcgtggggcctcgctaaggaattcccggcccctcagggccacggctttagcggtgtcttttgcggtaagtgtctgctttttcccgccccagactacggagggggagcgaggggcagccccagcgctgctcaggaggcgagagactccgggggaagtcggcctccgtggccaccggccatcgttaccgagactgagtttctgtggctctttatctcgtcttccatgagaagttttattaaagatgcgctgtgccccttttgagttgtcttccgatttacctgagccaaataagatgtaggcagttgcaggcctgagtcttcgttttgctttcctgagcaagaatttagatgaagctacttccccgaaaatccttttacttgtacgagacttttatttttcctatgtgtttgtagtgcttaacacaatgtcctgcgtgtagtagacgttcaataaacgaatatggaatatcagttgaatgccaatgatgatttaagatagactgatagctctctctgtaccatttgacgctgctgaccatccatttcttgaaac

SEQ ID NO: 6482 - DNA, 6000 bp, Homo sapiens
taaggactattcaaaataatacagataacatgaatgtgctcctgttctgcttttatgtttccattatttgtaatgaatactttcctgtatgtgctgaattcttgtttttagaaatattattttgtagtagagaaaacatagggaagaataggagttgttacaccatatgggtctttgctaaaagcacaaaaaaagactctgtcatgctgttcacagaagaggcaataggaaaatcagtgggccagggtgagtttgctgaggttggtgatgaactaaaccacaggctaccaaggctgctgtgattgggtattcctgagaaatgaagtccaggattgtttcttagccctatagccacatttgtgctctggtaactttctcgttagactgacatcatgttaactgcttagtggcagatggtccttaagtgacacaacctttgctgtaggccatattgctgagtggtgttagccccttatactcaatttggtcccatctgtccagacaggtgtttgtaaacctgacactgattctgctgctgcagacaatgttccaggaagtgtaccctttaatccctggctccagccagccctttatcattggtatgaattagagatgctcatttaaggatcaacacaggctctgattggaaaaaccacattagtaatgattttgacataagcagaagttgaggtgctgataattactattccaccaaacgaactgaggctcaaaactgctattaaaaggaaatgatcttccatgtatgatgactttcacactgcatgacactattaaataaccatcattagctactaatgcatgtactacccattttccagagccctttctctgctgagaaatttaagaccaagaatgatcaatgaatgagtcatcagtatgacaattgttgatataggacatgcaaattgaaattatttagaataatttaagtgtataaggaattaatacacatgatgatattcctcagctagtaaagctctacttataaggagctcacagtttatttctttgcatctacattttataatctagaaaagaggaaagtactatccatgggatgccttgacaaaataaaacaaggtgatttggggcaattttgtaggtactgcactagatgctggggatagaaaaataaataaaatgcaagcccctggtctccacaagcttacaaatttataagagggtacagacaagtacacaaaaagccacagtacagtgtgataaatataataatcaaagtgtgcacctggtacatgatagcacaggagagtatagcttgtaggagaaagttacagtgagggaagaaaatcagtctgctcaagaatctgcaacttcctaaattggaacatttcattttcccctttctggaaaacatctccttcttttctatctataaatgttcatatcacagaggcataggaaagatggtaaccaaagagggctggaggacaggtaacttgtagggagaaaacaagctcttcctaatcttttcaaggttttagacatgtgaacctaaaaagtttttaacaagacaagaagattgttgagtcctgactattcactggctgcgttttttgcaaattaaagtgatctcatgcccatatcagttttcctttttctttggaaatatttacattaaattgagatctgaggggaagatagcgctctaactgggatcctgcttttaatataatttgaaaatagctgcaaccccaatccaccttcctggtggcccagaaatgccaccctttttgtttgtttgtttgtttttgttgttcatagattagttcacaaatacaataattagaaatacatgactgggctgagcacggtggctcacacgggtaataccagcactttgtgaggctgagacaggaaaattgcttgagctaggaattccacaccagtctgtgcaagataggaagaccccatctctacaaaaaccttaaaaattagccaggcatcgtggggcacacctgtagtccccagctactccagaggctaaggtgggaggatcacttgagcctgagacatcaaggctacagtgagctgtgattgtgccactacactccagcctgggtgatagagcaaaaccctgtctcaaaataataataataataataataataataataataataataatttaaaaataaatacataactgaaaagatttaataatgctgcatagcttatatccatctcaatccctctctttgtctttctctcatgctttttaaaattgaagtaaaactcccataatataaaatttataattttagtcatttttgaagtgtacaattcagggatttttagcatattcacaatgttatgcaatcatcaccactatctaattccagaacattttcaccactcaaaaaagaaagctcatacccattaagcagtccttcctctttcccctctgcccccagcccctggcaaccactaacgtaccttgtctgtatgtattgcctgccctgggcatgtcatataaatggaatcatgccacacgtggccttttgtgtctggcttctttccctttgcatagtgttttcaagcttcgtctacgctgaagcaggtattagtacttcatttctttttatggttgaatactattccattgtatggatataccacaatttattaattcagcaattgatggatatttggattgtttctaatttttggctattatgaatagtgctgctatgaatgttcatgcacaagtttttgattaaacacctgttttcaattttgaggagtaaatagaagtggaattgctggctcatatggtcattcttttaaacttttaaactttttaagcaattgccaaaatttttttctgaagttgctgcatcattttttattcccaccagcaatgtatgagtgttctaatttctccacattctcactaacgtttattttttgtttttaaaaatgttcttatagccatcctagtgggtgaaaagtggcatctcaaaaaaataaaaataaaaagcattctcacgtcaggtcttaagttttcttcttttgtatatgaggccacaaaattgagagaaattttccctaagatgagctgaaagtgaatttaatgaaattctgaacaacagagctgtttttcactgactcccatcacacacttcccaaagagcaaccatgatcaaagccaaggcatctaaataatgactgttgaaatccaagctcccagaggtacagatagtcaggtgtctttagtcagtgattggcagaggcatctaaggcattatatgaggcttggctagtaaaatgctcttctgggattctgggacaatacccactctcttttcttttaacttaatgaacatttattttctctccatatgtgctgtatttgtaaaggaaaaataaatataactaaacaccaattgtacattccactttaaagaaggcaatttgttcaggtaaaataatgggttaaaacagtttcagccgtatgaaatttcaaattccatcctagcacattcctcattaataattgcacacattcctatgaaagtctgtcatttattttagtctttgattgctatcatcaacacactacagaagttattctttcctgttcaagacaattagttttgggaactaaaacacatgcagtatatgtaagtgattacctggataaagcaacagggcattaggaaatatacttttttgtttttaatttctgcatccatttcttcattctggaccggtacagatagcctccatgaggagtttagcctctccttggagtaaactctactgagaggaggaaaactgagacttacagtacagcgggcacagcctggttgaggagaaggagaaactaaggaaaaactggagacagcaaagcttgaaggaggcagagcactaagctgctgcgggtcactcttcctgtgaacaggctagtttcaaataaaggcttgcagggatcttaccgagcaaagcaacgtttatgaaaaggaacagggaagttgcatggagtgtgattcttccttccacaggaacagttggaaagccaaagagaccctagagtaagaatggtggtaagtcccagggttcgtttaaaatcctgataacggaacatacattctttcttacgggaaaaccgttttgattcttaaatgaagtcagtgagcttcaggcttgcctacattgatatctcctaatggtttgggcacgtgacccagagccagctcacaaatcaagcctcagaaagagctgacatcctagctcttcccggaaaaactcgaatgtcgccctgccgttcctggggttggtgacaggtctggtcatcgcacggcggcagctcctcacctggatttagaagagctggcgtccccgcccgcccaagcctttaaactctcgtctgccagaacccgccaactctccagggtacaaagtacagcagggacgcgggtggagcccttccaagcggcgcagccttatctttcccgagtgaacacctaggtggattcccaacaccgcgcctggcacgtttctggagggagtctcaagctcctccagagctcccagctgcgcgtcctcgtttctgcagtcgatattcctgtgggagacacggggggctctgagcgctacgagctttattaagagatttgcgaatggttcactcaggtccctgaacactcccaatagcctaagctgcctgctgtgttatagcgcagaagcccctaacgcacggtggttgtcctttcttctcataacgctcgcagcttagggccagtttccgcgattctaagagtaattgcgtgggcacctgtgctggggccaggcgcaaagaagggagttggtctgcgcgaagatcgtcaacctgctaacagaccgcacatgcactttgcaccgaccatctacgtctcagtctggaggttgcgcactttgggtaaggagggcccggaacttccctggcgggtctgagctgcaaggcaagcgagggtgggaagagggaatttagggttctggactgcgggacgggagagaagctggggtctccagagaaaagggcagcaatggagggaaactgagatgaactccagacatccatgttcatggatccgtttgagtctttgctttgggtaggagaggagtggaatgagacagaatctatacctttggttcccacccgccctccagtaaggccgaggaactctcttggttcctctgagagcaagaggcagatggtgctgcgagggaaccccggaaggagccactaaagttgagcagagtgcaggactgggaaggaaaaaaatggggggcgggggggacaagccacctatgtgctctcctccctttctccaccccacccccttttttcgtagctgctgacgcgctggtggtgcctattaatcatttaccagtccagagccgcgccagttaatggctgtgccgtgcggtgctcccacatcctggcctctcctctccacggtcgcctgtgcccgggcaccccggagctgcaaactgcagagcccaggcaaccgctgggctgtgcgccccgccggcgccggtaggagccgcgctccccgcagcggttgcgctctacccggaggcgctgggcggctgtgggctgcaggcaagcggtcgggtggggagggagggcgcaggcggcgggtgcgcgaggagaaagccccagccctggcagccccactggcccccctcagctgggatgttccccaatggcaccgcctcctctccttcctcctctcctagccccagcccgggcagctgcggcgaaggcggcggcagcaggggccccggggccggcgctgcggacggcatggaggagccagggcgaaatgcgtcccagaacgggaccttgagcgagggccagggcagcgccatcctgatctctttcatctactccgtggtgtgcctggtggggctgtgtgggaactctatggtcatctacgtgatcctgcgctatgccaagatgaagacggccaccaa

SEQ ID NO: 6483 - DNA, 6000 bp, Homo sapiens
cacttgagagtgtggttaagatcctgagctctggagtcagacttcccaaattccagtctggactctgccacttgcagctttgtggccttagataagttacttagcttcagtgactcagttttcccatggctaaaatgggaatgatcaagttttgagaattaaatgctagtgcatgttaggtgctataaatagcatataataactgctgaaaagtgtaaactattattgtaattattagtaagaaaatgtttaattattaattttttatcattgacctttaaatatacttgcttcagttatattttaaactttaaattattaacaatttgggccccatgctgtgtagcaggaggaactactgttataccacttaaatttttttcctagcttctttcttccaccagtctcaactttcattaataatagtttttctgtttgtcagatacttgtaatatttaacatcttttctgtgattataattttcatgttttagttttaattttatagtttaatggtgggtccagatctcaatgttagtacttttgtcatagcttctttattcatctcttggttagctgaagttgtttttcctgggattttgtcaaaaaattttcgaaattttggcaagttaacatgcttttcttgtatttgtactcaaataatagtttggtggggtataacattccagaatttcatttttttttccttgaaacattttatgcatttgttgtttcactgttctctttattcatattgctggtagaggtctgacgccagcctgcattttgcacccttttcatgtatttttgttaaactgcactctcacaataaaacattctttgaataatcaatcacgtgtttattatttactggatttttttcagtgtctgacctactctacacacatcaagggattcaatttctttggcattcagtaattgtactataatatggcttgacattgactgctctgttaaacttcccttggacacagtatgccttttcagtcattagattcaagttagcttttattactgggaagttatatataatgttcttgaaataagtaaaataatggagatcagttaaatacatatgggctctccactgcctaccttcgttgtcttttcatatctttaacaaaaaaaaaaaccctaacacataaccaaagaaaactttatttctactttttatttatttctcttcaccattgtctctatggctcttactgtgtttacagcggcatgtgcttttctgtttgctgcttccaactgtagtattatttctgggatggtgttgcttttgcttccactttagttttgccagctcacgtttcatctcgttttgtgttatcttttctctgagctcttttattttccagagatgattactatattagatttttaaccacagttttttcctgctgtgtgataacctttttctggtgatttttcttcacttgttatttgtgtttttcttattttcattttttggtatcgtgtatagatcctgttttgttttgttttgttttgtttcattttatttactactactgttcttccaatgaggggtgtttttcttggatcatctttgtgctagagcttggtgttgttgaagggtcagggatggctggtgttctccttggggactgtgtatgtaaaatgatttttttagcctttgctgcttttcagataagaggcttagggtctccctgtagagaatcttttgactgcctcactggctagttgctccctttgagtgatgtttttcctcttgagatgtgggattttatctgcaactttttttttcttttccttcttgagaccttcttccaagaaagttcctgcttgcaatctttgcacttgtttgttgtttcccatgtcaagttggggatggctggttttacctttcaggatgtgcctgttaatttcagagaactacacatctatggcacctctgtagccatgggtatattctgacagggtcgtggagcatctgaatttgatctttactatatttggtggtctttccttatatgctttgagattacaggttactgtcattcatagcagcttacattttggtttcatattctctcttttgatctagcaggagaaggaggaaattactgtcttgactctgagtttaaaactggaattcctgtagttcttcgtaaaaatctgttccttggttgatatgtatctagttggaaatttcaggatacacaacattaaagagatttttctgaatatttcactgatcagtatttggcagttattttactttttatgtagtacagaactctgcattgacccaagaacacttgatgttagatacttcattttcataatttttttttaatcttagcaccttttattttttattttatttatttatttttcttatactttaagttctgggatacatgtgcagaacgtgcaggtttgttacataggtatacacatgccgtggtggtttgctgcacccatcaacctgtcatctacattaggtatttctcctaatgctatccctcccctattcccccacgccccgacaggcatgttgcccttcctgtgtccatgttccccttcctgtgtccatgtgttctcattgttcaactcccacttatgagtgagaacatgcagtgtttggttttctgttctggtgttcgtttgctgagaatgatggtttccagcttcatccacgtccctgcaaaggacatgaactcattcttttttatggctgcatagtattccatggtgtatatgtgccacatttcattttcataatttttattagcccatggtaactattactaattctgcattgctttctcaattgcagtcaagtaagggagaattgactacgcttatacatcagcttcaagaaaaggacaagttactcgctgctgtgaaggaagatgctgctgctacaaaggatcggtgtaagcagttaacccaggtgaagacattcttatgtacgagggatatacttcccaaatcagaagcaacaaaagattttagaaattgtccataatcagtagtttaattatttgtaatttatgtccaacaaaagtaactttcctttagagttttgggagggtagatagagctgtctctctcttttgtgatattatagcctatagttgaattatttaaaataagagtacttacagatatcctagcttcagaataacaaaagcactctgtacagaagcatgggaatttgttttaattggatctgacctagatctgttctcaatagaaacacagaatttggtgtgatcttgtttaagtctgattaatggaataagtgtgaaactcttaacataggtaatttatttatggagcttcttgtgataagtataattttttgtcaagttcttcacatctcagaaattttactttgagaggttaatagtaaaaaataccagaaaagccaatctttaaaacatcatgaaactgagagaacagaattgaaactatagaaaatatggtttaattattcctgaagtgcttgtttctctttctagggattaaatgcagtagaatacatgatgtttatttatgagtcattcacctagccacttgatgacattgtaagagtgaatggctttgtttgaatataaatcctttatgtgaatttgaagtaaataaaaaaagtcaatggaaaaagttggcaagattaattaaagttgttaataaaattagaaactttaacatagttttttgtgactatatgactatataaaaaattaaaaattaggataactaatttgataattcattgagccgcatacttatgatgtgtatacttctaagtatgttatacaggagtataacaatttgtaaagatgaatgaacaaactcaggcagccataaattatgtaatatctcaaattttgtcatacaattgctttagagcaggaacatgattagtcctaatgatacctgcagctaactttaaaattgcttggctttcatgtactttgataattaatatttgttctaggagttcatagtaccggcaaaacaaaatgaaatccctcatttaagatttgacttagtggccgggcgcagtggctcatgcctgtaatcccagcactttgggaggctgaggcgggtgaatcatgaggtcaggagatcgagaccatcttggctaacagggtgaaaccccgtctctaataaaaatacaaaaaaaattagccgggcatggtggtgggtgcctgtagtctcaactactcgggaggctgaggcaggagaatggtgtgaatctgggaggcggagcttgtagtgagccgagatcacgccactgctctccagcctgggcgatggagtgagactccgtctcaaaaaaaaaaaaaaaaaaaaaaagatttgacttaggaagatgataaaactttgctttctgaatttgctttcccttgtttcaaactttgactctgctatagacatcttatccctatttttttcccttaggaaagagaattatttccttctaggccttttttccctgaaagagaacgtgtacctgggaatgatagagaatgaactgttgtgctttaaaatgttctttcgtgtaatcaagttagaatgtaggatttattctaggttcatagtctttaactcataataaactagaaagtgcatttgaattaagagtaaacaacagtggcaaagtgtttatgaagggaattggcgtgaagagcagatgagatgcagaagactgtttttaaaatcttttgaccttgctttttttaagcaagtacttaatgttttatcattcatgattattttactgatgttaaataacatcattgtttatcattgttgcaggcttatgatacttattaaataacaagtttttaaatttctgggatattcttttaggaaatgatgacagagaaagaaagaagcaatgtggttataacaaggatgaaagatcgaattggaacattagaaaaggaacataatgtatttcaaaacaaaatacatgtcagttatcaagagactcaacagatgcagatgaaggtatattttcattctttggaaacaagatgaaatggttgcattcactttattagcaaacttttaagtggctagtatgtacaaggccctttcttgggccatcaacatacagtggctagtgaagttcactctgcgtcctaagtaaaacaacttttctaggtggggatgaggtagggaggccggatgcagataaatatgatgatagagataagtattggcgactttagagcaatggtgatgggaggtaaggaagaaaaggatttgatagggaagactttttagaagtgatatgcagactgtgttaaatcttttaaatcaattaggcattatcaagtaagagagtaaagaaatgggcactgaggataagagttacttggtgtgatttcttagtccatctctggaggtgatagttcagtgggtatattttgggacccaggactgagctttttaatgagtgcactccaggtgttaccagtacagattgtctagagtaactgctctatgagaaatacagtaagagttgtggtatttggtaatgagggctggaatgaagaagggatattgagaagtagatagaggccccatcttaaagggccttgtatacctgaagactggggagccagtgaaggagtttaagcaacgcagcagtcgctggaattatactactattttaaattttcaccttggtagcagtggggaaagtggagcaagggatagttggaacactttgctagaattcaagtcaaagaacaagggcctgaaattagatgttgacaatgagagaatgagtttgagtatacaaagagttagttagatagggcttggtgttagtgtgaaggggagaggtgatagtgaagaatgacttccaaggttttggcctgagtgattttgtctgttgttgcttcctaccctttcacctgtcttctgtcagaaggctcagtttttacagtctgtcttttgtatatattttcca

SEQ ID NO: 6484 - DNA, 6000 bp, Homo sapiens
ttatgaaggtgagaccctagtctgataggattagtgcccttaggagagatgccaaagagcttgatgtctctctttttgctacaaaaagacacagcaaaaaggcagccatgtgtaagccaggaagagagtcttcaccagaacctgactatactggcagcctgatcttgtacttgtagcccccagaactgttagaaaataaatttctgttgtttaagccactcagtctatgatattttgttatggcagcccaagctgattaagacaaggcattttaaaatatttagtcagtttgggcactgaaactgacctgtccttgggtgtctgtttgcaatttcttaacttttagtctcttctagttacactacatttatgaaccagaggacaatgtaatgcccatgtaattcttcacctaatcgaaaacgtaaggggaggattaatcaacaggaaatccatttataattggttttttaatacctctaccatttactgactataaaatatattccagttaaatacttgattttgaaaagttagcattaaaattgagtttaaatgtgtgtatacacatgattgcctttaaaatatttaaatttataaggtggttattttcagaatacaaattcttgagttactgtctccgtatcccatttctgagatcagaaattgaatgcctgatgtaatctttggattcaaagtgaatcctaggttctttaattttaaaaaagaatcttttaatttggttttcccgacattctgcattattcatttctaaaagtacataaaaggttttttactaaaatcttgttggatttaatatatagttttaatgtttaagatttgataattacaaagagttttttgtttttgtttatctgtaactaaaaagacaaagccagtccccacatctatttttaaagaagaaaatgactagtttatccagaaaaatcacctccagtttcacttttgattaagaaaataatagaattgagatcatctctagacaataggtgtgatactgctgccaaatgatgtatgaaatgcatggactcttcaaatttggacagttgtcagataaattgtttcttaattttatttcagaagatatgaaagggagcagaagaggcgaaccccgcagtgtagtaatattttccttccccattctttacctagtacagttgtataataatacttttaaatgacttcttctgtgcattttaatttttatcaaagacagacattaaatctacaatgcttagctcagacactcaggaattgtttgaatgaatgatacacatttatatcatcttagccactgtagaaaaaatcttttttcttggcatgtggatcttagtgagtgtgcaaaatttgaaacatttttatagctgttaggttccaaactaagttttcatcttaaaaactgagatttttttttaccttagaaaatttctattacattatcataagtattagaatttaaattatcagaagtattataatttaagtgtttttccatattaaagaattaaccacaataatgatccatttggagctaagtcctatatacaggagaataatcacaatgtttgattacttcaattatgttatccttgtatacgaatactttactttgccattgcttattgttaaaggaccaaaagagatttaggggtagaatctagttttgataaaagattttatgagcatacattatttttacacaaattatcctatccttgatagaggagtgttgtcttgggggaaaaaaaagtgtaccaatctacatgttttccttgaccttcctgcggcttactatttatgtgtggtttgattttcttgattttctgttacttgaatggtttctactcagaatgaaatgaattttattttaacaaagtattgtcctctaatttaacatcacattgttaatgttttgctcattaattctctgctcataaaaatttggtccaggcgcggtggctcacgcctgtaatcccagcactttgggaggccgaggcaggcggataacgaggtcaagacatcgagaccatcctggccaacatggtgaaaccctgtctctactaaaaatacaaaaattagctgggcgtggtggcgtgtgcctgtagtcccagctactggggggctgaggcaggagaatcgcttgaacccgggaggcagacgttgcagtgagccgagattgcgccactgcactccatcctggggacagagcgagactccgtctcaaaaacaaaacaaatttgaagggcatacattatgaggcagagcacattagttggcatagtcctgacatctatgtgagcaaacataaaatggcgttactatattatatccataattgctatacatttgctttggggctgtcaacatattcttaagtggataattatttcagaaattgtcttattattattactactactactattttgaaacagagtttcgctcttgttgcccaggctggagtgcaatcacgcaatctcggttcactggaacctccgcctcccaggttcaagcgattctcctgcctcagcctccctagtagctgggattacaggcacccaccaccacacccagctaatttttgtatttttagtagagatggggtttcaccatgttggccaggctggtctcgaactcctgacctcaggtgatctgcccgccttggcctcccaaagtgctgggattacaggtgtgagccactgcgcccggccccagaaatgtctttctcctcaacttggatttcccgtagtttgggtattcaagtacaattatgctataagttttgggatttagttgtctcttttgaatgttatctttggtaccccagaagtactctgaccttattggtctctggacacagtgtttactagcattatttttaaaaatttagtaatatattgataatgtttgtactctgtgctttaaaattaaattatttgaagcagtttgatgatggtacatttaactgttaagtgctgtgccaagtttgagtttctccacttaaggtagaagtagtcactactttatgaggaaattgtagtgtgcaagtttgtgttctcagattcataccactgcttatacaaaatggaagtgttgtaaatgctagttaagttcttaggttaagctgcagagatacagtcataacctgagttgcgcatttctgatattaaccgttctaatgttaaattctgggtcctgggagcgggacagtacaagacaaagaggaagagaagagctttccctctttcttagctgctaatgtatgaatgtgggtaaggctttgactttccaaagttacttgaaattttaaattataaaattttaaaactctgaagaatcattggtagaatttcagccaatgtagtagtttagacatttaggggagaaatgtttttgctctggcctcagttgttcagttttacaaattcctgtattcaattttcttactactcagtgatggcttttaattacttcctcctcctttgcacatttgaattaacatattctctaaatgctaagcttgtacacaattgtataggggtagttgctgatgtagaaggacacttgtcacaatttgtatgtattgatcatttgtaagttgggactaagacttttctgtggtgtgtgtgtgtggtttttttttggaagggagtgtgttgttattctgtgttgctttgctttttcttaaaagatcctcttctatatatttcgtgtgatttaaatgttctttttttttatataggtttgtggtaaatatgccagctctagaacacatgaatcagattttacacatcttgtttgtatttttaccctttctgtgggcacttgggactctgcccccacccgatgcacttctcttatgggcaatggagcaggttttagagttcggccttggaggctcatctatgtcaacccacttacggtatttatttttaaatattgatgttatatgtaatattcttaaagaacatttttcttttcaagtaaatatttttttcttttttttttctgtacaggttattagtaatgttcatcatgtctgctggaacagctatagcatcatatttcattccaagcactgttggtgtggttcttttcatgactggatttggtttcttgctgagtctgaacttaagtgatatgggtcacaaaattggaaccaaatctaaggatttacccagtggtccggaaaaacatttttcatggaaggaatgccttttctacatcattatattagtcttggctcttttagaaactagcttgcttcatcactttgctggcttctcacagatttctaaaagcaattcccaggctattgtgggctatggtttgatgatattacttataatactgtggatacttagagaaattcaaagcgtatatatcattggaattttccgaaatcccttttatccgaaggatgtgcaaactgtgactgtattctttgagaagcaaactaggctcatgaagattggtattgtcagacggattttgctaactttaggtaggaagataaagtctattaaccttgtgttacaaatcatatcctggaagtattcaaaaatattactcaattcccatatttgtgtggtattataccatatacaagtgtttgttcttttatgttatggttttttgtttattggctttttagttcatcgcttaaatgtgctcataaaaaatgtgtatttgccagaataaaatatggtagaaggagctattttgccttaattaaatttctctctttttgttttgttttagtatcaccttttgccatgatagcatttctttcattggacagttccttacaagggctccactcagtgtctgtctgtattggattcacaagagcctttagaatggtaatcctaatatgtgtttaatagtattttcctattgctaagttttattgtaattttgtttaatagtttgcttagattatctaattctacctgataaaaatggataatttgtatactgcaggtatggcagaatacagaaaatgctttattggagacagtcattgtatcaacagtacacttgatctccagtacagacatatggtggaacagaagcctggatacaggactcagactcttactggtaagtgtgtcttttaacagctttactgaaatatattttacatactataatatttgtccatttagtggtgtatattcagttttgtagtcatcaccacaatctaattttagaacattttcaacatcccaaaaagaaacctcaactgttatttcccattccccctctccatctcgcctactacccactgtagtcccagcagctactaatctactttctgtctttatggatttgcatattttagatacttcacatgaatggaattctgcagcatgtgatcttttgcatctggcttctttcacttttatgttttcaaggttcattcatgttatagcatgtatcagtacagtcatgcactgcataaggacgtttcagtcaatgacagaccacatatacaacggtggtttcataagattattatggagatgaaaaattcctatcagctagtggtatagcccttgtagggtagctcattactcacgtgtttgtggtgatgttggtgtaaacaaacctactgggctgccagtcatatagaagtatagcatatacaattgtgtacagtatgcagtacttgacaataagcaactactggtttatgtacttactgtgctttttattattttagagtatattcctacatattaaaaaaaaagttgactgtaaaacagcctcaggcaggtccttcaggaggtattccagaagaaggcattgttatcataggagatgacaactccatgtatgttattgcccctgaagactttccagtggaacaagatgtgaaggtggaagacagtaatactaatgatctgaccttctgtaggcctagactgatacgtgtttttgtatcttcatttttgacaaaaaagttttaaaagttaaaaa

SEQ ID NO: 6485 - DNA, 6000 bp, Homo sapiens
taccacttctgcccacaacccactacagactggtggctatagctagtcagtcacatggtccagcccaactgcaaggggaggagggtatctgggggtgggtgtggaaaaatataatctttttgtatgtctggaaagagagagtaagcatgataaatctcctaccatattagggaacccatttattggctaattgagttgcctttctgtagttggagttttgggtggttacctaaagaattggcagatgaaaacaaaaataaacagccctattaataaggaaggacgggagtgaatgttcaattagaaatcaatagtgtgaactatatgctgctttatcccagtggagaagacagaaatttcagccatggaggcaagtcatagggagggatagtctggctagtttcatcagtctttaaatcaatcacttcatttactcttgtaatgggaaagatttgctctggctttttaatgagtaggtatagagtttgtttaaggagctggctcaaaagtgacttaaaacacattgaatttgaaaatatagattcttagctactcaggaggctgaggcaagagtacagcttgaggccaggagttcaagacgagccttggcaacattctgcgaccttgtctctaaaaaataaaaatgaaaatatagactttttttccctatatttcatttttgtagttattgtcaatggtgtgtcaagttggctagatttatagttttagaactgacgaacaactaaaacttacctagtccaacccttttattttacaaatgagaaaactgaggcccagatgggtaaaatgattatctcaaggtcaccccttcttgctcttggcaataacaatgctgccctttggatgacttcctggaaaatcggatcctgtaagtgaaatgtagctagagcaacaattataaaacaacgagaacaattaacaattattcagaatgcttccatggctgacagtcagttggtacacgttggtagagatagaaaaatttctaaactatttggtaagtagcttatgctaagccttctgagtgcctcaaccccttgctggaactccacagatctccccaccgtaataacaggatccacctcaaaggtttgatttgagaattaaatggtggaggtaaagagttttgcatgaggcctggtgctcagcactattacactttggctattatttttattacagtcataataaaatggtagtaaatttcaaaccagtttctacatgaatgttcacaacttaggaaatgtgatagcattcacgttcattaactttgatctagctaatctctcaataaaatggccactcatgtactcactttaactttcattttgatcttttccatagtctaagggttgactccttcttgccccgggacacccgagtccccatagctctagctgatggttaagaatttgaccgaggctatatacaagaaaacaatgcactgacaaggccctgttacttgttgtataacagatcataacgattgttctgtctaatcttttgttgaacagaacttgtctttaacttttgggataagcaaagatgggtccaaaacctagtttggtgagggaggggtggagtaagaggtggagtacctgtacttacttaagcaactattacaaactggcagtgatgagcagcagaggcaagcagttgggagaagagaatgagagagcgcagcaacagggtgggacctgcagcttgtggaaaaatgcttttgacacagatactttctgatggccagtgatgtttagaaccttttgggggattccttctctctcagaatttaacctggcaagagaacgactgagttctaggaattttcttgtctggagagagtaaaataaatgtattttttaaaagctgggactgttatccacactgagaagaggcagggtataaaattccctttcataagtgaatttcctggaaattcatgattggcttggaacttaatgtgtaaagacttgttctcaaatatcagttgtttgacagagacctccagttttgggatggcagctaaatcctgagcctgccttggaaagggttttgataataatgttccatcacaggtggagaagcacattgattcaacaaagcagacttcaaaaccactgaagaattagtttctgagtgtattcaagagataccaaagttatttgttattttaacgtatattatactgttctatacaaatgcaccaaatcctgggcaaaacattcctaggacaggtttttttttttttttttttcagttggaaggaggtagggaaaataagtgctttaattcctaggattttggaagtaaaaatggaacaccagacaaaaatggaatttttaggcaaatgtaaagctttgtacttgggtatctcaaagtattatacagtgtaaactatcatgattattaaccaactagaagtagttcttttttttaaattttatttttaattttagacatgagggtcttgctatgttgcccaggctgaagtggctactgacaggcacgatgtggcactgcagcctggaactcttgggcttaagtgatccttcctgcttcttctatcttaaaaaaaaaaagttacgcttgcttgttaaaatatttttaaaatgctgtgtttaaactaagaagtaaatatccaccccacctctgacttctaaaaattatctaaagtatgactggtaagatttttacctttaatcccacataagtctaaaatttgtgttcatttccaacaaccaaagtgtgtcacttttataccagaattttgtcctgcttatacgtttagtacagaaatctcatgggagagagcatccatgcatttacaaattgttattgaattattttattgaatgatgacacccaaactgagctagaacataattctggctctgctagtacatcttctgtgtgatcttggacaagtcactctactttcctttcaattttcttttctcacagggagataatcataaaaacgactgtaaagtacagcacttcatagagtgctttttgtttaaagagctgacaataaatacgagtctcaaggtctaggaaagcctccctcacaacctgagctgcttgaggacaagggattttcttttgaatcagcagtaccttatttgtgtatctgtgatagagttcctggtacataagaaggtctcaataaatatgtgaatttatgaatattaggcagattgcaaccttgacaggccactgcctcttaaatctcctttctgtgatcttttaatatttaacatctaaaaggccgccgctacttgctttgggataagtatccccggtatgtactttaaaatgcccaagcctagagaaatgattcttgtcttaagggcaccatttcgctctcccaccgtaaagcgccccaggcttgggatctgggtcccaaggctacagggaagagtttggaacgggaagctcatcttccggccctctgattggccggctcgcactccactcacgcggcgcgcagctctgattggcctcggcggcacccctcgtcccgcgactactttgtgtgctggggcggcgcgctccggtcctcccgctcagctggcggtctgggctgctctggggcagcccttcggtccactgctctgcatcgcgggcgccgggaattttccgagtccgagcgggtaggacgcatcctagggcaaagcctctcccctctccccgtgctgttctctttcccgtactaaataaacttccgcctcagaggggctgtcgcagccgcgggtcgggagaggccgggcatcgaactcaggccctcgtggggggggtctttctcttcgagtgaatgtggaaacagctcttacaagataaagtagggcttcgctgagtctcctgggggagcgatgccattgtaggatcgcgctggaagcagcagtcaagcggccaaatgcgggctgcaggggctgagcagcagcagcgcgcacccctaaaagtagcaaggagccagcttcaaaacctctagtgcgggtgccccctagggccgccgactgagctggcacgggccggtccattcccggcgctgtagggagcacagcattctctggaggcgagtctcctcccgggatccaggatccgctcgcgccccgctcagcctccggccttcaggcggtagagggcggcctacgcctgtgtgcgagccggagccggcgtgcgcagccgctgccctgctggaactgtgccgtcccgctgtggcccgcggctctgctaggcggtggatgctgctgctacgctctccaccggcgcagcgaggaagggggcggggagaatccctggcacatgccagggtcgccgtaggtggcagcggccggcgcatgcgcgccctctcccagaagccaggaacgccgaggggcgcgctcccccattcgcgcgcgcacgccggcgctggccgaggcttccccgcctgcgctcgttgtcagagccgctccggcgcgtgcgcgcgttatctccggccgacccgagcagccggttccctcctctccaggccccctccccatcccacccccgccgcctggccccagccgacccgtcccttcgtctccccgcggaatggggccggcactgctcagggtcgcgcgccctggacccagctcgctctcggtctcgcgctgtcagcgactgcccggctcgcgccgcctcgcgctctgcctcagtcagtggcgccgaaggctccgttaagcggcggcggcggttcctgtttccgtttcttcctctccgttcggtcgggagtagcatcctccactcagccacccttcccactcccccatcgtggggcagctgcggctgagggctgtggctttggcagctgcgacggggagcggcggagaccgcctctgctcccgcctggggtaagggggcgttttgggagccgggccccgcgcgcctcggggtcttgggctgggctgcgcgcgggatctgaggaggctccgcggctgtccctgctcgttcacccgggcctgttgctgcaactgctgccggttaaccagcggctctcggaaaagtggggagggagcccccgggacgctctggcggatgccttggcgcagccccgggggcgcgggcagagggtgaggggcgcccgcctctccagccgggacgcggagctgcgccgctgctgccctcggcgtcgcgcatccttgcctagggcaggggccaaagcctagggaaggagaagggttgggggcgggggtgggaggtgtccgtcgtttcccctccacacctaccttcccttcgtcagcagctcggtccctggagtcgcggtttgtggggaggaagatgcccgtgcgttatgggctctttctgagtgctgctcgggctagaaagcagggagtggaccctcacaaagatccgcgagggactgatgcagggcagttaaaggcttgagtgcagctgtactcccttttgatgtgcaaatgacgagctggcggcttttgagtatcaacttatttgggaaggttaaatgagtccatatttatcagttctaggaggtttgtcctgcaggattgagtgggttgtcgggtgcagcacctgttctttcttcacagtggggattgcaatcttcagagacgcagtgtatttcttaagtggcagtgtcatgcttagggtttgtcccggatgagcttttattttagcattttgccatataatatatagattgaggccttggttaaaggcacggacaggtggtgtttttttccttcctatgttttaattattcacagtttatttaaacccactcaggaaggtggacccagaaaagccaaattctgtagtacataaccccaaatttcaaggttttgcggaacaaattcaacacaagttttgtgtcagtttagagttaaacgcatctcaagtaactgacttaactggcttgcctctatgaaaactgtaggcaggtttcattatagattttttttttcttgttattccggcggttaggtgcatgtttatttt

SEQ ID NO: 6486 - DNA, 6000 bp, Homo sapiens
gattgcttgaccccacctccagaatttgatttcagagatctggagtggccagagatttgcatttctaacaagtttccaggtgatgttgatactgctggtcttaggactatactttgagaagcactgccctggattattttttggtaactgagatgctaccaagattttctttagtattatataaggtaatcagtgattattatttgggctttcttagagggagaaacagaggagacttagcagcttctttcaattgtaaggcatgtaattgttaaaaaataaaaaggttgaggggaaacaatattttatgaatatcaacttgattttcactatgtttatagtcactaataggctaactcacctgccactgatagcctgcttgtcaagttatggtcaaaaataagtagttaataaaaaaaaaagaaagaagtagctaatagatagaaatattgtattttcaagagagggtaatatcagtaatctcagtaagtactttaaaatctttagctaaaatcctaatattttataatagagtcagttttttttgttttattttgttccgttattatgaaattttagattttatttaaggattccaaagaaactccccatacacattcatgcttcatttcatacagttttattaagtttattttgaggagatagaaattatgtactctttgaattctttatcatttcgctatattatttcgatttatgatttgttaaatacttacatacctttctgataactaatgttttttgtttttttaaagcctgtggatgtggacaaagattcatccctagtgactctctgttatggactctgtgttctgggacggagagctttggggactgcatcccatcatatgtccaggtaaagaaggcatttctgttctgaggaagagagcatgggaagctgtatagcctaaatctaaaatgatttttcatggacgcatgtattctatgctaatttattgtaaagtctttttaggttttatatttctatacatcatcttcttgaacataggtgagctgtcttaactggttaacagaactggtttttaaaattcacacgtgtgggtagccactgataatgagaatataatgaatttaagacattttaaaatacaaccaccccatgaattttgattggcctcctcctgtttacatctatttttctaataaattcattttccatatttccttgcagtctttgtccagggtatttatacttctaatatagtaatatattagattcggggattctaaatctaaactgaatttcctaacatatacatccaaatgaatcagaattaagaaataccacatattttaaatttttttctgtgataactacatgttttccgttaagcttttcttagtttattttaacttataggctctttgcctgttgtttattttcatggactcactattacagtggtttataaataagggtcccaggtcggacaggccctgtctcttgtgattctggttcagggttctgacattagttcctggaatctgtattttcaaaacactcccaggtgattctgatgcacacgcagatgtaagaatcagtgtcatggaagacctttgtcaaaacatgtgaacttttatctccaatcttaacagtaatttagagtcattcctctatggattgcatgccctatttaaaggagatttccgtatttcttcaattcgagatgaatggatctttgctgacatggaattgctaagaaaagtagtagtccctgggatccgtatgtccattaaacttcatcaggtaagaagatgagatttttctaattcattactggtgtttactgatccttcttcacatgatttcaatattagtccattctcacgctgctgtaaggaatacccgagactgggtaatttataaaggaaagaggtttaattgactcacagttccacaggggtggggaggcctcaggaaacttacagtcatggcggaaggggaggcaaacacatccttcttcatatggtggcaacaaggagaagtgccaagcaaaagggggagaaccccttataaagccatcagatctcatgagaactcactcgctatcatgagaacagcagcatgggggtaactgctctcatgattcaattacctcccaccagttcccttccaggacacgtggggattatgggaactataattcaagatgagatttgggtgaggacacaaccacaccatatgagcttccaagttatgtttcttaggaaccttttgagaaatattctgatctgaataaaagaaaaatgtgacttcatgacaagatatattaaatctttaaaacctgaacctatgtttctaatagtaaatttgaatattaacattagagagtgactgatacaggcatgaaatgtgaagaaaaagaaaaattatttacaagctgtaagtaaaggtccatggcccccataatacttattttgacttcatattattgcaattcctgcctattccctgtatgaatattagccaactctaaatatagtgtggtaacacttcaggaatgttacaagtgctgctgttactgaatgatgaatttcattccatgtgttacatagaataataggtggttaggacagacttaggcttagctaaatatcttagtagggtaataacattaaagtgaggccccacaatgcatttctaaagccctagatgattgcaagaatatattgtgaaattaagtactggcacttgttcctccattccactggacagtagttatcagatctgatgatagagaccctgtgataagactcattaaagtgtatctgcagtgctcaaatctaattgaatcttttgcccccaaataaaaggtgacttactcttcaagtcattatagtataatctaaagtgtgggaattaagttaaaaacctcacattctttaggaacatgactaataaaggacacattatttgaaaatctctgtgaaaaatggaatactatttgaggatgttgccctggggaaatattaatttgggatcaaatagaattgtccatcttcagactagttttagagttttgagacaaaattcagtgcatttcaaaaaaaggtaattcttcagattaaaatgtttttaaaacttagacatttctggaaaggtaccaactatgtatctgctttataagaaatattctctttcatatagcataattttctaatagcttctgacaaacttcttcaattaattctaaatgttatcacagatattttatctcagcttgtccgagatgaaactgagcacagaattaaagcctctgatgccttgggtgcctgcccctagtctctccttacaggactctcttgcctgttgctgccaggtctctttccttaaatattcctttggctgtggcattattgccgatatcagtgattctttactttatattctggcccaacacacttggatatagcacactcccatcattagcctggactgacaacatttataaacagggaggtgagaatgtagaattggaaccaagaagccatggagggctgaggggaggagaggaagtggagaatgtaatgcaacctggagaagttccttaattctgatataccttctaggagggtggagattgacctataaagtcacaaacaacagccatatattgatcgtcactttgagcaagacattaggttgtctatgaggatctctcaggcaggaaaatctaggtgtgtaaatcagtactcaccattgccaaagttcatgtgctcatgaaaatccataaaagtggacaataggcttatatactaaaagaaaggatatatgcatctaccttacaacccaacaattctacttctagatgtttatacaacagaattaaagtacaattgattcttgaacaacacaggtttgaactgcatagctacatttatacacagattttctcagtaaatgtattggaaacttttttggaaatttgcaacaatttgaaaaagatgaactagaaagcctagaaataccaataaaataagacaaacttaggtatgtcatgaatgcataaaatatacatagatactagtttattttattatttgctaccataaaacacacagaaatctattataaaaagttaaaatttatcaaaacttacaaaaacacagactatacatggcaacatctgcagttgaaagaaatgtaaacaaacaaagatgcagtattaaatcataactacataaagtcaactgtggtacatattaatattatatactacagtaatttcgtagtcaccttctgttgctattgcagtgagctcaaatgttgggagtatgcttaaaacgccgtgtggcactaatcatctctgtgtgagcagttcgcctttccagtaaattgtgtatttcaataaaaagtgatctgttgcagttcttgtgtatttctcattgtgtttagtgcagtaccataaaccttaaataacaccatgggacccatacaaagtgccactagtgatgctgaaagggccccacgaaacagagaaaagtcatgacattaaaaggaaaggttgagttgcttgatatgtgccgtagattgaggtttgcaactgtggttgcccaccattccgagataagtgaatccatcttaaggacaagtgtggaaaaaaagaaaattcgtgaagcttccactgttactacaccagcaggtggaaaaccttgcgcattttacaaaataccttttcatctcatgttgaaaataatagcttttatgttggatgcaggattgctgtaagaaaggcatacctatgaacactaatgttattcaagaaaaagcgacatcattatatggcagcttaaagcataaggaaggtgaaggacctaaagctggagaatttaatgccagcaaaggatggcttgataattttagaaagagctttggctttaaaaatgtcaagataacaggagaagcagcttctgccaaccaaaaggcagcagacaagttcccagatgccattaagaaaatcattgaggaaaaaggttatctgcctgaacagatctttaatgcaggtgaaagtgctctattctgcagcgggggttgggggtggggaagccacaaaggacatttttttagtaaggaagagcaccaagcaccaaaatttaaggcagggatgggtaagctaagtttactgttttgtgcaaatgcagagaggggtttatgatcgggactgtctttacctataaagccgctgacccctaagccttgaggggaaaagataaacaccaactgctattttgattgtacaacaagaaggcctagacaaagagaactcttcctggtttggttccaccaatgctttgtccctgaagtcaggaagtaccttgccagtaaaggaccttcttttaaagttcttttgatattggacaatgcctgtggccacccagaacctcatgagttcaacactgaaggcatggaggtggtctgcttgcctccagataacatctctaattcagcctccagatcagggtacgataaagacctttaagactcattatacatggtactcaatggaaaggattgtcagtgctatggaagagaaccctgatagaacatcatgaaagtctagaaagattacaccattgaagatgcccttgttgttacagaaaaagccatgaaagccatcaaatacaaaataataaatttctgctggagaaaactccagatgttgcacatgacttcacaggatttatgacagagctaatcaaggaaatcatgagattgtggatatggcaaaaaaaaaaaaagggtgatgaaggattacaaggtgtggctcttggacaaattcaagaggtattaagcaccacactagaagtattaacagaagataacttgatggagatgagtgcttccaaaccagcgccacatgatgaggaagacaaggaagcagtgccagaaaacaagttgactttacacagtctggcagagtgattgggattattcaagactgattttgacttctttta

SEQ ID NO: 6487 - DNA, 6000 bp, Homo sapiens; identical to SEQ ID NO: 693

SEQ ID NO: 6488 - DNA, 6000 bp, Homo sapiens
ggctgggaggcttctactggctgtgagcccctgagactattttattcccatggaataagcaggataggaacacgaaggtagagagttccccattggaactggaagttggagacccttgctctttccaggagctagcctttcctgcagcctctttgggggcagcagataccctggtagaagggatgcctgtagtgagaaacatttcatgggcggtgacctccttaaggcctgagtgctcaggcttctctttgggctcgtgttctcacatgcctgtaagtctcacattcgcttctctctccttcccgtgccagacacagttgtctggattaggtgcctggcttttagaatttgggaagcactgctgttgactcactgctgggcctgtgtcctttcactgggccccagggacaagtctttttgtacaagtcttctccttgaaggatgccaggcccctctgtggtattgtctgcactgcatggcccatgtctaataatactaattaataagctgtcacctattaataacactggaatcatcatcacataggtgacagaaagccaaataaactccagcaggccagcattgcagcacagctcttgggggaggagaggagagaagagcatgaggaacgtttgaaggggccttaggcaaaatgctttgggccaatagcactgggggctgaatttgaaatctgcttaggaataaggcatgtgtggactttaatgactaaaaatccaagcttatggggcaggttgggagcctggagggtttgactcaattgaagtgctagctgagggattagaagaactctctaatgcctgatttctagtgacttggtcttggctggagaagactgatgttctcaggtttggttggggtcgagcagtgggaacttagatagaaacactcatttaatggatgaataaactgagacatggaccgtaattttttaccccaaatgttattgaaagaatgagtaagtaaaagaaggaacctatgtaatgaggctaaaaatgtcccagaaaaagcaacccttgaaattcacatcctaagagtcattagggtggcaggaatggatatgccaagtctttttatgcagaactctgattttataggcatagtcttatttataaatgtgcaattgcatgtatttcaatacataacataataaaaccaagttgctgtgaggattaaatgagataatgcattagtgcacgccaaatgcctaaaaatgcctaacttagtacctggcgggtggtaaacgtcctaataatcaaggctggtagctggtataccttggtcaggccaaaccagttgctcttggtcaccttccaatctgattggttgctgactggaccatctcagatattaaatattttaaattccactctgttaataatgaccaatactttccattgtggacttcccaggtgccatttactattgtcggtgcttttgatacaattctcacaggaagcatttgataccatttttcccattttatagatgagaaagtggaggcttgagatgttcaaaatttggctgaggtctcatggccaaaaaatggtggagctgggatttgaatccagatgtcctgtttgcagagccttgggatcttaaccataatgcttctaagtagagggttggcagggggtaacttgtggtagcagttgttattattattgttattatcatcactgaaataactttttttttttcagaatgccatgggcaatgtattcttttgattggtagtgaaattttttcttgctacatgctgaaagcactggtctggcacatttgagaaaagctgaaacagtccctggtctgttctgtccctgaactgagtgaagatggagccccacaatctaatcaaaggaaggaagataggcctgtgagagaaccttctaacttaatgacctctgataatggccctccttatcccaggacggagatgagagctgagaaggcctagggtctctgagggtttcagttgtacccattgagtcctcccttaaaaaataaaaattagtaccattgctgacatggcaccatcatttgggcaaacaactgatattgctttttgcttatggttgcattacacgtctgcaaggagacccatcttactctctttgatgttgtctttccctgctattttgtacataaccatcttcacaaatttggagctatctggggaatgctggatcactagaaagagccgaatggtagttaactaaaatggtatggaggaatgagacaaaataagcccacagatttcatgataaaaggcaaactaaaaggatacaactggagtaattgaaagataaataacacttaaggagcctaagaaagtacaaagcagaataaaatgataataacaaatatattcaaaatatataagttaaagtaggttagacatcaagggggtaaaatgaagtaaataatagtgactacagtgataccctaaataataagctaaattattaaaagggatataataacttgaaataaaggaatgccaactatagggggcagtccaaagttaataatcccatgcaggggcaaatgcagacctgtgggctggggtagcgaacatctgttgagtacttctgtggggcaggcatcctacgggtattttattacttgtttctcaaaacaactctgtgaagtaagtacaggtgttacctccattttataggtgaggatgctaagacttggagagggtaaagaaagttattcaaatcacaaggaatttaggtggcccagaaaggattggaatccaggcgtgtcccttaacctctaggctgttctgcagacgcacttctcacggggatgtccttcctaggctggtgtttgccacaggaatcccacaggcgctgacatctgcagggcactgagtcctcaggctctcccttgaggcttccgccctctcatcccttaggtccttcaggtctcttcctgctgcccccgagatgagcgtacagtttccctggctattcccgatgtcctgctggatcatggtggctcctttacatggttcttccctcaggagctcctgacatctagagcaatcccatgcactgtgccttctgaacttcccttccacattctgtggacaaatttggtacagagacttctaggaaggccaggtaaggaggatatggaactggtggccagggcagttcaggtctagagtaaataggtgggaggtcagatgtcatataaaattaatccatgaaggcatgttcgtttgtgttcctaaaactactggataccgtggaggtgttgaaggctggagacccgaagacacataagaaaatgagattgtgatctgaaaggcaaaatagactgaaaagtaggctagtaatgatggaagtgcatatgtccgtctagtcccagcccagatgccactttagtccaccaagcttgccttgatatcccccacctccaaatcacaattaatcacttgcttatcgacaatcccatagagcttcctttacattgctctcatgattattttccctttgctttatagaaacacatttctgtcctcctccaatgcttagtggagtccttggggttcagaccttgatagattcattttgtttctcatgagcatgatgccgggtacatgtgctattaaagtttgctgggtcaggaaagtgctaggatgctgcaagaacatccagtaaagggcagaaatataagaactaccatccttggctggaggcaatagagtactgtggctaacaggcaggctctggagtgggatagacttgagttcaaattcattcttagcagcttccagctgtgtaaccttgggcaccctctctaaagcttcaacttttaagactgtggaatggatctcaactgtcaaatagcacaaacctcactggactgaatgagatgacccacgtagtggcatatggtaagtgctcaacagctattagtggattggtgctggtccaagggaggacatgccagtgcagcccttaaaaagggagctggagaagaaaggagtttggggctgcattttcacataaggtgccagggcctgatgctgagcaaaacctttgtattgggtgccaccgactgtcatctcttgtttaggtttgactggggaaacgtttccacagacatgaactagtttgtcaaggctggcaagggattttcaagggtttaggggtgcagtctaggctcagagctcagagtgcaagccacaaaagagagccatcttcctgagtcaccaaaacacttgattcgggcctctgacccttagctggcagccccttaggataggatgggctgtgcctgggtctgtctttgctgctaggggctctgagagaggaagccccatttgtcactttcatttctatgtccccagccccttgcagtatgcttcatcctaagcaggcattcaaagtgcttgttgaaggaatagatttgtgtcctagttacagccctgacttccactagatgctcaaagattgccctgattttgcaaggaagagcaactactcagggaaactgaggcacacttgtaggttagagtccctcagtctgcaaggagacacacacatcctcagcagtggggaagtggtttggttactgaagctgtaaataagaattttgtctttatattaattcctactctgattctagggaagaactctcctctcaggctggagtaaggggagaactgagctcagacactgcctcttagttgtgggggctgcaaactgcccctccctcatgatatcttctcagctgtttgcaaaacagtcagggaggaggtgaagccctgagccaggcggcctgtctgtctctttaaatgctggggtctgtgtgggagagggaggggccggctctggagtgcgtgaaattcctgggctcctccagcagtctcaggctcagcgctcagccctacacatcgcctcttgcatgcaactcacagagagggagaggcaacctgtcctcccctctctcagcctcggcatctccagccaccaaggacctgcttttcgcacctccaacaacccctcccttctaccctgccactccctcccagagagaaaggaaaaggagagagaaagattctggaatttgaacctacccaaagaggaaacatacccagcaaactcagttgattaaacatcaaacagacatacagacagatcccaaatcttctgttcaactggaaaggtaaggtttgcggggaaaggaaggcagtcagggcatgaaacaactcaaggttcttgtccgttctgggaagaggttgctcctgagagggtagaagttttcagttgggagcaaccaacctagattttcttttttgaatactgtatccatgagccttggctgactgtggaaatggcttttcaactgcctttcttttccttcagtttctcctggaagttgggtccttttcctccagatgttggaaaagtcagagaatgttttagatttttatcttcttcttctttttttttttttttttttgagtctttctcctatttgcttgaattgttagtctgaaatgatgtgtgctcatcacttcattttgggcagatactttttttttgacattttgtagtcacttcccccctcatttattcatttatttatttgggctggttaaaatgagaaacagaaaggacactctgaggatcacaagaaaacaaaattgaattgagacagggatttccctagctgttgaggaattgacgtgtatgtgagtgtgtgtgtgctttttttttttttttttgagggggtgtgaggaggtggtcctagagtctaaaaattcaggttggactcctgtcttgtgaaggtgggcatacttggagaaggtgaaaagggagtgtgtgtgtgagtgtgtgtgtgtgtgtgtgcgcgggtgtgtgctcctgtttggatcggttacaagggaatcttcctccactgccttccatttgtttatattaatgatttagtagcaggcttgcctgaaaacttccactctgt

SEQ ID NO: 6489 - DNA, 6000 bp, Homo sapiens
cccagctactcaagagatggaggcgagatgattgcttaagcccaagagtttgagaccagcctgagcaaaaatagtaaatcccaagaatctgagaagcagccttacaacatatgtagcagctacacatggtgactgcagggaaccccaggccttgtctgtttaagcactttcccccttggctggacgttcctaccatgagtcagtgaccatgagatgacccacgcaggagacagccgtggcacacagccttctgtctctacaggaactaacttatcccacaagctaatcagcttgcctgtcagggtgagcatctgtggcatggggtagtaggtggagggtgtttaaagggcagaagactgggttcaaatccagctgtgtctctgactcctcatgcaaattggagcaggccacttaattgtgaaggaccttggcttcctgagtgtctgtaaaatggggatgctaattctggctctgcctattccctagggctatgagacacgctcaagagatccaacaatggtgaaaacactgcatatgacagatgccaatgggagaaacatgacaagtcaagtcacatttgctgagtgtgggctgggtgtgcttgtctctttcttccatgaatatttattgagcacctactaagtcacatagtgagcatggtagttcctgtcctcacagagcttagagtctggtggaaactatatattatacaaggaagtaggcaattaccatacagcatgatgaattatcaatagaaatgcaaggcaccataaatatacagaagagggctcctaactcaggcttcagggctcctggaatgcttttcagaggaaatgatctctcctccaagataggaagcaaaggaagagttatccaggttaagggggctttggaggtgggaagcatgttctaggcaaatgagataagggtcacccttgaagaacaagaaagagccacaaagaggcttagaatggctagaacttggagttgaaggaggggaatgatgacagattgggctggaggggccagaagggtctggagcgggggttctccaccccggctgcagcttggagaaaatactgatgctcaagtcacctccacctctggtggttgagaagttccccaggtgattcaaatgtgcagccagtgttggaagtactgcttagaccatgcgggatcttaaaagccaagtgaaagagatggaagtttatccagaaagcctctgatggttttatggaaggaagggttgtaatcagatttttctttctccagatgctgggtgaagaagggaatgagacagaaagactaggcttagagaagctggttaaggaggctgctgcagtgatccaggtgggaaatggacccagagctgtcaacagggatggcaagaagtggacagatctgaggcctggttgatgatgggctgcgaggaaagatgtgggagatgtggggagacaaaggtcattccttgaacatgcaggttgaaatgaccaagaagtttccagctagagaaacagacttgtgagtcagcagcagagagaaccaatgcactctcccaggaagaggggtaaatggtgagaagaaaagagggactggaacggaaccccagaggaccagggagagctgcgccccaaagggaccaagaagagctggtcagagaaggaagagaaagaccagaagcgcacattgtcaagaacataaagaatggtggctagtaagagtcaacatgtgtaagagggtcaaattctgggagatgtattcacaggccactggtaaccttggcagggaagatggggtcagtgcctggggcggggctgaagtggtggtaagagcagataccatctaacaggggcaactattctttatctatttgtttgctcattcagtaaatactttatacatgaaacagggtgctgtgttcagagctgtggataagatgccaactccggaggccttcacccactaaaaggagacagataatctcgcccacatcacaaaacgatgagatataaatgctagaatgaggctgggtgcggtggctcatgcctgtaatcccagcactttgggaggccgaggcaggtggattgcctgagctcaggagttcgagatcagtctgggcaagatggtgaaaccctgtctctactaaaatgcaaacaattagcaggcatggtggcacatgcctgtagtcccagctactcaggaggctgaggcatgagaattgcttgagctcgggaggtggagattgcagtgagctgagattgcatcactgcactccagcctgggcgacagagcaagactctgtctccaaaagaaaaaaaaaaaagctagaatggagatgtagttcacgggctttaggacgtagcagaatcaactctaccagagaagaggaaggggcaggcaaggaaggtcttagaaagcaaggaagagggacaaggtttgcactgatgtggtcatcatgaaggccgcccattgtagagttcagatcttagcctgcagtggaagaatggtacttctggacctcctcatggattggtggggccatgtgaccagcctggggccaagagtggtgagtagaggtgagagcagtcatgttcctgccagagcatctaacggtcagcacaggaggcgccagaggtccttcaggcactgcaaacagccaatgttgagactgtggctgctttcaggtacctgactgacccctcctcaagacacgcacctcttggtagaccagaagcccgagccggaaacaaatttctgctgctttagtgctgtgactgtcatcatagcatcccttggcccagtgctcctcaaagtgtggcccctggaccagcagccatcagcttcacttgggaacttgttggaaatgtacattctcaggccctactctgaatctgaatttactgaagcagaaactctgtggggttggggagggggcggtccagcaacctgagttttaacaaactccaggggattccgaagcatgttgaagtttgagaaccgctgcctatccagggctgatggatagtcatcttcaaggcaaagtggaagttacaagtcatggagaaggtcattctagcaaagaaaactttttaaaatgaagtaagatacaaattaaatggtgaggcccatcatgtcacaggaagggattgttaaggaaaaataccatggtacccacctcccctgggctgagactgctgaacaaaatggcctaaactctggccatgtagacagttccctgcagtgtcatatcagaagacacaattgcagaggagatattccgaatccaaaggcactgaagccaggaccaggataaacccggcaacgcattttcgctttgtcccacggcctttgctggtttacaaaatgctcctgaatgccttgaatcccaaaggtacagaaaacccaattctctcttctgcagaatgagtcattagagctggagctgaggctatttggtaatgggcactatttaaataaagtgaaaagtacaatttcaaatgaattgctttttaaactgtcaaataaaaggaatccatttgtgcatgagaaattattccaagggttctaactattaactgaaagcaggtgaaaaatgtcaaagaaaacgtcctactaaagagctgactaaatgtctaaagacagacacctaatgactcctttgacctgttttggattcaaaaacatgtattttcaccagccccaggtgagctccgtggacaaaagttttaagaaaatattaaatgctagtagcaagatgccattttgtccatcggcatcgccttaaccaatgtgaccctgacactgttttagggacaggacaacagcatattatcactttaactttttcctttggcttaaatttgatgccaagggcccttggctagctctctaagtgtcatatttaacaatgttttatagtcttctatttgaatgcatccttgtacagtctagtcaatgtttgcagaagaaaattctgcaaacgtatgaaaagtgtcttttctgtcacaggcaggcatgcttggttgaggtcaccagtacggagagtgagcctcagtgttaaggcatctctgcagacaaaaacagaaccctggccttttccatttcatttcctctaggggtttccactgcaattagttttgtgttcatgccttcactctctttgttggtattgaaacagagctgctgaaaataatcagtgaggtttctcccttcctggccctctggcacctctaacctgtgtcactattccaggctaacacaagcaaaatgacccctgcttactcagtccagagggaaccgtgtgggtggtgactggctagaggcattggagcgggcttgaaaagggagcacttctcacacgtgaaggtgcacacaaatttccaagggatctcgttaaaaatgtacattctgactcagtaggtctggggtggaatcttaagagtctgtgtgtcgcataagctcttaggcaattctcatgctgctgaggaccacacggtagtgtagtgagctgtgagggaacaacgcacattctgcacaacagtgactttcaggaccctccttaatggggcatttatctaagggccttgctcccttttgatttagagttccttgaaagcagagactgggtctcatacatttgttattgttttgttctccggttggcacagggcctgcacacggtgggtatgtatttatttaattaaagagttggcctgttccaagaaggattttaacccctagcggcactgaacaggtggcgatgaattggccgggaaggaagtcggtcctaggggtagtcacagaccccctgggctggggtcccctccacctgcctgcacctgtatcacccctcagctgctgttctgaaattttccctcctgccccatttttaaagcggtttacaccagagagccgaccagaaaggagagatacaaaaccaaaccagcaagccctgggaagcggtaggcttaggaacatggaaagctcaaccgtcggttgtggggcccgcagatctctctggttcccctctctgccccgtctccagcttttttgcaggtcggtgtcgcggcctcgcagatccccaacagccccgagagccctgaaggagctggtcccagcgggtccaagctcgtgttggcttggtgcaagcctgtttgttagctctgcacgaccaattaattttctcctgcatcttccccccgtggtgggtggcggggtggggagggggtgtgtggcggggcctcgggtcggctcgggggtcggagagcccggacaggagcgactacactgcagaaaccctttttctaagagtccccagcggtgccataacctgtttctctctgcagcagcctcagagggtaaaggaagggctcgttgcagctccatatggaagaaaggagagaaaaagggagaaggaaggggattatattggtcagtagaggtccaactactgaagagaagagtgcacgggggagtgcgccctacgggacgagtacacgtgctgggaagggcggggggtgagaggcgggcaggaggggaggagtagggaggcgagagcagcgggcgggaggcgccacggcctctcagacgctggcgcccgcagccgagaagccagagagaaagttcccggggagagctcgcccctgggagggccgacgtcgagcctgctcgccgcgagggtctcaggtaccgcgcgtccagccagccttcccgcggcgcgcactcggccgcccgggctcggctcgtcgggaagcaggggaacatcgccggctggcagccggggcggccgccgccaaacttggaggaggaggatgctgcgagtgggcgcggcggcgcggggcgcgggggcgcactgagtgctccctacggcgctgctgccagggctgtggccgggcgagccggccgaagcggagcgggcaggtagcggctctagcgccgggactgcgccagccctgcgagcccgggccgccagcgccaccgtgccggcgtcgcctcctcgcc

SEQ ID NO: 6490 - DNA, 6000 bp, Homo sapiens
catgattctcattttttatcctgttttatattttcttagggttctatgctaagcatatattatttttaaaattagaagaggaatgaaggcattttacaacccatatcgttatggaggagcctggcatggggggaggggaatggctggaggggttgctgtgagtcctggtgagtcaccagctagctgttgggtgagttccttgatgctttcatagtagcgtgggcatgagaatgtctgcctcaaaaggctgctgtgaacactgatttttataaattaccatcaatgataaaaccacaaaagcaaagccccattttgcaggtgcagtagagatcgtagcttcatgtggggttgtttgaccagaccacttcccttttgcagggtacatctgcccaagcccccatggccctggataattctctctctccttctttgcagctgcccatgatggggggagctttcatggactcgcccaacgaggacttcagcaccgagtactccctgtttaactcctctgccaatgtccacgcggctgccaatggccagggccagccggaagatcctcctcggtcctccaacgacgccgtcttgctatggattgccatcatagctacgctggggaacatcgtggtggtgggcgtggtgtatgccttcaccttctgaggacggcacaccctgcaccaccatggggtgaggcttggcacgtagctctgacttgctgtcggcctttggcttctcctgtgttctagaaccaggagttttgaccaggggcggcggccgtccttctggaatttctccccagcagccctgatttcaaatatcccatgttgtggtcaagctgagtcagaagacatggaagtatgggcctcctgcccctagaggcatgacggggcaaggccttcagagggcagattggggatccttgaaactacattccaggaacatgggaccagatgagacagctagttaagtttaaaacatagacatgatttgatgatcgcttgctggtggtaaataatcactcgtgtgtcttgtttttatgcaaacttatcgaacctagggcgtggggtgctggggcaagagcagccctcagaacttcagtgttcctgacccaattctggtttcacattcagtcccttggccatctagtagggccattggatgttcctagtttgactttgaaatggcacctttgccaccagacacctggtcccttccaagacccaagtgcattgggagacccagggatggggggttactggtaataggtggggtttctgggggtgttgttggtggtttttatctcctggtcggactttctcttctttttaagaagaggagaggatgtctttaagagctagatgtgccaggcagtggactcttcaggccacccacgtgagaatgctgtttcttctctgaggaatcgtggaattttaaagatgaacaagattcacatccactgaattattcaacggatgggtcagaaaggggggtgatttgcctgtggtcaccaggcaggtttgtggaggagtcggaacagaaagatgtgtcctcactctcagctcactgagctctctgccccaactaagcacttccctgaggaggttgctgagaagctgccctcaggagaatgtccaggcatcttgaaggtgggtgcgagattggcaggctgctcagatacccgtcctttacattcagtgtggataccgtgcattctcctgaagctgtgaaagtgcttctgcccaagccacttccttaaattctgaaatatcagcatctggggtcctggcaagcaaggaagcttccaagtaaaaaccagagagaagggcacacttttctttcttcattaggaaatcttattgcacaggaaccacccccacccccaccccccacaccttcccaaggcagcatcccagtgcagatagagtgggaaaggtcccagaagggggctcactcacctctaggcccagagaggctttctcctcactttatacactgcaaaaacagaagaattgtgtcaataacaccctctgtagtggagaaacttaaaaagctggttaggaagctctcgtgtatatttagagacaattacaagaaagctggacttgccgctgtggtctcaggagaaatgagtgttcttgatgacaggcaaagggacatcttagttgtccagaagcggcactcttccctggaagccgccatgttaataggattactagcctggctccagacagtgcctgctcatggctgccagttcttaccgatcacatctgtcactgccaccgtatatcatctgccagtgcatcagcttaaggggaggtcacgagtgcaaaagaacctgacccttgacaatgagggagaagggacatggaccacctgtctggaattcctggaatcactggcagggtggaggctgggctggggagttagccgcggtgtgcgtgaatggctctgtctccagcaagtctctctccatcaaaccccaggtctgccccataagcaagatctttaacagatggatgtctccatgagaaaacccaaggcgagaagcccagagccatggcggggttgcttgacgtcctcatggagtcactctgccccacatgctcaaatcttccctctggccccacatccctaggagggcctgacccctgtaaagatacaggaggcagctccctggcctccaaatggcccatggagatggcagtcgggagacagggttctgtgtttgctgcggtgaagggaggagaaggcaggaggaaaaaggatggcttctagccctgaagaggactccagcatcccaggcaccgggtgcttctggctgcagttttccctatggaggcccctcagcctccagccctaacataaatgtcggttaaattcagttttcaagcctctctcccttttcagtgtcagagcagtagatggtccagggcattggaggcctcgaccactctgcattgcagattacagtgacttcctcggggttgccccatcttggtctcctgtggtttcttcatcagctttttttttaccagcatctctcaaataacaatgaagatagatatgcccattagtgtctgattaaggagcaaaggctggatttctggccacagcgagctgcactctccctcctgcctcagccggggtccgtcttagcagtttggaaaggggaaaaagatgccggtcctcactgcttaagttttgtgtccaggtgccactagacttgcatgcacactaactccttacaatcaccacacagcatcatcgccccagtgcacagatgaggaaccagaggctcagaggagtgaagttgccttcctgaggtcacacagcatgaaagtgatgagctaggatttgaatctgggaagttgggctctagagccagactgtactgccttctgccacactgtactgccttctgtgactgggtggcacctccagggcacatttacacaaggccctgaatctgcagaggctgtttctcaagatgcccgtcatggtgtggcctgggccagctctggcttccacaggtccctgactgtcctcagagtggaacatgctcaacctcccgcccactgctctctctctgcccagatttcaggggtgccggtccccaaggcctgcccccttctttaagactgaactcaagtctccttggaaggccccggtgaagctcccagagactggttttcttgggatgcaggcagaaggggaccctccctggccaacacccaggagcccagcagaagcacccacacgtagaaagaggctcactacagccagaagtgcagagtcagagtcctgggaccatcttgttctgcaaggtgaccccaggctccccaggacaggggagagggatcgtcctcattcagactctagctggggcctctgtactggcttctccctgggtggggttgcctgttacatagctgtgcctcagagaaagggtcctgcattttctggaatgttctctgtgcttacccctctgtgtgcccctccattgctcctctacaagcaattaggtgattcaaaagagcaacttaggctgggtgcagtgactcacacccgtaatcccggcactttgggaggccgaggcgggcagggacaggagttcaagaccagcctggccaacatggtgaaaccctgtctctacaaaaaatacaaaaattaaccagacattgtggcatgtgcctgtaatcccagctactcaggaggctgacacaggagaattgcttgaaccaggaggcggaggctgcagtgagctgagattgtgccactgcactccagcctgggcaacagaacgagactctgtctcaaaaaaaaaaaaaaagaaaagaaaaaaaaaaagagcaacttactgctttgtgaggttgtgagtggccaccactgaaggtctttgagaagaggccagacgccgctgtagccaggcctgtcttaagaggacttgtgcttccagggacccaggcaggatgatggcgcagctcttcctactccaagccaatgctgtccttcccctttcccatgaaatcaaggtcaagaggcaaataagactccctgctccactctaccccccagagagaaatgattctcgctcctttcagatcccccaggatctgagggagaaaggatgggaggaggggcagcagcatttcgctggaaaggcagcagatgcttttccagccccggttcagctggaaggcttggaggctggccagaccactctggcgtctcctgaagtgggtccctggagaccgaagaggctcagtggagtctgtctgttgtcagcactgctgcctgatccctgcaagacaaatggcactttccttcttcagaagcatcatctgccttcattattagcagtaatattattcccagttattattcttaccggtgccagttttgcacatctttttgttgctctatttgtgtctcatttacttctcaaattgcccctgggggcaggaatgaggatgcagagagatgcacgttaattactgtcgcatttttctgtggagaaaactgaggccagggctgaacgctcacagctaaggagctgtgattcagacccagttctgtcagctctagaggcaccctgcatcatgcccaccagggtgatccccctgggatggaccatctcgggatatgaggcctcggaggctggggttgagatttggtcctgaagagcttatagccagattgccacattcaagtgtaagtccaggaaaggggcaggcggcagtgcacagggatttatcagttccagaacctcacagtgataagaggctttagagagcatctaatcgagacctttaatttttcggggagagcagctgaggccgtgtggaaaattagtggagagctgacaagtgtctgggctcctggcccaggggtccgtggtccagcacgttgtgcgttcagtgggaagcaaagggcttgcccgggattacctgccccagccccgaggtgggttgtgctccctgcagctgccatcggcccgctttgcttcgtcctggcagatgcccagtgattgtccccgagcaagtgccagggttgggctgagctgctatgacagggaggcccagggagttctgctcagggagccaaagggaacagccagatcctgaatgttctatgttcacctgccccagccccacccaccctggcccactccacaggcccctgaccatggtcactcacggagagggatggaggagaaggtggttgaactgagtactgagaacccagaggacagagcccacagcttccaagcaggaaaagggacctctctgaaaaatctggataaccagaattatcacagcaccttctcattcccagcgcgtccttctgagctcagaccttgagcatttactgggtttctttttgaggaagagggaaagtgacaaaggacaaaacaatgcaaatcttcatgactgaagacgatcaaagactccctggagcgagaaaacagttactgccagaagcagaatggaagagccaaaa

SEQ ID NO: 6491 - DNA, 6000 bp, Homo sapiens
ccaggtagccctgggccaggagaggtgaggaggaggggctgagcacctgggggagctagtgacacagacagaggagggcccataagcacaccacaaagctggagaaagacagcagttaaagaaaggcggcataaagtcagaaacaagtctgagatgcaacagtgtctcgctctgttacccaggctggagttcagcggcatgatcacggctcactgcagcctccatctgcagtgatggctcaagcaatcctcctgcctcagcttcctgagtggctgggaccacagacgcgtgccaccacgcccaggctgctcttgaacttctgggctcaagcaatcctcccgccttggcctcccaaagtgctgggattataggcgtgagccaccacacccagctagaattagtttcttcaaatgctaggcactgagtaacacagaatgcctaagacatgatcactgcccctaggaagctcagctgaatatccaagtatgcaagactgcctggatgcccagaaggcctaggaatgacatgaagaaacctaagcccacaagccggggtctgtgagagccaagagagaaggctttctgggcagggtgaccaaagctgcagcctggcaggcagggcagctctacaccagcctcagaggagcaggcagggcctactgtgctgcaggcatcttcacagagaagacgcaggaagggcttctgagggcagacgcagggaagggtgcggggctgattctcagtcaagggccatcttctctctgccctgctcatatgtgccactgatggtatccagagtgaagcagtgaacagtgtagggctgcggctggtggctgcagtgaggtcaaagacctcagtcctctgggaacctctctgatcctccagagacctcaggggcacaaataaagcaatccaacatacagagaagacagacatggaaaaagtatgtttgggtttttagagactgtattagtccattcttgcatcactatatacaaatacctgagattgggtaatttataaagaaaagaggtttaattggctcatggttctgcaggctgtacaggaagcctggtgttagcatctgctcagcttctggtgaagcctcagggagttttcgttcatggtggaaggcgaagggggagcaggcacttcacatggtgaaagcaggctcaaggtggggggaggtgccacatacttttaaataactaaatttcatgtgaactccaagcgagagctcacttatcaccaaggggatggcccaagccattcatgaggcatcttcctccgtgattcaaacacttcccagcaggcccacctcccatcggtgattacatttcaacatggatttgggtggggataaatatcctaactatatcagggaccatctcaaaaaagtgtcccagaggagcaggggttggaagaaaaggagttttgtgtgatgcgagcagtgccttcatgaacatggaatgtggggccatcctggaagaggtaaccctcagccacacacacacacacacacccacataatggctttatatcctatctcaatagcttgtcctgaatcccttcttttgggagcaggagctatatctatctttagcgttcctgtaaataccacagcacctaagacactgcatgaaacccagtgtgttctacgggtagtcggtaactaactgtccttaaagatggtcctccctaatgtgggcaaatgaagccagtccaatggccagtgacgtacacatgcagttgtacaggtaatggtgttgagtcagatttctctggttgctatggtttcaaggtcactggatgttaatcaggcagctttgcttgtaccctgtccctatgctttccctaaaactctaaactgacctgagaaacctctaacctgacatgcaactagtcctctatgctatatttccagttgccatcttggacacctctacctacattttgcggacacagcaacgtgtcccaaactggaatcttgttcccttgcaaacctgccctccacttgcatcccttcctcatcattcactgtgttgcccaaactacaagcatgagcattcgctttttatcctcgattctggctctctgtcgcgtcggcgatccttccccccgttgctgtggagatgcctccctggcacgcacctgaaccatagctggatgctgattgctctttctgcctcctgcttttacttccaccctcacctcctccacactcctgccaccgatgtcttctaaaatgcaaatgtgagtacatcactccccacttcagtatctgtcagtgaccctgaaatgcattcaaaaagaagtacaatatcttggcaaggtctaccagtcttaattcagcgtcgctgttccttcagtctcatctccggccataacaaaacgtcctgtgcagtgctctgtcatgcttccaagcctgacccccctcaccccagtcctgtagacttgtcacatgtcatgtccttctgattgctggttttttctatttccatgcaagcatgtgaactgcttgaggacaagggtagtgccttgttcaccatgaaatttctggcatcatgctttgcacatagtagttatccaacaaatgtgggtcgaatgaatgaattgtatgcaacaccggatcaggagatatgatacaaggatttgggtggcaaaggattgtctcagagatgcctctaagcctccctaagagttcatggccataaaccaatagtttcagagctactcctttttgatatggatatatcctggacttattaaattgacagcacatattttatttttaaaatgttattaagttaactaggggcatcgctctatcctcaaaattgttttggagacaccattaacccacttaaattattaataaaaaagccacttattccgcacaaatagttgagactgtcctgcttacctacagatattcgtctaagagccggcagacattcagatacccgcagacagaacttactttctggacctcccacaacattcctccctttagatcttttttttcttaccccgtctttcagctttctcattgcagaactgctgagaataatggaaaatgctttgcctggaaacttccaagaacaaaactccgggggctaagagaacgcgatgatttttaagctgccagttaagatgcagctccttcatcatcacaggtgaagcaccaatgcctctcgcacgtgaaatccgtacgctcctagagtcttactacctaatgcatttctgcaatctgggacgcctgtccttagcgtcttcaatagttttgggcacgaggtggaccgcggaagtattgtattgaaaagttaacgtttttcccttggacaccctctcctcacagctattaacaagctgagagaaatcaggtgactcccagtcatgcagaggtttcctcaccatttatgatcaagccaaattaaagaataaaaataaaatcctattggcgcagcggccaccaagtctttgaggcctcgcctcggtgggcggggccgacgccggaggagaggggctgcgcatgtgggcgtgacctcgcggaaggagctgcggagggcggggccgactggagaggggcggggctgtcgggtgggtgggacctcgcggcaaaagctgcggagggcgggaccaaccaggaaaggacgggactgtcgggtaggcgggaccttgcgggagaaactgcggagggcgggaccaaccagggaggggcgggctgtcggatgggcgggacctcgcgggaggagctgcggaaagctgagctggtgaggggaggggctggtcgaggggaggggctggtcgaggggaggggctggccgagggaaggggccggccgaggggaggggccggtcgaggggaggggccggtcaaggggagggcccggccaaggggaggggccggtcgaggggaggggccggtcgaggagaggggttggtcgaggggaagggctggccgaggggaggggctggccgagggaagaggaggggaggggacgggctggtcgaggggaggggaggggagggcaggggacgggctggtcgagagaaggggagggcaggggacggggtggtcgaggggaggggacggaggggaggggagtggagggagaggagggaaggggaggggagggaagggaggggaggcggggcccagcggtgtcccgcgaaactgccgctcgctcggttcccgggcctccccgtgcgcctcagtgcaaagcgtgccaggcactcttgactgcaacgagagccgcggcggtgagggggcaaggccaagaggccacggttcgcgtttcgccggctgcagaagttgttgccatacatttcaaatgtgcatttcctacgtctcacgctctgtcttgcgcctccacagcgggccacggccctgtcaccgcagtcgcagccacatgctccctcccctgagtcggctcagctctgctcagcggtcagccccgcgccaggaggccgcggcctgcctgaggccggctcgcagcgactcgggacggagggcgggggcgtgaacgggtcgcgcggagagggtggggggagcggggagcgttagggtacgtgggggcgcgtcgaccaatggcagggcgctgttgagtgcagcggggcggggccgggcgcgggggtggggcgagcggcgggcggggcggggcggccggccggggggtgggaggagaggggcggggcgggccggccgggggaggggcggagagacgccgccgctgccgccgccgccgccgccgccgccgccgtggctgccgcagcctctgggagtctggaaaaggggaagcgagagcaagcgaaagactcagtccccgggcggcggcggcggcggcggccgcgggggcgcgacggccggggcgggggcgctgctgctgcgggggcaggcggcggcaggggcggcggcggcggcggcggcccgctccagccatgccgaataaaaacaagaaggagaaagtgagtccgggcccggccgcgggacggagggagcagggagggactgccgggggagggcgcgacggcaccggggtcctgcgcccgggccccggctcagttccccgcctgacgccgcgggcttcgcgtccccgagggcggccgagccaggcatccccgggcttctctcggcctcatgcccggtgggggcggggagcccggggatcgcgccggagccgcggggcgcaggcccgggccgctgggaccttcgtgatgggccggggctgggcgtggagggagggcgcggcccggggagggggtcggaggggcgcccgtttccgacagcgcgccgtgggcttgggcgggcaggtgcggccgccgagggggttcgcagcctcgcaggctcccggaaaggagcttcagggatgggggctgtagacgcctggggagggacccctgtacgggggaaagggagcgagaagggaccccgctgagagctggtaaggaattctctgccgccccggagggacgctctggggctctcgaacactattattatcctgggtggcggcggcggtgagggctgcgagcaagggtgctgcgtttgcattcgggggggcgggtatgtttctgcttcaggtggagctctgtagcgtttcattatcaccccagaaatcctcactcatagggtttagggtgggagggtagaaagggatgtgatgtggatctcaaaatgccagaagcactgtataaaattggatttatctgttttctgcttgaagttttcaacctcaaatgcagataaaacgaaaagaatctgaatgggggttggggggcattgcactgttggaatcctaaacggtatgatatagaatttcctaatggtatgaattaaaaatatcagaagctgtagttgtataaatcacttttaaaactgcatttggcttatctgatgtttacctgtctaaaaagtgagaagactaattgactttgcttgatgtttaccaggaatcaccaaaagcagggaagagtggaaaaagttcaaaagaaggacaaga

SEQ ID NO: 6492 - DNA, 6000 bp, Homo sapiens
ccccgtgcgccggcggcgccgttgagttcccggcggacaaggtgcctgggagcgccggcggggtcggtgatgggcctggacccctgagaccgtgtggccccggtgggggttgctcccggctcggctgaggcagcttcttcctgcagatggtgtcagtcctggtgcaagaaggtcacgccgtctcagacatggtaaggccgggctgctactgccactgggctgggggttcacagagtctctgaagcgccttcagggactgctgtgccttgagggcggaccccaccggcatggaggcactgcaggactgggactttggcctctggagaatattctaggaggcagggagtgggggggaacctaggggagcttggtcccatggtcccagccaggctgtgtcctgggagggatgggaggcacccctgtccccacagcccttgtgatgcccagcagtgggtggtcttcccaggaagcgcctgctccatgcccttcccccaaagccttgccttgtcctggtgcctaaagctccatctttagaacactagggaaagtgtccccaacacccccccctctacccaccatccgggtccctggcctgttaggaagtggccgcccaggaagaggcgagcccactcctgcctggctctgcctcccttcagatcagatcagattctcctagggacccctattgtcactgcgccagcgaggggcctgggtgggtgtgcactccttaagtggctgacatctgagatgggacagcttaatcctgaaaccttccccactcccatcagtccatggaagaactgtcttccacaaaactggtccctggtgccaaaaaggttggggactgctgccctaggggacctttttctcaaactgcttcacacaacactccaagaacatgatgggaactgggaggaaagcgggttccatgagtaggtaagtttgggaaatgctgcagcctgcactttcctggagcttcatcacgtattaaaggctctgataaggccccagagaaagaagctaatttccttgtttaaggtggagttccgcaagctacaggccaaatgcagcccctacgggtggagcaaggaacggtttttacactttgtaatcgttggggaaaaaaagaacaatcttttgtggcacttgaaaaatatatgacattcacacctcagcgacagtaaatacagcttcactggcacacagcctgcccgcttggttgagtatcctcggtggccactgtcccattgcatcggcagcccaccagcttccagggtgactgtggggcctgcaggccaagcctctgggcaaaagcttccttccagccccttcacagccactcctgggctgcgtcctcatcctgtcacctgcacacctgccagctcagtcactcctgagtgagggtcactggtgagctgggtcggggtgtcggctccagatgtggggtccaggcctggggcccccgcgtgtgcgggtggggaggatggctcaatgggcttggcctggcccattcctgccccatgcggggtcagggaccctgggcctcatttccaccccagggccgcttggttccttccttcaggttttccaaagctgccttaacccaaaagctgccacacactggggagggcacccacagcaagatggcgacgctcccacccgggaaacaggaggagggcagggagagggaggcggttgccccttgtggcccggcccccagaacccacgcataaccttggcaaccaggcagcccgagtgaggggggcactgggagctgatgggggacctgtgggcagaggagtcaggctgggctgggggttccagggcatggatttccccctactcccctcccctgccggcctccttactttcatgatctcctttggaagcacttgggctctgaaaggaggcaatactccattcattcatctattcaataattcattcattgatcatccattggccggtgggaacagcgcaggggcaggggacagtggccccagggtcccagcctgcagaggccgaattcacccagagccgcccaagcacccccatcccctgcccgcgtcggctatgttgccctccacacccctggctcccagcttcatccatctgcctagatgaggcccgagtaacaggccgtgcacatcagtgccttactttgtaattctgtggttgggagcgtccctccctgcgattttccttttccttgcccttcctcccatttctaccttttgcctgctttcttgttgggggagtctcctgtctttcacccatccccctgccttggctggaggctttgcaagtctgctcactgtggacttgcctgcagtgtcctgtgctgaacagaaaccttcattttaatcgacctaatgcaaaacgccttaccttagaactgtgttttttctgtttcgtttgagaatcgcgtctgctcctcagtcacaatggtaatggactgtgtacctatggggcacgtgcaccagcgagggctcctgctgtgtttctctccttagagtgaacccagcttccagcatcctccgccttgcccttttgttctagcactgctggaatccgtcgtgtgcctgggtgttgtgggtctctctgagccttgtcttcaagtccacaggccgctttgccgaccctacactatccacacagtggctctgcaggatggcttaatatccatccccttcactcctgctccaaggttctttgtggatctcattgttgcagataaattgtagaataggtttgccaggtaacaactaccaccaccaccaccaaaaaaaccctggattttttttttttttttttttgagatggagtcttgctctgccacccaggctggagtgcagtggtgtgatctcggctcagtgcaacctctgcctcccgggctcaagcgattctcctgcctgagcctcccaagtagctgagactacaggaattttgattgggataaataacagccttatgctgtcaagccatccattcaagagcatggacggactctctctaaatatttcaggtcatccatggcctctttagcatcttaaagttttccctgtagaggtcttatattgtattggttaattcatcaatactttgttaagtttgtttttttgagacagggtctcactctgttgcccaggctggagtgcaatggcgtgatcacggctcactgcagccttgacctccctgggcgcaaacaatcctcccacctcagcctcccgagtagctgggactacaggcttgtgccaccacgcccggctaatttttgtagtttttgtagagatgggggtctcactatgttggccaggctggtcttgaactcctgggctcgagtgatatgcccgcttcggccttccaaagtgttgggattacaggcatgagccaccgctcctggccttaagtttggtttctattataaatgttgccctatatttaaaaattatatcctctttttatttttaaattttttgtagagatggagtctcactatgtttctcaccaggctgatctcaaactcctggccttacctactgtgctcgtctgttcaactattatgttacgtttctatttttccccttcgttctttaaaaaacggtgttcttggtatgcttcctcctgggaacccctccctgttcctgaggcgctttgagctatgacacattccgtccccacggctccacctctgcacctgtggggggacttgccctgctggcagtgccacaccctcaggtgtgcacggaactgaagtgtgacctcacgtcgctgggggtgttggcctcttgctcaggtgcagtgctcctggaagggccgaagagtgggtcctgcctcgggtgggcgcgccctgctgtgctgagcccctcacaacctggcagcaagggttgccctggcccagcgctcaccctcagcccctgagggagaagtgcagaagcaagaaggcaggaggctgaggtcctggcacttggaggagagggggagtgaggggcggccagtcagaccccccgtatttctgctgacacccgagacttgggctgtggccccacttctgtggtgcgggagctgcacggcccagcccaagcctataggaaacagcaggggcaactccacctccccgctacactccctgcctcctcctgcacccctggccgccagatgcagcctctccctccctccctcacacaccaagagcgcggcctcagactccccaggagccgggcaactttcgaaactttagttcctggaacctgggagccctgggcctgtgcacgttctcaaggggctacggggggaggcgacaggccctggccagagtcacctccgccccagactccccacggctccgtctcgctccccggctccggctctgcccctggcctgtgagacctccagctcagggacaggacactgggctgtgcccgcttcggggccttgcccacgcggccccatctttcccaggccagatccgcttcctctgccagcctcagccaggccgaggaccccgggcctgagctcgcccgggctccttccgtgcacagggtctcggcttctcgtcccaggggactgggggcggggtgggcgcggagcaggcccggacccccgcgtggcgccgcctcagcccgtgtctcttgcagctcctgccgctggatggggaactcgtcctggcttcaggagccggattcggcgtctcagacgtgggctcgcacctggactgtggcgcgggtgaggcggtcgggcaggggcggggctctggaaaggcatgttcaggggcggggactggagggaaggcgcgtcgaggggggcgaggaccggagggagggcgcctccgggggcgtggtttagggagtggcggaagtgtcccgaagcggggcttgggaggtcgtgctcagacgcgtggcgtggcgtggcgtggcgtggtgtggcgcggcgcttgttccgtggagctcagggatgtgctccggctcaggcgaacctgccgtcttccgcgactctgaccgcttctcctggcatgacccgcacctgtggcgctctggggacgaggcacctggcctcttcttcgtggacgccgagcgcgtgccctgccgccacgacgacgtcttctttccgcctagtgcctccttccgcgtggggctcggccctggcgctagccccgtgcgtgtccgcagcatctcggctctgggccgggtgagcactgaggggagggaggctcgggtcccctctccccacctcggcccgaccccgcccctcctggtctgcacacgttgggtctgagcactcaggtgaagtctcttcctcgggctggctccggtggggacccggctgcccgcagacgttcacgcgcgacgaggacctggctgttttcctggcgtcccgcgcgggccgcctacgcttccacgggccgggcgcgctgagcgtgggccccgaggactgcgcggacccgtcgggctgcgtctgcggcaacgcggaggtgagcgaggccgcagtggagtcgcgggggccgcgcgagggtcgggactgtgcccgggacagggccgctgcgctcccacggtctctcgccggcttgcttctcggaggcatcgcccttctcgctgcggtccgctctggccctccgcgctgaccaccgcccctcgcaccaggcgcagccgtggatctgcgcggccctgctccagcccctgggcggccgctgcccccaggccgcctgccacagcgccctccggccccaggggcagtgctgtgacctctgtggtaagcgcccccgccgggccctgcttgctgggaaggcctggaggaccaggttcgtcccccgcctcagtttcctgccgggcccggatccacggcgctgacccctgccctcccgccgcaggagccgttgtgttgctgacccacggccccgcatttgacctggagcggtaccgggcgcggatactggacaccttcctgggtctggtaatggggccgcgcgggcagctgaggggagtcccgaccccagccctaccg

SEQ ID NO: 6493 - DNA, 6000 bp, Homo sapiens
attgcatgtgatgaagatatgtaataatttttttcttttttttttttggactggagtgctcactgcaacctccgcctcccgggttcaagcgattctcctgcctcagcctcccaagtagctgggattacaggcgcccgccaccacgcctgctaatttttgtaaatttagtagagacggggtttcactatgttggccagactggtctcgaactcctgaccttgtgatctgcccgactcggcctcccaaagtgctgggattacaggcgtgagccaccgtgcccggctgatgtgtaataatttctaattttaaatataaagaggcttacacaatttgtattccaggaaaattgatatttcccccacctctgctaagtaaacgttcgacggatgtttaaataaaactggttcgaagggatgccaactcattagtctgcccagggtgccatggcccagttggctcttacctggcgacatatatcgatatcacctgaaccaattagagatctcagctgtgagtgagcttgcttggtgtttaaatgtgtgcttggctgtccccctataagtggtcttccttggcttgcattacctccccttggcttgctttaggggctgaaatggcactgacactcttgagatgggactgcagagtttccttcccctaaccatgggatcgtatcccctctgcagaactaaggatagtacatgagtgggagatgagtaggaaatgggatgagtggagttgcaagaggcatcagaggtcactgtcaatggaggggaaagcttaagtgctcagtaaatgtagggcaacaaggaaggggggggtgaggctgaggtagggaggagaaggagctgagactcaggtatttggtgccagtgtagtagagaaggtgcctggaggcgggcaggcactgaggtcctctgggtctgaccaggcagtcccagctccagcccgtcccctggcccctccccgctgccggccagagtcacacatgtgttttcctgttttccatttcagtccccgttaccctctgctttttctgctcctcagagtcaacagctgttgcagcatgagcgatacgcttggttctcctaactagcaccttcccctctcccctgactcagctggtagcccctcctccccgcacctgcccaaaggtcactggacaggtaagaggtgggagaggagggacaatgggcgagaggggaagtgcaggaggaggatggagtcctaaaaattggctgaatggagacccaagagcctcctgtttcttgatcccagccctgtccctccctgggctgaaccttctgcccagagacttcagcccttccttaatggaagccctggccacaggagtaaacaatttcttttttgtttcactttttttttttttttttaaagagactgtcttagccacagtggaatatagaaaaacaaacagagaactggggagggaggagctgagcttctagcttggagtgatggggaaatctagtcataccagagtgtatctgttttctgtttctgttgttaggggaggcagcacagactgattggagccaggaaggcaggacatggggtctctgggagagaaagtgtgttcttatagtagttccctgagcttggctgaggagccaagaccccgaattatgtactagttcctggagaaattgtgttttggtgttgtcattcgagggtgaggttagggtgaggggctccattggctgtcctgcccagcactgcatactggaggccctgctgccagtttctgaatcaaatttcttccacaagctgtaggatgagtgtgttgtcctgtaatcttcactgggtgttcagagatgaatgcatctcagacagggaaaggcaacaagggctgctgttatcttatggggtttctcatgtaaaacctggggtgggtcaggcacggtggctcacacctttaatcccagcactttgggaggctgaggtgggaggatcacgaggtcaggagttcgagaccagcctggacaacatggtgaaaccccatctctactaaaaatacaaaaattagctgggcgcggtggcgggcacctgtaatcccagctacttgggaggctgaggcaggagaacccgggaggcagaggttgcagtgagcagagattgtgccactgcactccagcctgggggacaaagcaaaactccatctcgggtaaaaaaaacccaaaaaccaaaaaaaaaaaaaaaccaaaaacctggggtagaagagcccctttgggagagcctaggggtgttgctggtcccaggctgcctgaatggtggggctgcctgaatggtggaagcattaccctaagacccagggtctcagggagaaatgtgagctgccaaagatggtgccttcttgtccagggtgctaggtagtggttgagaaaagagggggtcttcatgttctcaatgcatggcagcctcccttgcctagtgcgcacgggcagactgaagtaggttagagtccactagcacttcctggtgctaccactagggcgtgctgtttgctggagtgtgggttttacccccagcagatttctgtctcaaaattccacggataggacttcacttttcagatgctaccagtcaggaatgaaaccctgtacacttctctctccattccccctcacagttttcccttcctttgtccctccttccttcctttcttttacgtcatattaggacacatgcccaccccttggtgccagtgaatttggtcttaaaagggcaggcgtgatgatgtgtttgtgtttttttttttgtttgctttagaagtgggcaccctagcaatagcagcactgccaagaggacttgtaatcacctcttatccctgcaaagaatgagaaaggggaggggcagccaggaaggagattaacaaactttgttggagcctttcgtctaggctatagactgaaggatgacagaggctttctttctttttaatctagtctgcttacatcttcccccaggtaattcatgtagataattcctgtccaaaagcaaggtctaaggtggcatcggtggctcacgcctgtaatcccatcactttgggaggcagaagcaggtggatcagttgaggccaggagttcaagaccggcctggccaacatggcaaaacctcgtctctactagaaatacaaaaattaggctgggcacaatggctcatgcctgtaatcctagcactttgggaggccgaggtgggcggattgcctgagtttaggagtttaagaccatcctggtcaatgtggtgaaaccccgactctactaaaaacaaaaaagattagctgggcgtggtggtgtgcacctgtaatcccagctactcgggaggctgaggcaggagaattgcttgaacccagtaggtggaggttgcagtgagccgagattgcaccactgcactccagcctgggcgacagagtaagtgtctgtctcaaaataaataaaataaaataaaataaaataaaataaaaataccgaaataaaaacacaaaaattagccaggtgtaatcctagttactcaggaggctgatgcatgagaattgcttgaaccaggaggtggtggaggttgcagtgagtcaagatcgtgccactgcactccagcctgggggacagagtgagactctgtctcaaaaaaagaaaataaataaaaaaaaaaaaaaataaaaggaaggcctagagactaaggcaggccagggggatggggagatggagagatagtatacttgtgtgattaagagtatatgagctctggaggttccatgagataatgtgcttaagtccttagcagtgtgtctggcccagtaagtgctcaataagtgatagcaattattattacaggagcattttggagaaaaggagagtctcctccagaaggatttcagatcattgtgagcctgtcttgggagaagcatgatctctgggaacgctcacaccagaatcctcctcctagattaaattaaaagtttaaagagctagaatgggaggatgtatggtagagatgtctcccagagatatttagatctctattctctggttgtagaataaccaaagagggttagaacagataggagaagaaacagacagttggatttcagaatggatagggtctatttctgttggtaaaagagactcagaataccagatttaaagtaaataataaagatagcataaactatgtgatttccaaaaagtgctcagcttcctctgcctgttctgggcctgtctgtccaacagaattcagtgaaatctgatttcctcatattcttttttaattttttttttttgagatggagtcttgctgtgttgcccaggctggagtgcagtggcctaatgtgggttcactgcaagctccgcctcccgggttcatgccattctcctcattctcctgcctcagcctcccgaatagctgggactacaggtgcccgccaccacgcccggctaatttttatttttttgtgtttttagtagagacggggtttcaccgtgttagccaggatggtcttgatctcctgaccttgtgatccgcctgcctcagcctcccaaagtgctgggattacaggcgtgagccaccgcgtctggcctgatttcctcatattttttaggaaagtggagtcaacttatatttgaggaaggcgtttataggaatttatgcttatcccagagatcttggtatgttttgtcaagaatgaaaaggcacgtgggtctggtggggatgcagtcagatatttgatctcttgactgtgtttcttttgaagtagtctgaggctcagactttggggcagtggcccaggcttggaggcaaccccccagtctctctttgcatggggaagtgtgcagagttctcttagaacacccagtcacatggtgtagagactgctcttacacttcctgtaatctcagcatgggaacaagcctttgtgtcacactgtgcaaccttcctccctttcttaaatgcttggggtgagagagaagagaggctagggtggggcatggaggacacagagagagagagtgctgtgtattccttccccgctactgtcctgtcctcagctaacttgctctgggacagcttccccagggctacagatactgcactcagctgactgtcctttcttctgggcccctggtcccagagcagagctgacaaaggagattcctgagagagcaccttcttatcacagaaagtgctgagccaagagctcctagctgccccttttgcagatgtgaagggccagtgaaccttggacccagatggttgcttaatactcctttccccctccctcactccttcctttgcgggctgcctcacctcctccacccttcttgcttaaatccataggcatttgtctggccttcccttttactgctggctgggaaggaggagcatcagaccacagatcctggaaggcacttctctccctgactgctgctcacactgccgtgagaacctgcttatatccaggaccaaggagtgagtgtgcgttccaccctcttctcatctccacttaccttgctaaccctcctctttgctgctgtgcagtgtctaatcgcttcttctcccgagtgcctctcaccctaacatctctccattgcttgactagcctctcccattttcctctcagctgtctcctgttcggtgttttccagcatgtgctgcctggctgcagctgtctccctgccttggctcggggtgatatctctccagcagcaactctggggtagggagtggccatcagctgcctccaatcatccctaggttttatggtacattggatcgcccttctctcattcatacttttttgggtgattcaacgatgctgatgtgagggatcgatagcaggaggcttagaataccagagaatgggaaaggaaaagcaaggaaaagataatagcctgtcttctttcagggtgaagtgggtctacttgggctttgccagggctgaagactccagctaagggttaagggatgctctttgggcaggaggat

SEQ ID NO: 6494 - DNA, 6000 bp, Homo sapiens
gggagacacaggaggagttcttggtggtgatccaggccaaggacatgggcggccacatgggggggctgtcaggcagcactacggtgactgtcacgctcagcgatgtcaacgacaacccccccaagttcccacagagtaaggggccattgctgccacctgagccatcctttgatcaccccacccctacagtgtctggagaaaccttccctcctcgcctcctccccagccagatcctgggagaataaagtgctgtggggagggaggagggctggggacctctctgagaaggtgtctcccctctgtcatcccaaggcctataccagttctccgtggtggagacagctggacctggcacactggtgggccggctccgggcccaggacccagacctgggggacaacgccctgatggcatacagcatcctggatggggaggggtctgaggccttcagcatcagcacagacttgcagggtcgagacgggctcctcactgtccgcaaggttagcctcctgcctgttaatgctttctcttagacctgcctcctgccgacccacagggcacatatttaactgttcttctagaacagactcaggatctctctgttggagcttagagatcatggtcacctcctcatccttcagatgaggccctggagcttagaaagaagaagtgatagcaagtctatgagggagctaggggcagacctagagttcctaagtaatctgctgtgcatcctgaccaccaaggccactgtccctccagtgccacctctcctcacatgaggactgagcactgcatgcatgtgaggaggggacttgtcaccttccaagagcctgggacctgccctggtttccacatgcctcactttttctccctctcccctcaccatagcccctagactttgagagccagcgctcctactccttccgtgtcgaggccaccaacacgctcattgacccagcctatctgcggcgagggcccttcaaggatgtggcctctgtgcgtgtggcagtgcaagatgccccagagccacctgccttcacccaggctgcctaccacctgacagtgcctgagaacaaggccccggggaccctggtaggccagatctccgcggctgacctggactcccctgccagcccaatcaggtaggtgagctgggatgtgggctggggagccagatggcaggctcttcccacccagagaatgagtaaatgtgccccctaccttatagcaaatcactcatatcccagcaaaagcctccctccctgcagctgggcttgctggtctgcaggcctgggtgccaggggagagccggagggcctggctgaccactcctcaaccgtctgtccacccctctgggtagatgatggtggcccctcccagtggcagtgcaagtggatatagtctcatttgataagtggatctctattgatcattcccaaagtgcttcacagtttacccccttgctgacactgaattctcacaacagccctatgaagtaggtgttctcatcaccacttgttttagaagccagccataagtggtcacacagttggtaagtggcagaacagccactctttccccctccccggccagcatccctgtcacagctctgtgagggaggtactggtgtcattcccacttttcagttgagtaaatagaggttaaacaatttgccctaagtcacatagccagcccaaggcagagcagggctgaaacacatgtccctgggttctcagaacagggcccagaagtctgagagtcaaggtctgtttatcccgcttctactccattctgtgtcttctccccctccccccgtgaaacccagtggccctgagtcttaacaggtgtttaatggtggtgatcccccagggatatatgccttttaaggggactccaacctgaattatggctctacccagaggagtcatgaggtctgacaaggtgaacagagggaagaaagaagagagggggtggaacaagctgtggtcccgccccagatcagccccagcatgtctctcccttccccagatactccatcctcccccactcagatccggagcgttgcttctctatccagcccgaggaaggcaccatccatacagcagcacccctggatcgcgaggctcgcgcctggcacaacctcactgtgctggctacagagctcggtgaggactccagggcccacaaggcggcagcagcctcctggccgaggagctgtccctgggtgtgggggtggagaagggtgctaactgccatcgcaccctcaccagcgtgcggccactgagtcctagcctggatctgagtcctagcctggatccaagtcctagcctggatctgggtcctagcctggatccttgctaccaggcagggcgggcctcctggtctcctagtcccctaggctgggctgggtgggcacagtgggtgtgcctgagcattctcctgaccctcaagtcattcccttacctgacttgccccaacccagaaataaactagaccttacatagcccccaacctgtgtactgacagaccccatcctgcccactctctgcttcaggctggagctgggggccagaaaggggctgggtacctcttctggttgctgagtggagtgcaccagcagccccaccccagagaagccctgttggaagcgctgtgggaatcccccaaggtaggggagtggacaccataaggaaggggaggagtgccagctccatatgcggtctcccccatcagtcaggccagcagcgggttcagctgcctctgggcagccctagcccatacagacagggagacctccctcccgatcttctgtgaatagtcccttatacccctgcttatgcctcaggggctcctccacccttttgtcttcatactgcatatgaaaactgcccttgtatatgtggatatctgaatgtgtcagtgaaggcctatatgaatgtgcacatgtgggtatgttctcagccatgtgtataattccaaatgtggggaaagtatgtagatatacacaaatatatatttgtgggtatatatctgtaatggatatatatgtgtttactgttgagtgtacagaattatatttatgttaattatgcatatgtgtgattgatatatacagtggtatgcacatgtagctgtttgtatgtgttttgtgtatgtgggtatttgtggacagataatttattacttattgtttatcaggcactattcatcttcaaaatggattcattcatttaatcatcaccacaactttatgagggaagtatgattatttcctcatttttaaacaataaactcaggcaaagagaagttaagtaacttcccaaggtcacatagagattaagtggtggagctgtgagatccagtcagtgtgcagagtctgagctgttatccccaccgtactgcctctcaaatgtgtttaatgctatgtgtctaggtttatgtttctatacatgcaactgtgtgcatagtagatatgcacagatactacctggcagtgcacgtgttatctgttagtgcatggatgtctgtgtggatggccgtgtgtgtccgtgtacacacagtatgtttttggctgcttatatatacatagctttgtgtgtgtgtgcgtttctagtcactgtcttctcattctcctgccaaatcctgctcctacccgcacccagacatcacctagcagtgctgggcccttaccgcagggaagaagtagacctcctccccatcctgtctctggggtatcccaatccttttagccaggcgatccactcagcctcccctgcccatgctgcatcctcagcccctttccccaaggctagtcagctatccctctgcctaggggaaagactaaaggaattgggagacctggcctaagagaggtgacagggagacacactttgcattctctcttggaaggcactggcagtgagaagcaaggtagggtagtggtagggagtcacctgatgaagggatgggtaaagatggggcctgtgtctggctgtggtacccaggctggcctgggctctgcaccctgtagatcatgcagcacctttctacccaagataagtgatgctcactgctgtactacagcctcccagacctctgatgggatgtgtgtgtgtgtgtgtgtgtgtgtgtgtgtgtgtgtgtggtgtgtatatgtgtctgtccaccccactggtgctgtgcatggcctctatgcatgaaaatgcattctatgggcactgggtgttgtcgggggatgtggcaccacattcactatgcatatcaaacatttgcttcatgtacattgcatttgttttaaatgttgagtgtacattggatatatggtatgaatgtgttttgtatattcatggctgttgtctgcatgcaactcgtatgcaccttccctctgtctttcatttatgctgcatgtgccctgcatgtgggttattgtatatgtgtatcatgggtgcggcattcctgttgaatgtctattgtgtatcgcacatatcttgggtactacatgaatattgtatgcacttggtattgttccattcattctgcaacattgttttctacctgtacattacatgcatatttcatgtgtttcttgtgcatgctatatgcttcatgtggcatccatgcccatgcaccacatatgttacgtgtaaactgtgtggtgtgtgtgtggcgtgtatgttttggtgttctgccttcagacagttctgcacaggcctcgcgcgtgcaagtggccatccagaccctggatgagaatgacaatgctccccagctggctgagccctacgatacttttgtgtgtgactctgcagctcctggccaggtgagcaactgaggcagaggggttgggacgtccaggcctccagcagcccactccatacaaggcctctctcttcttcctcccagctgattcaggtcatccgggccctggacagagatgaagttggcaacagtagccatgtctcctttcaaggtcctctgggccctgatgccaactttactgtccaggacaaccgaggtaggtggcctcctacagccatgtccatacctgcctctgtccccttctcctcctcctccacccctagcccagcctgcctgacccctgccccacctgcctcggccttctacccaacagaagatgggtgtggacttgtactcattcgttggctctttgtaaaccttccccatgggaagctggctctatgggctggacctatgggctggctctatgggaagctggctctatgggctggacctatgggctggctctatggggggctggctctatgggaagctggctctatgggctggaccaaccctacctggaaggtgtcccagaagatacctcaacaccttccctctcccacagatggctccgccagcctgctgctgccctcccgccctgctccaccccgccatgccccctacttggttcccatagaactgtgggactgggggcagccggcgctgagcagcactgccacagtgactgttagtgtgtgccgctgccagcctgacggctctgtggcatcctgctggcctgaggctcacctctcagctgctgggctcagcaccggcgccctgcttgccatcatcacctgtgtgggtgccctgcttggtgagtcaggccacagtggtacatagctgtgcgatctgggcctgcaggggtgtggagaagaaccaggcctctggacacagggaaatccaccttagggcttgaacgaccctcatacctggattttcccaccacctgatgcatccaagagaaaagctctggcctctatccgtgacctgccaatccataatgacaatgacaagccataacaatggtttactgagcccctactctgtgccaagtatagtgctgggcacgtcacttgtgatatttcattttattatgtcaacaacccttagaagtaaatatattttccctattctccacataagtaatctaaggggcaaattgaggcttcagagaagtctagcaacttcccatggtcacat

SEQ ID NO: 6495 - DNA, 6000 bp, Homo sapiens
tttccttctgctttaaactaaagcacatagatatggggcacatagttacgagaagaaggatggagtgagcgcatggactgtgagttgactccagggagagatttgggtcctttgttggtaacctcagacttcccagctctgttacaaaaagcaagaataaagtgctgtctattggatctagaaaaaaaaatcaggaatggagtgcatgagctttgtgctctattcctttgcattagcagacacgtctaacttgtctctgaaagggaatattaacccgggtgtggtggcgcacatctgtagtcccagctactcgggaggctgaggcgggaggatcacttgagcccaggagtttgaggctgctgtgagctgtgattgtgccactacactccagcctgggtgacagagtgagaccttgtctctaaaaaaggggggagtaggggaatattagaacatgactgcgtgggggttgtgtgtgtttgtgttttaactatcacaagcagcatgtcccaagccataaccttttctgtccagtaggtgtcagctacgcacagcctttctctttctaaatccatatttgtaagaaaacggcctttcatccataattttccctagttaaagggatcaatttcttctgatctgaagcacgcaaaacagctgaaacagtggctccgatattggaaacagaattgtactacgtacttgggatatggccacactgaggactgtgcgaagggggtgacaaatgttgggggggcccaggtgaagtcctgtgggtctcactgagcagataagtgttaggatcaaggtgagtctctaaaaggcacagttaagacaccaaagcaaaaacacagagtttccctcaggtgaaagaaattgaggctttgaccagtagctatagcatcctgaaaaagtgctcagtgtaaactatcaatctcccatttgccctcaaatagactgtcttgttttttacctcaggtaaaatatttctttaagcctcaggtttctaatttttaaaatctttaagataactgcctcgtctgcccaagatactacatgaggaggaaaaaaattgagatattgttcagaaaaccatttgtgggctataaagcactatttaaacgtagagaatagaataaaaatataaaggcaaatgcagaatagagtaatcccagcactttgggaggccgaggcgggtggatcacaaggttaggagttcaagacgagcctaaccaacagggtgaaaccccgtctctactaaaaacacaaaaattagccaggcatggtggcaggtgcctgtaatcccagctacttaggaggctgaggcaggagaatcacttgaacctaggagccagaggttgcagtgagccgagagccgagatcgcaccactgcagtccggccagagcagcagagcgagactccttctcaaaaaaaaaaaaaatgctcaaaatttaataaacattagtttgtaattttttacagatttttgtcaacatattacaccaaggcttttctttctctcttgtgttcaatgttagtcacctggaattttgacacacttaagagtttatgtcacaaaaagattccaacctacagagaggcacttaatataaataatgctccctttgaaagtggggagattcctttcctagctttgtttgtttgtttgttttggtttggtttttttaaagacagggtctcactttgccacccaggctggagtgcagtggtgcgatcttggctcattgcagcctcaacctccatggctcacacgatcctcccacctcagcctcctgagtagctgggattacaggcgtgagccaccacacccagctaatttttgtattttttgtagagatggggtttcaccacattgcccagtctggtcttgaactcctgagttcaagcactccacctgcttcggcctcccaaagtgctggaattacaggcatgagccaccgtgcccagcccctttcctagatattacatcgcaccagtaatcaatggtaataagccacttataaattccaagtgctaaagaaatagaaatactaatcttcagcaactcttcctttccaacgtgtgcacctagtaccgctgtattccaagaacgtatttgatcccataacccccttagcttcttagttcataatttgagagggctaaagcttaccatatcgttatcagtttgcactggttttagcaagagacctcaaattcatcacattcatgttttatcccacattaagtctgcatcatataaattagaactaccaaatattactgaaagaactcacgtttaagaagcagaaacattatttgttttatatggtgatgttgaaatcggagcagaagtcttcaaatctgaatgtatacaaatgaatctatcaaatttttcctcagtgctttctaaggttgtcaggaaaggctagaggcaaattcgacattttttcatttcccatgactcattccctcccatggagtttcgtgctatatattccctgccttgtctggttttttttgttgttgtttgttgttttttttttgctgagtctttcaatttgctgtgtcttgaactagcaaaaggaggagaggaagttcctcccaacctttgaaacctcttaatacttgctgagtgatcaagggggcagatgactgctgattggactttaccccatttgaaaaagcttttgctatgatagctcaacaaacctcattttaaggaattaagtatttattttccttaaaacccaaaatcttttggaacattttccagaaagtgaggccaaatttttgtagttaggggtcagtttgggggaacttaattttttaggcccactttaaaattaaataattttgcataatatatttaataaggctaaaaataactttattttagacttatagtgttgtccactatattgcttcatgctgttttttcgaaataatttacaattataaatagacattgttgctctcaccttaaggcagcagtttctgagtgaaattcttcaagaaagtggaggcatcatttcgatatggtaataagctagttattctaacatcaacaagtatgtttcatgatcagcgatatactgataattccccatgtgtgcttttcaaatagtttataaatgcaaaaatattagaagttgcaggatcagggtttgagtcattttttttcatgtttcagccagtcctaaataagagctgtgaacaacaaggctacctggtgattttgttttttatctttttgtatgtgcatgtggtttttctggctttttgttttgttttgtttttgagacagggtcttgctctacctcccaggctggagtgcagtggcgtcatcatagctcactgcagccttgacctcctgagctcaagcaatcctccagcctcagcctcctgagtagctaagactacaggcctgcaccactgcacccggctaattttaaaatttttagtagacggggtctcgctctgttgcacaggctggtctcagactcctgggctcacgtgatcctcccctgtcagcctcccaaagcgctgggattacaggcgtgagccaccgcgcctggcgattttgtttcctctgtactcttcgtagctcacaattacgctaaaagaacctttttcccattgttaattccttccatttccctcccccacccgtcgattccccctatttttaggaaactcgaagatgatgtcctttcaacgttctctcctgtattctcaaatacaggatccagtcctaaatattttttaatacattggctagtttatttctgatggcattaaaagtatcggcacaactgttccctgatttataaagctcacagatgctgtatgacctgtaacattatactagctaatgagctctcccggaacagttgacgtggaaggagtttacttccacttggttgcaaggagaaagatggagaaagcgagagacgattgcaaaaagaaataacttagtccattttctcagtgctgtttgggggctttgtgctaatacttaaattgcagaggagggaggagacgggactgaggatggaggggagcagaggaggcaggggcggagcctcggcgggcgaataaaacccctcgctaaagagaagcacgttagtgtgtggagaagccactctcccgaaaccagagggatggggccggctgtgcagtagaacggggatcgaaaagaggaaaacaagggcacgaagaccagcgagaaagaagaggacacctgggaaaggcggaagcagaagacggggaagggaaaagaaacccaaagcaggtggaaaccagatctagagcaacaccgtcaggttcacagtttgtttttctagaagagaagaaagtacctgaggattgctcttttttcctaccgttaatgaaaactacttttgtcttcatcataaaagaaaaaactaaggggaggtaaaggcagtctcctgttttattagggggagaggtgaagggaaatccaggctcactttctgaataagccactgcctggtgcacagagcagaaccatcctggtttctgaagacacatccctttcagcagaattccagccggagtcgctggcacagttctatttttatatttaaatgtatgtctcccctggcctttttttttttttttttttttagcaacacttttcttgtttgtaaacgcgagtgaccagaaagtgtgaatgcggagtaggaatatttttcgtgttctcttttatctgcttgccttttttagagagtagcagtggttcctatttcggaaaaggacgttctaattcaaagctctctcccaatatatttacacgaatacgcatttagaaagggaggcagcttttgaggttgcaatcctactgagaaggatggaagaaggagccaggcaccgaaacaacaccgaaaagaaacacccaggtgggggcgagtcggacgccagccccgaggctggttccggagggggcggagtagccctgaagaaagagatcggattggtcagtgcctgtggtatcatcgtaggtgagttccattccttcccgcggacccctcctctcccctctggtggtcctcctgtgagatcttaacccttcgaaagcattattgttcttcctattccttagaaaaggattgtcagtcacctgagctgtaactcacctccactggtcaagtttgagaggcataggaaatacatcatacatctcttcctccaaaccaggcaaagattctgcccagtgttcatagaatggagcaaatcgtggtcagaaacccggctgatgattagcattgcctgggaactccttaaaaatacaggtcctggtctcgacacttggaggttctagttcaataggtttaaggagggactgagggacctgaacaagtttgtatgcagctattattcccaggctggggatgggcttttaaggtatatttggtagctattttgcagttttatgttaaatgaaactatgggataggtattaaaaatagcaagagcaatgccctgcctttttattttagcgttttccaccttatgcagcacttttactgtgtgaagtagctgtgacagggctgttattcccatttcacagatggggaagttatggaagaaaagaggggacagattgtgcctctcggtaagtggagagtttgcagtttctccagttgcctggtggggtccacctgtttcttaacagccacggaggacccggtgaagctctcagagggaatcaggagtaactagaatgtgtagaatatggagttgaggaggaactgatgggtaaaatatgtgtcctagctgggaggtgctgaaggtggggaacctgggtggccccaagagtgccagtgcaggccactcaaaccccctgaatgtactttgcagggcaggagtcccaaatacagcttcgtctctagacagcacatcctctttccagagaagccttggagatggatggcaggcaatagctcactattcctgccctcacttcagagtgagagatt

SEQ ID NO: 6496 - DNA, 6000 bp, Homo sapiens
cagacatgggtgtgcaccttaataaaccctgctgtctgcctccctgactctgcttcttgggagcatggtgagcagccctggtgctcagcagccatacctatgggacacacactacgaaaaggatgcctttagggtttgggggagattttactcctttcttcaacaactattcactggacaagttctctgctcccatgacgcgccaggcacagttctgcaagtatattgtgaatgtattgttctagtgggatacacaaataagtcagttaaaatacataaataaaaacataaacctgccatagattcgacatttgctggtgatggacgtcggcaggatgatttgaagaaactaactagatgaggggagagggcagtgaaggagactttagacaggatggttgggaggtgagatctgaactgaaacccagaggaggagagtctgaggactagtgttcccagaaggcagatgccgatgactgacctgagggccttcctccaagacttcattgtcatatgatgtcattagagaggtgtcaatgtggagagaagctgaccacataagggccttgaaatgtgccatcctggagaggccaccccaactaaaggcccagcctcagctttgcaccacaggatagccctggccaactggagactgctgctggccagtctaggcaccctcttccttaggtgacaccaagagggtataggccttttcacttggcttcccaggtagatcatctcaggatgacctgctcatcatccttctggacaaaccattttctggaggatccgcggttgcagatgaatgcaatgtgttgaaaggtcagtcttcaggactttggtgaaattgataagaccgtggcttagatagatcacgctagccatttaccacaagggaaaacatccaagctacaaatcaattgcttcagttctgctttcccaagatattaccatggcatgatgactggattgggggcataatcatagtctgttggcacccctgcacatttgcctcctcccctttaggttcctttctcatctcactctcaaagaaaaatgcactgtcagattctggggccaacaaaattcacccccatgtgttgaagtctatcgtccatcatcttccaaacagaatttcaagagattagcctggaattagaggtttcaattcaagtctctgatctgccatgtagttgtgcatccatgggtaaatcatgccagtccctctgaagtcctggtttcatcttcaatattagcatgatcataatggtcttacagggttattgtgaggacctaacaagaaaatgcatgtgaacagccccacaatgtataaattaagtgattattattccaggacagacacaaggatgcagacgataaatccccaaggaatattggctatacagcaccatagtaaaacctgaagagatgctgaaatgagttgggagaggggaagtggtaggaggctgcttgatgcattagcaaagaaatgtttcggagggatgcagtgactcgcacctgtaatcccagcacttcgggaggctgaggccggagtacggcttgaactcaggagtatgaggccagcctgggccacacagtgagaccctgtctcaacaaaacatcaaaaaattagccaagtgtggtggcacatgcatgtagtcccagctattcaggaggctgaggtaggaggattgcttgagctggggaggtggagactgcagtgagctgtgatcaagccactgcactccatcctgggtaagacagtgagaccctgtctgaagaaaagagtttcccatacgtggaaaatttctgaacagagacaagttaaaagtgtggttcagtggagagaagggggaaagatttcccggctgacaatgatagaacactgctttctagcccttacctaggattagagaataaagtacctatcaggtaacaaatctcttagagatgtgtgtctctacctttaatgtataatacctatgcctggagatctggataaaatacagattatgattcaagggtctgggtgaggcttggattctgcatttctaacaagctcccaggaatgctgctggtccatgaaccacactttgagtagcaattctagaggttagggaagactcctgtgtagcaaagatgtttaggctgagagctgaaggatgagaaaaatgtgactaagaagctttttaggtgcaggaaccagcttgttcaaaggcctcgtggcgctgggaaaactagaagaaggtctgtggctggagtgcagagagtttggggaaagaagtgagatggaactacagacagcatgtgaccaggcatgtagaaccatgtatgaggtatctagatttttaatattcactttgacagtgaggagacaccactgaaggctggttagcaggaaagatacatgatcagatctgtattttgaaaagatcattctatctgactataaatgacatatgggtgataaggaggtataaacaaagcggacgctgaacaccagttaggaattagggagctaaagtggtctttgcaacaggtagcttgactaataatggtagagatggagagatgtgggatgtctgagaatatataggaagtaaaatgggcagaattttgtaaagaattcaacatggataaggaagagaaagctctaaaggctgttgcctgagcatttggccacaatgcgatgttgagggtgccattcgctgcagaaaaaagcagtggaagccaaccaagttatgggggaaaagcaaaaatttcgtcttgaacatattgagtttgaggtccctgtgagtcatccaaggtgaaggtcaaataagaggtggcttcataggtctggagctcagaacagaggtggaagctggagatgtcagtctgggcgtcaggtttgtattgtttgtatgggtggtgattgaagctgtgggcataggtaagatcccaaagtggagacagtgtgagatgagaggagggcctaggactaagtctgtgaggattccagacactgaaccatggtgtctaaatgatacagacgggaatggccctagaagccagcaccacagcctcatcactaccaatacagacccctcctgcagttgcgtcaccccgctggacttcaatcattgcctcaagaaccgggaggataatggcctgcccatgctcagcaccaatgccatgagctggaagacgatttctgcaatggagaaaaggggagcaagagagactcagcagcaaaggaagagagtgtttagaggaagaggggtcaacagtgccaaatgctgttgagaaatggagattcaaacaggatgggagtgatgaaacccaagaaagtggtctccttgtagaggactgaagctagggctgatacagggccaagacagtcttccatatgcataagttgtactgtaatagccagtttacatgtctgtctccctggagtaaaggtctccaaagtggaacttgtccaccctgttatccttaaagtctagtgcaagtcctggaacgtagtggacacttaaattttactgattagtgaatgggtgaatgaatgaatgaatgaatgatggcaaatgattggaagcagaggaagaatctctggcatctgcctggactagctactatccttcagctttttttcttttttaccgcaatggcccgcagacccaggaaagagacgacagagccccccttccctccctcccctgggccctggccccccttcctctctctgacgaagagtctggaccgaaggttctgctgacgtgggaaggggaggagagtctagaggaaggggaggggaaagcagcgcagagatcgcagagaccaaggaggcgcccgcggctgcagagctgcagagcgggatctcttcgagctgtctgtgtccgggcagccggcgcgcaactgagccagaggacagcgcatcctttcggcgcgggccggcagggcccctgcggtcggcaagctggctccccgggtggccaccgggacccccgagcccaatggcgggggcggcggcaaaatcgacaacactgtagagatcacccccacctccaacggagtaagtgcccgagccccaggtggcgacgccatcctctcccagcacccccgcccccgcggagcgtctggcattttcctcctgcgcatccctcgcccctgactgccttcctagccctccctcccacctgccccctgcccttgctctgcggtttcctccgcttcacccttctcctgccaccccctgccccccaacagcaggtcgggaccctcggagatgcggtgcccacggagcagctgcagggtgagcgggagcgcgagcgggagggggagggagacgcgggcggcgacggactgggcagcagcctgtcgctggccgtgcccccaggccccctcagctttgaggcgctgctcgcccaggtgggggcgctgggcggcggccagcagctgcagctcggcctctgctgcctgccggtgctcttcgtggctctgggcatggcctcggaccccatcttcacgctggcgcccccgctgcattgccactacggggccttcccccctaatgcctctggctgggagcagcctcccaatgccagcggcgtcagcgtcgccagcgctgccctagcagccagcgccgccagccgtgtcgccaccagtaccgacccctcgtgcagcggcttcgccccgccggacttcaaccattgcctcaaggattgggactataatggccttcctgtgctcaccaccaacgccatcggccaggtgaggcggccaggcgggccgcgggtctgggggcgggcagagagcggcgagggcggggcctcacgcccgctgcacccttctcacatccccagtgggatctggtgtgtgacctgggctggcaggtgatcctggagcagatcctcttcatcttgggctttgcctccggctacctgttcctgggttaccccgcagacaggtgagggctgtcgtgggggcagggctggtagaaaggagggggtgctagggaagctaacccaagcagcgggcgtttacaggaggtcgaagacgattcgctggactctgcagtcttctctggacttctattcaatggtctatccatgtctcaacttcactctccatcaagaaataccccttccctacctcttccgcgcaagggaatgactcgacctctatggactattagtcccattcccactaattagtggccccctatccgtgaatcaatggcctcatctccaaagagaatagtctcatccccactaacagcccacatggactgttcgctccatctcagtgacctcattcctgaagatcaatatgttaattcctaaacaccaacagctccattcccactgatcaatagttcaacttcacaaacaaattaccccatttctgaccagcgacccctcccctacaagtcaactaactatctccaaagacaatatcctcagacccagtaacccacagtcccatgcctgccaccaaatgacccaacgctctgtaggggaatagcccatagattagcagtcataccctcatggatcctcagggctttgagatcctctcaccgaaatccccgtttccatgagtcggtagcttcacctctagagatcaacaacccaatcccagcaaccaataactcttcccacagatcaaaaatctcatctctgattctggtcaccttcaccactgaccagatgctctcactgcactaaacttccgattagactcagccccattgatccacagttccatccaagtggattaataactcaacttctgtggatcaaagccatcccaacattcaatagtccagttccttaaaatcaatacccatcctcactgcccaatagtcacacacctctgtgggccaatgatccgaaacccacaggtcaatagcccatccctatgcatcagtggcctcattgccacagaccagtagcctcattcctatggaaccatggtttcatccccaaagatcaataatttggtcttctaaaatct

SEQ ID NO: 6497 - DNA, 6000 bp, Homo sapiens
atacctaatgtaggtgatgggttgatgggtgcagcaaaccaccatggcacgtgtatacctatgtaacaaacctgcaccttctgcacatgtaccccagaacttaaagtataataaaaaaaaatgcttacaatgaaaactaagtgaataagtaggatacaaaattgtatatgcactgtttttaattatgttaaaagtacatagaagactatataaaaatatactaaactgttatacagtgagactaggggtggttttaatttttattcttgatatgctgtattttcttattctacaatgagcatgttttataaacaggacccccaaaattgcatttgttaaagcatattaacttgggagtctgatatatatcaagctccaagggctgccatctattagctgggcaacattaagcaaattaactgctgggtcccagatttctcacctataaaactggcataatgccaatctatttttcaagccattatttactgggcactcactatgtgctggacactatgccaagtggttttccctcctatattatacatattatgcatacttacacttcatacatgatcattttgatcctcaaaataaggcatggagtagattatcataatcctattttagagataaacaaactgcagctcagaaaagttaggtgatatgctcaggttcacccaactagtaggtggcagatagagtcagaattcagacataagtctgaccatctttggacacctagctccaggcctccagcctggactgctcacagtgacagttttgctgtgaggatggaatgaggtcatacagattgcgcgccaagcacagtacctggctcctagcacagagctgctccttcaaacattacttcccgtttctctgacacctgaatgttggtaaattgtggcaaaacaaaccagtgcactctctgaaaaaaaaaagtgcccctgccctgaaggagggaactgtagagcctgtagggacagaaaagaaaggggctggaaggctggctcactcagggagacatgggggcgctgggactgtgcatcccacattctgggagtacttctgtcagagatttcttcgggacttcattggaccctacacttaatttgcagctcagaatacagtatagcttccaacaaggcatcacaccctgtcacctcttctccctaagaaacaaggcacgggtgttccaggaccataggttggtttttcttttcttgttttcccttttgcttggagaaaaggggaattttaggggtggagtgggacaaggctctgtgtggagaaggaaaggttgacaccctaggctgaatatctagaggtgagcaacacagcttggcctgccccagaactcccttctggattcatcttaaatgcctctttctttagagcaccagcctcaggtggattccatccctattctctactcccaccccacaaacttgatgtggcactaaccacactagagtttcttgttggttgcctgcctttactacaaggtgtgtccagaatttgtgggttcttggtctcactgacttcaagaaagaattcgcggaccctcccgtggagtgttacagtttttttttttttttttttttttgagacggagtcttgctctgtcgcccaggctggcgtgcagtggcacaatctcggctcactgcaagctccgcctcccaggttcacaccattctcctgcctcagcctcccgagtagctgggactacaggcgcctgccaccaagcccggctaattttttgtatttttagtagagacggcgatgagtgttacagttcttaaaggcggcgcgtccagagtttgttccttctgatgttcggatgtgttcggagtctcttccttctggttggttcgtggtctcgctggcttcagaaatgaagctgcagaccttcacggtgactgttacagctcataaaggcagtgtggacccaaacagccaacagcagcaggatttattgcaaagagcgaaagaacaaagcttccaccctctggaaggggaccctacccgattgccacggcaggctggggcagcctgcttttaatctcttatctggcctcacccacatcctgctgattggtccattttacagagagccgactggtctgttttacagagagctgattagtcctttttgacagggagctgactggtgcatttacaatccctgagctagacacaaaagttctccaagtcctcactagattagctagatacagagtgctgattggtgcatttacaaaccttgagctagatacagagtgccaattggtgtattcacaatcccttagctagacatacaggttctccaagtccccaccagatcagctagacacagagcgcagattggtgcatttacaaaccttgagctagacacagggtgctgactggtgcatttacaaactttgagctagacacagagtgctgattggtgtgttcacagaccttgagctagatacagagtgccgattggtgtatttacaatcccttagcaagacataaaggttctccaagcctccactagactcaggagcccagctggcttcacccagtggatcccccaccaggccgcaggtggagctgcctgccagtcctgcccctgcgcccgcactcctcagcccgcactcctcagcgcttgggtggtggatgggacagggctccgctgagcagggggcagagctccttggggaggcacaggagcccacggccgggggagggggggaggagggagtgggggtaggggggtgaggggggttagggtaggggggtgaggggggtggggtaggggggtgaggtgggggggtagggtgaggggagtggggtggggggatggggtgagaggagtggggtgagggggggtggggtggtgtgaggggggctcaggcatggccggctgcaggtcccgagccctgccctgcagggacgcagctaaggcccgacgagaaatccagcacagcgccagtaagccgaaactgttgggggaccaggcgcaccctctgcagctgctggcctgagtgctaagcccctcactgcccagcgccggcggggccagctggccgctctgagtgcagggccgccaagcccacactcacccagttcccgcccgtgcctctccctccacacgtcccggcaagctgagggagccggctccaacctcagccatcccaggaaggggctcccacagtgcagctgcgggctgaagggctcctcaagcctggccagagtgggcgccaaggttgaggaggtgccaagagcaagcgagggctgcgagggctgcgagggctgccagcactctgtcacctctcaacagtagtaaactccatgagggcaggcctcacagtgttcaccactgtgtctctagcacctggctatgtgggtggtacacagtaaactatgtagatacttgatgaatagagaaatgagtgaatgaataaatgaataaactctccatcaacagtcatgccccaagtggacccacagctgacctgttctatgctaagcacttagaagatgtggtccctttcctggaggcttaaattttacatttctccaacctcatgtaaattgtgggaagacacgatgcaagagaaatccctatttattccaaacctcatgctctttattttaccagagtactcaaaatggaggccctgagcctaagggagggtccccaagttcatggaatcctggcaggaattacagggctcaaatggtctgaagtctagtgttctactgctagctctgccagttctgttgtcattcacctctggtgaatgacttcccctctgggccttagttctcttctctgtaaaatgggaatgcagtgggggaggagtggtggaccaagctgtgtatgaaaataggggcaatttagtgcatttgactatgtactctgttgtgtgtaattggacacagtgtcctccttcctaaaaaggcttagaggcagggatagaactagatgcagagtctaagtaaactaaggggagagggaagacagtgtgtgcctacttctgtctgtaaacagcaaggtcaggatgtgctggccctctggtgagaggacagacaggacagaggggtggtgggctagagggggccttgccataataagggccctctcaaacatgtctatatgtctttgcctctagatttgcaaaagaaaagattctaaagccctgggatcttcatgccatcaccaagcatgatgccctcctccccattcagaagcaatacacccccttctccttcagagggacaacccagagagaaatgggtggtggggatggaggatggggaggcctggagaagcattgatggggccagggttcctagcagggtcccatttcaggcatcttcagaaagtgcaagagcgtgagcctcctggtccccctccagtgctttcttccggaggatagtggactcagtggacacccgcatccatgccccaaagctttttggcttcagtccaagcagctgacaggttcatccttctccctagggccccacaaacaccacttccggccctcctgcctctatctgggctcttcctgcctggatctctatacccacgcctgcccttccctctgcagagctttctccctcccttcaggagccttatttcgctctctcagtctccatatctatttctttcccccttcttccctcctcccctgcttttctcctccttgccatccctcccgagccccagtatgggtctcccctccttcccctctctcaggctgcatctcccccctccttagtgctcacccctgcacctctttctttgtattcttctcaccctctcccagcctcgccagcatctctcctcccccgcccggcttcggcctccccctgcctccccatcttcagctcagtctcctccccctcgctcctcttccctcccctccgcctcgccccactcccagcccgcatgccaggatttctctcctccctgggggtctcagtgcatctccttctcctctctgcctgcctcctccctcaccgaagggttagcggacacccatccttttctgcttggggaccccaccaccacccgcaacactgccgctgtctcttcttcaccgtatccttctctacccaccctcttctctcttctcttctccctgcccctttaaatctgcctggcccagcctcccccgtgatgctgggatggagcaaacattgatttgtgctgggatggaatcggaattttgatttatttttcctctcccaaccataagaagaaaaaaataataaaaacaccccctcttgagagccccctccccctttgcatccagctcccagctcttcttccctatctccatccaaggcagattttttcccctacactattctcatcttcccccacccttgccactacctcgcccccccacccagcctgctcctccagctggggagagaggggactctccggactcccccacctttcctctctgggttggagcagtctctccggaaggggagggggcttggcttgtccgggcgaggtgggagtggaggtatcctgccatggatgctgtgccggggaggcagcctgagccccagcccacatggtgagtagcctgccccctcccttctgcctgtctgcccgtccccaccctggcctttcccctgcagagcctcccctgggccccatcccccgaaaaaccccccgaaaaaccccccgaaaaaccgtctgcctaccttggtccgatctccccgctacatattctaccccccacccccatccctttgccagagacgccgaagaaccggggcagaggggtcctgacagcagccagggaaacgggtgccctacgattctgcccagccccctctcaggacccccaaactgccatccacactcgacacttcggggttctaggttggagaattgggactcccgcttggggttggggccccaagtcctgggaggggcccgctccacaaagacagaaatgggggaagcccccattcccccaa

SEQ ID NO: 6498 - DNA, 6000 bp, Homo sapiens
ctgcccagcgccggcggggccagctggccgctctgagtgcagggccgccaagcccacactcacccagttcccgcccgtgcctctccctccacacgtcccggcaagctgagggagccggctccaacctcagccatcccaggaaggggctcccacagtgcagctgcgggctgaagggctcctcaagcctggccagagtgggcgccaaggttgaggaggtgccaagagcaagcgagggctgcgagggctgcgagggctgccagcactctgtcacctctcaacagtagtaaactccatgagggcaggcctcacagtgttcaccactgtgtctctagcacctggctatgtgggtggtacacagtaaactatgtagatacttgatgaatagagaaatgagtgaatgaataaatgaataaactctccatcaacagtcatgccccaagtggacccacagctgacctgttctatgctaagcacttagaagatgtggtccctttcctggaggcttaaattttacatttctccaacctcatgtaaattgtgggaagacacgatgcaagagaaatccctatttattccaaacctcatgctctttattttaccagagtactcaaaatggaggccctgagcctaagggagggtccccaagttcatggaatcctggcaggaattacagggctcaaatggtctgaagtctagtgttctactgctagctctgccagttctgttgtcattcacctctggtgaatgacttcccctctgggccttagttctcttctctgtaaaatgggaatgcagtgggggaggagtggtggaccaagctgtgtatgaaaataggggcaatttagtgcatttgactatgtactctgttgtgtgtaattggacacagtgtcctccttcctaaaaaggcttagaggcagggatagaactagatgcagagtctaagtaaactaaggggagagggaagacagtgtgtgcctacttctgtctgtaaacagcaaggtcaggatgtgctggccctctggtgagaggacagacaggacagaggggtggtgggctagagggggccttgccataataagggccctctcaaacatgtctatatgtctttgcctctagatttgcaaaagaaaagattctaaagccctgggatcttcatgccatcaccaagcatgatgccctcctccccattcagaagcaatacacccccttctccttcagagggacaacccagagagaaatgggtggtggggatggaggatggggaggcctggagaagcattgatggggccagggttcctagcagggtcccatttcaggcatcttcagaaagtgcaagagcgtgagcctcctggtccccctccagtgctttcttccggaggatagtggactcagtggacacccgcatccatgccccaaagctttttggcttcagtccaagcagctgacaggttcatccttctccctagggccccacaaacaccacttccggccctcctgcctctatctgggctcttcctgcctggatctctatacccacgcctgcccttccctctgcagagctttctccctcccttcaggagccttatttcgctctctcagtctccatatctatttctttcccccttcttccctcctcccctgcttttctcctccttgccatccctcccgagccccagtatgggtctcccctccttcccctctctcaggctgcatctcccccctccttagtgctcacccctgcacctctttctttgtattcttctcaccctctcccagcctcgccagcatctctcctcccccgcccggcttcggcctccccctgcctccccatcttcagctcagtctcctccccctcgctcctcttccctcccctccgcctcgccccactcccagcccgcatgccaggatttctctcctccctgggggtctcagtgcatctccttctcctctctgcctgcctcctccctcaccgaagggttagcggacacccatccttttctgcttggggaccccaccaccacccgcaacactgccgctgtctcttcttcaccgtatccttctctacccaccctcttctctcttctcttctccctgcccctttaaatctgcctggcccagcctcccccgtgatgctgggatggagcaaacattgatttgtgctgggatggaatcggaattttgatttatttttcctctcccaaccataagaagaaaaaaataataaaaacaccccctcttgagagccccctccccctttgcatccagctcccagctcttcttccctatctccatccaaggcagattttttcccctacactattctcatcttcccccacccttgccactacctcgcccccccacccagcctgctcctccagctggggagagaggggactctccggactcccccacctttcctctctgggttggagcagtctctccggaaggggagggggcttggcttgtccgggcgaggtgggagtggaggtatcctgccatggatgctgtgccggggaggcagcctgagccccagcccacatggtgagtagcctgccccctcccttctgcctgtctgcccgtccccaccctggcctttcccctgcagagcctcccctgggccccatcccccgaaaaaccccccgaaaaaccccccgaaaaaccgtctgcctaccttggtccgatctccccgctacatattctaccccccacccccatccctttgccagagacgccgaagaaccggggcagaggggtcctgacagcagccagggaaacgggtgccctacgattctgcccagccccctctcaggacccccaaactgccatccacactcgacacttcggggttctaggttggagaattgggactcccgcttggggttggggccccaagtcctgggaggggcccgctccacaaagacagaaatgggggaagcccccattcccccaaagcttgggggctgctggaagatgctgccaaaggaggggggtggattggggggcggcgctgatgccccagagccaccgggccagggagcggcgggcaaagaggaggggcctctctcgccacttgcccccctccctctttctccgcagccactcaggatgagggtccggccctgcctgccctcgctggggcccccccgcccggccccggtctaactgcccccgccccgaggcctcgcccggctccaaggcccccagcaggctctccagtcccaggatgcgctgagccgccggggggctgaggccgcgccaactacatgcatgtcccccgggggcaagttcgactttgacgacgggggctgctacgtggggggctgggaggcggggcgggcacatggctacggcgtgtgcacgggccccggcgcccagggcgagtacagcggctgctgggcacacggcttcgagtcactgggcgtcttcacggggcccggcggacacagctaccagggccactggcagcagggcaagcgcgaagggctgggcgtggagcgcaagagccgctggacgtaccgcggcgagtggctgggcgggctgaaggggcgcagcggcgtgtgggaaagcgtgtccggcctgcgctacgccgggctctggaaggacggtttccaggacggctacggcactgagacctactccgacggaggtgcggggcccggcccaccagtgtctgtctgctcgtccgcgtgcgccttccccagccttgggccttcgcccgccatttgcgcccttgcgcccatccttctttcccccgccaccattccccatcgatgtgacccccagcccccaatttctgctctctcccaccatgattatgctttcctcaattgtctgtctcctgctcgcttctccctcaccccttccctgtctgcctgtcctcacacctccctctctacctgcctgtccccaacacctctgctctccgtcgggtcggcgtgcccctcagagtactgtttgcctatctaaacgccctgaccagcctgtccttcgcatgcctgccgggccctccccgtttcccctgtttacccgcactgccaaaatccacgtagggctcctgctacctgcccgtcttcactctgctctcccacactttccggcccagcctggcctgttcccggctcccagtgcccttccccgacctccacactaactgcctccatctctcccgcctgacgcttgggcttccaggggcgcttgggacttggggcgcaaggagcccagcggcacgtcctgactctttctcccacccctccgccgcccgcaggcacctaccagggccagtggcaggccgggaagcgccacggctacggggtacgccagagtgtgccctaccatcaggcggcgctgctgcgctcgccccgccgcacctccctggattccggccacagcgaccccccgacgccacccccgcccctgcccttgccgggcgacgagggaggcagccccgcctcgggctcccggggcggcttcgtgctggccgggcccggggacgccgacggcgcgtcgtcccgaaagcgcactccggcggccggcggattctttcgccgttcgctgctgctcagcgggctccgagcgggcggacgtcgcagctccctgggcagcaagcgaggctccctgcgcagcgaggtgagcagcgaggtgggcagcaccggaccgcccggctcggaggccagcgggcccccggccgcagcgccgcccgccctcatcgagggctcggccacagaggtgtacgcgggcgagtggcgcgcagatcggcgcagcggcttcggcgtcagccagcgctccaacgggctgcgctacgagggcgagtggctgggcaaccggcggcacggctacgggcgcaccacccgccccgacggctcccgcgaggagggcaagtacaagcgcaaccggctggtgcacggcgggcgcgtccgcagtctcctgcctctggcccttcggcggggcaaggttaaggagaaggtggacagggctgtcgagggcgcccgtcgagccgtgagtgctgcccgtcagcgccaggagatcgccgctgccaggtgggcgtccagttcagaggccaaagctgggctaagaggagggggtgcgctggggaccaggaaggcgggtgtgcctaagggaggcccaaggcccaaggcctagggcctgctattgcaagcctaaggccaggcagttggacccctgggcattcttggtgtttatatccgaggctacaggtggatgtgggtgtaactctggatagctgggtatttgagggagatggtgtaagactgtaaatgtgtctcggtgtcttttgtgtggagatgcatgtctatggaatccattgttgtgtgtgggagtagcaaggaagctgttttgtgcaggcccagaaatctcttggaactcaaaacatgtccctagtcttcctcctcttgcagctgatccagcctccaggcctcaggctgggagcatcaaccctgggtggaatagggactgtcccttcctaatcacgtcccagcctgacaccatttcagccttgggcctttgggaagtctaatttatacagctgacctatccacctgaaaagatagtctctcccagttttgccccctctgccttcttttacccaactgatgggaggtttgaggggaggaggcttccctgtaaatgaaacgtttctgtaaatcaaattacatttccttgcatcaggaaccttgctatctaaagcagtgctgtctaacaggaatattatataagccaaataggtagttttaaatctcctagtaaccacattaaaaaacaaaaagaagccagacattgtggcacacacctgtagacccttgagaggtaaggggatcacttgagcccatcaagaccagcctgggcaacatagcaagatcctgtctctgaaaaacaaaaaaccaaacaaacaacggaatagaaaattaaaaaaagcaggtgtgatgaattttaataatatttttatttaaaccaatatatccaaatattatcatttcaactggt

SEQ ID NO: 6499 - DNA, 6000 bp, Homo sapiens
gtaactttatataatttgatctgtttctctaaggatttgagctttgaattttaagtcatgtatcttactatgttagtgcaagctatatgctctggtcagtttgcctgtaatcctacttttggtaaaaagttaaacatggaaataaaactcagtagcatcttttatttctgagtctaagaaaacagtgatttttcattatggaaacttggttgccacctgctttccagattagtagttgacttaatgctgaggcattttgataactggcttgtgttttccttccagcttgtactcccagagtacctcatccacgctttcttctgtgtcatgtttctttgtgcagcagagtggcttacactgggtctcaatatgcccctcttggcatatcatatttggaggtaatatttagatacacttttaatatttttttaaattaaaacttaaatatactgtggttgatatggttatcttacatgctagtcacctacataaaaatggaagatcagttggcatttatttttttaaaaatcaagtgggtgaacaaaaactatttcaatacctcatatagagcttactttatttttaaaggaatttttttaaaaagtgaagtataacttagtgttgtgcacaagtctgaagtatatagctcaatgaatttttacatacgtatacacctgttaaactaccacccagatcaagatacacaacagttgtagcctccagagcattcacttatgccccatcttaagtcagttaccctccacacctcccaagaccactgacctctatcaacttagattagctttgcttgtccttgaacttcaggtaagtcaaaatgtacagtatgtgtctaatttctttctgtgtttatgactaattttggttatttgtaaaagataatattttataacttccatagtaatatctgccgtatatagagttagaagtttttgttttaaataggcatgtcaaaaccttattgcccttgattttaggagacatatactgaagaagtatttagaagtaaagtgttatcaggtctacaatggactttgaaatgattcagaaaaaaatgtacttggccgggcgcagtggctcacgcctgtaatcccagcactttgggaggccgaagtgggtggatcacaaggtcaggagttcaagaccagcctggccaagatggtgaaaccctgtctcaactaaaaatacaaaaattaaccagtagtggtggcgggcgcctataaactcagctacttgggaagctgaggcagagaattgcttcaggctgggaggcagagtttgcagttagccaagatcgtgtcactgcactccagcctgggcaacagagcaagactctgtctcaaaaaaaaaaaaatttactcagggccaggtacagtggctcatgtctgtaatcccagcactttgagaggctgaggcaggtggatcacttgagcccaggagttggagaacagactgggcaacgtggcaaaacccccctctacaaaaaaaattagctaagcatggtggcgtgtgcctgtagtccccgctacttgggaggctgaggcagaaggattgcttgagcccaggaatctgagattgtggtgagccaagattgcaccactatattgcagcctgggttacagggtaagaccctgtctcaaaacaacaacaacaaaaaaacaaaacaaaaaaccaaaaaaaaccagtactcagaatgagaaagagaaggagaaagcaaatatagtaaaaatggacatttggaatatctgggtgaaaggttcttgtatcttttctgtaagtctaaaattatgccaagataagtaaaaacaaaacacctattttctttttacagttcttcctatttttcatggatttctgaaaaggcagagactagaagaaacttgtttagctatctcattctgctcatttaggggctctacttttaaaattaagatggtaaaaggaaagcattttacccataagtaaaagaatgcttccctttatggaccacctctcgtaacagatgttttagaagaaagacctgctttcttatctgaacatttactgccctttctgaatgcctaatagactgtgtttattccaggtatatgagtagaccagtgatgagtggcccaggactctatgaccctacaaccatcatgaatgcagatattctagcatattgtcagaaggaaggatggtgcaaattagctttttatcttctagcatttttttactacctatatgggtaagttgaaaaggtaaaatgaaatatgctttcactttgctgctttaaaagtttgcaggcattatggttttcacacctcaaaatccatttgaagaataacttagtgtcttaagtgtgcatggtgcacaccagcaaattcgcacacattcagtgtggcccacactggtgcttgtcaaggcagtaaaccagcctgccatcagaggcagaaggtttggtcagggatgctgcttcataagttttcagacacattcagtcagtaaaggatggtcctcattctccatggcaaagtgatgtcattgaaggatagggatgtgtgagtttgcagaaatttctgcttgtcttcagggtctctccagacattatgtttcattttttccttatcattcttcataagtggtgtgctctgccctttattttctgatttgcttgatttgagtggtatgaatgaaagaagtagttctaccttacagggtggtgcagtttccgatttttgttctttttttttgagtcggagtctctgttgcccaggctagagtgcagtggcgcgatctctgctcactgcaacctccgccccaccaagttcaagcaattctcctgcctcagcctcctgagtagctgggattacaggcgtgcaccaccacgcccggctaatttttgtatttttagtagagacagagtttcaccatgttggccaggttggtcttgaactcccgacctcaggtgatccgcccaccttggcctcccaaagtactgggattacaggcgtgagccatcgcgcccagcctgatttttttccttttatactctcatggactcattgttcctctaggtcagggtgtctcagcttcggcactgttgacgcttctgggctgtgtgggaatttctgtgggaagctgtcctgtatatcatgggacgttcagcagcatccctggcctttacccactagttgccatgagcaccctcctgccccctcatgacaaccaaaaatgtctctggacattgccagatgtcctgaggggcaaaattgccctgggtgagaaccactgctgtaggtgtgttgtaggtgcagtgaaatgactgcttattaaaactagaaaaggacactgttaaatgtagaattatatatttctttaagctatgtgaatatacttttacacatcacttatataaaatactttctcattttttattaatacatactcaactagagaggactttctccttgattttcagaatatttccaaaaaagctgtaagctttaaaaaacagcataagcttcccttctctttttcattacttgaaaacttgctaagataggcttatattcatattcatatttctcttcatacataagtttccatcatagaaaagatgaatggttagactgaaatttaggaaaaaggtatttttggtatttttatgcctttagaggctattactgtgaaaatgagtatcctttagtgcatatgcagatattactcatctatgaaacaaagaagtgctctgaaaagtgaaattctatgtgtcactttaatttcctgttaattttcatttcataagtttccatagcaaatgtctggaacgggctggtgtatgataggcacttcatacgtatttgttgaatgaaagaaatgaaatgaatgattgaataaatgataaagttggagatgtgcagttgtgggaaaatgttcagcaggatatggtagcaccaggacatttgttgtgttttaaggttgtctatcaagcttgttcaactcctttgtatttctgtttagagttatgtgctttttgaatcatgcccctatgccgttcccatagcactctgtagaattgcccttggcagttcttaaacctaaatcaaaaggtcattgccttttattttgctgttttccccccttttcttttttaaccacttcctaaaagttgctattgcttagatcctttctgtaatgggaaagatccttgattgatcattcctttctatacaatggggatacacatggtacctgccttctaggactccttgaaggattaagcaaggtaatgtatataagagacctaacagggcctggcgtgaagtgagccctccagagatactcattctattattagacacaactccagagtgtgtgatgtttggatggcttctctaagctctgatccgccattaagctttcagctgtgccgttctacttgctaaaattggaagggaataggggacaactacagcatatgcactgagccaagtcatatgttaggcaaaagtccataaatgcaaattaaaatcactgtgaacttgtcattagtcttgtcattttctgtgatactagtttgctatataaagcatactctctcatgctctgagtttttttttaataattagtaatgttcaaattaacatcttttttcttcttttcagcatgatctatgttttggtgagctcttagaacaacacacagaagaattggtccagttaagtgcatgcaaaaagccaccaaatgaagggattctatccagcaagatcctgtccaagagtagcctgtggaatctgatcagttactttaaaaaatgactccttattttttaaatgtttccacatttttgcttgtggaaagactgttttcatatgttatactcagataaagattttaaatggtattacgtataaattaatataaaatgattacctctggtgttgacaggtttgaacttgcacttcttaaggaacagccataatcctctgaatgatgcattaattactgactgtcctagtacattggaagcttttgtttataggaacttgtagggctcattttggtttcattgaaacagtatctaattataaattagctgtagatatcaggtgcttctgatgaagtgaaaatgtatatctgactagtgggaaacttcatgggtttcctcatctgtcatgtcgatgattatatatggatacatttacaaaaataaaaagcgggaattttcccttcgcttgaatattatccctgtatattgcatgaatgagagatttcccatatttccatcagagtaataaatatacttgctttaattcttaagcataagtaaacatgatataaaaatatatgctgaattacttgtgaagaatgcatttaaagctattttaaatgtgtttttatttgtaagacattacttattaagaaattggttattatgcttactgttctaatctggtggtaaaggtattcttaagaatttgcaggtactacagattttcaaaactgaatgagagaaaattgtataaccatcctgctgttcctttagtgcaatacaataaaactctgaaattaagactcactttcagtgcattgtttgagattaaaaatagtatttcttaaacttgcttaatccatgataaagacatgttgctgtcatttttaaaaagtgacgtactacattatgggttttctgaaaaataccatgcctagatctaaaaaggaaaatttttaaatgccgagcacattaacctcttttgtcatttgacaagattcataaacgtggatggcatagcatcatcatttctcttaccaattaagaaaaattatggtggcacttaaaatattttactttgatttttcctttttggaacagtcagttttaaggtaaaatggcttgtaaatttgagtttttgctgctgcttgtaaggcaggtaaattatggcttgcatgttttcataagcataaataaatcttgtgctttatttgggatgaggaagttaa

SEQ ID NO: 6500 - DNA, 6000 bp, Homo sapiens
gaaagacgttgcaagaggaagaggtaataaagcaaagacagagaagcatgaaaatgtaagtcatgtttaataggcaacagtcaaccagtatgtctagagcttaactgagtcgaaagatcaactggaaagaatgtaggaagagaggctgaggccaggtggtgaatgctctgtggagttttgattccaacccagcaggaaatggccaccccttgatgtttttaagcaggggattgatatcatcagatttatgttttttaaagatcactatggcagtctagtgagaaaagaattggagaggggagagactagagatgtggccatcagctaggaggttatcataattcaaataaaagtgacaagggcatggcctggttaaaatggagggaaaagagagatggcagagaatataaagtatatacaatgtacttgttaaattacaattggaaatcaatgctgtgaaaaggaatggaaaggaaatgttacctatgactaatatggcttctgtaattgagcttcaggcagagttggctctgaatttcctggtagctaggacaaaaagagaaactaggcaagtcacatggttctcactatctatcagagaggaggaaacaacaattcttccaaataacctgttttgcctggcactacattttgaaggaaatttcttggtgggatcttaactctaagtcctcttcaacctctgaaattgtaattccaccttagaataaataattccagcaaaagaacttacaccactttagtggtacagttaagaacatgattgttagaatcagacagactgagtccatttctggcatttttagctgtatgagctcatcataaatgttatttgactctatgagcctatttccttatctgtaaattggaaatgttaataccacacagggttcttggtgattaaatgaggtaatgtctgtaaagtattcttacttggatgtaggaaaccctcaatattatatatcattgtcatcatcatcatcatcatccgattactgcttagagatcggttcatggggcttggaggtagaggacagtcccagattgggccagtagacaccagggccagtctctcctccatactgagtgaccctgtctaggtcgtttcacctttgtttgtctcagttttccagcttaaaataggggttaataatgcataataacacttcttagagttttgaaaatgaggaaaaaagcctcaaatttcaaaaggcaaaataaacactgtagaggaaattaaagcttcgagtaagtgagaccataataagaaatctgctttaagtgaatacaattccctatgtctaggtgagttatgttttagaatgacaaagtagcttgtaattttacctagaagctctcttggtgacctttgataaatctcatggaataaaggacatcctgaaaactcaaattggaaaggagctgtcacgatcttcaaatgagaagaaagaaagattctagatgttatatttgataaactgaaggcctaatttcaagcaaaaatccagaatgaattagtaaaactgtagatactcagaatagatcagtgtatcttcactaaaccctgagatgagatggacttccctagccagtgagtattctgattttagtgggggtagtcagcaagtcttcttggtgtccttgtggaaaaaaatggagatgtatgatccagatgatagcacaggtggtagaattctagaagattgaaataatagaccctaaagatgttcattaatccatccaatatgtgtctgggccaaggtatgtgacacagggctctgcctttgatcccattactttcaaccccattacttctcatgactatgtgaagacaaatcaaatatctttgtcaaagttccagatgatgtacagtttgaagcaaaagcaaattcagaagatggcaagctcaagattcaaaatgaatcaagggatcttgagtaagcgagaatgccgaattgaaatcaataaaatgaaattaataaggaaagtgaagtcctacatttaggtttctaaaaagtcaactttacagatatagaatgcggcgagggatagatgagagagggtaacaataagggtgtatgtaaaaaatacctcgggggttttaattgcttgattggtcacagccaaatgtgagtcaatgatgtgctgaagcatctttaaaaaatcaatgcaagttgagttgttattagtaggagtacaaagtctaaatcaacataggcaacagtcatattatattccatattggccatcccatatctgtgttcaatttcagggttggacattttaacagatgcattaatacattggagtaatgccacaaagatgaccagggtactgtggtattagaaatctgatagtaatgggcagtgaagagcaaactttgctggggatgattaccctggaaaatagatgactttaaaaggacaccatagccattctcaaatacttggaggtctaacattgctaaaggagtaggatttccctttttctctcaagagcagtgaatggaaattttagaagttctgagatttgaatgaaatatgagggaaaagagtaatgattagagttgctcaataatagaaccatctgccccatgaaggagtgagtaccctgacattcattcaagtattcaaatagaagttagatggtcaccattgcacatgtcctctgctggcacctcttcctcttgtccaactcccttctggtcctgtgaccctaaaggttatctcatgtctagggctgcaaacttgtgtctccagcccagacctcttcaactaagcaccaggtctatccacttatttatgtaaggtttctctaaagtgtctgatagacctttcagattcacttagccacacatcgtgcaatctcaccccagaacttgtatttccttcagttatcacaatcttggtaaatggcattttcacctggttcctcaggctaaaaaccaaagaatcttccttgattactcttcttctaatcctagcctatgcattcagtttatcaacagatcaagtgggtcctgcagcctcatctctaaactaaccctgagactgttcccctctcttcatttccatgtctaccatacaatccaggcattgccttcgggtacttggactgctgtgggtttctctccctctgttcattgcttctactctcatttcccaattttttttttacacagccaccatcatgatcttcttacaacattaatcagatcacgtcactcccctgcctaaattcatcaatggtttcccatcacacagggtagaatctaaactcctcaccgcatcccacaaactccaacacccaccatctggtccctgcctgcctttcagacctcccctgtccataccccaagcaaacgggcttctcatctccttgccgccagcttgtcctctctgtgatgcctctgcactcattactccctctgcctgaaacacttcacatccagatctttgcctgatggtcccttcctgtcctctgaggatcagtttctcagatgagtggatttaaaagaggtggtacacaccttaccactgtgcccctcactgcctgccataccaccttgtttttctttatagcagttatcaccatctaaacttctcttgtcttctagtttatttctgtctcctcaattcctacaggaatgaaaactccatgagagcaagcatctcctcccttttgttgaccactgaattccagtacatggaagggtacctcatggcacagagggaggtctcaatcaaaatctgcacgataagctcataaatcttcaaattaacaaaacacttccagtgtaaacctgtccgaaaatcatgctgctacattgtgagcatcacagaatttcaggaccctggagatatctagtctatgcccacattttaatgagtatttaggaccagaaaagtcccttagcttgccggatgccacacagctaattaatagaatagctgagactaggacccagctttttaaattccagttgtgggtaattagactactctgagggtgaacataggttccttttcctatgtccaacataggaacagattatatccctagttatataaccatccctacttatgctcatcttcctggcatagtcagtaatagcactttctctctctttctgaagtgtcccagatgggggataaataatcaccctaactatatcacagtttctgtaatcctgaaataagtcaatatgttcctccacctaaaaagatctaaaaaatgtggctttcttccaattctcttttttgttgctgttattttcattatccagtttttacttccttcttattgctttatagaagagtatttgcagatgtacttacataaagactataatatcttctggaatattaagttctttggtcacttagctaattaaagcaacaacacataaaatgatttcattaataacacttgtgatttactaccttttgatactgtctttttaggattcaggctaaaatcccaggcgctaagaggcatgctgagtaaactgatttcccaccggggactggacacaaacaggaatgtctggagtggtaacagctctcttcttactcattactgcaaattgattgtctttcccccctccctccagtaccataatcttagagacaaaccttaaaacagctgtttttaggctgttccttgtactcttaggatatttgagtcacttgtgtcaaccactaaagtatagagaaaagtgtattagatgtggtttttaattttgtgttgctaaaaaaagtgcatgatggtgagagcccaagttatctttccctcttcggtgttcttcttctcttctctgcaatgcttctgtagcttctaatgttccccgtggctaggcctttcctgccgagtgctctgatgcaatagtggaaatcgcttatatgtccttgggttgctggttggattaatctttaataacaatatatagaattgtagactgatgttttagcatttttccaacacacacaacgtaaaaataaaagcagtcgaccgcacttatggtaatcagttttgtataacttaaaataattaaataaatgaataaatccaaaacaaacatgcagtacttttgttgtatgggattggtgggctgatttacatgtatggttactaaaaagtaccagcatgttaactttattacaatttgtattactttctctgtagttcctaatggattcaattacggactctggatatttgcacttatgtacttgatactgaatgcataaataaatgttactaaatgtagaatgttctccctctcttctcatgcatggtcttaccagaaaacacaaaagctcgaagtgatgaagtcactcgatgacattctaggagggctgagagcaaatgctcaccttatttctctctaggactgtggagtcaaactgcaacctggcttacggtttttctgggtcattaatagaaaactgaaaagtggtaaactgtcaatcactcttcatattgtactctgtcaggtggatgcagatatttaagatagtttttaaaaacttgaaagtgatataaattcttacataaactgtacggcaatatgcaacaaaacactggcaaaaacaattgtaattgccatgaactcaccgttttagtaattacttattaagcactgactgtgtgccaagcacttagaatagggctgtgaataagaaagatgacaattcctgccctcaccatgtgaagtcttctaataattcctcactgctttttatacaagtccaattgcatattttgtttcactgctacaatcaaacatcaaagacgaagaggtagaagtgaatgaaaggagtagcagttggagaaaaaaaggaatgattgcttataaaaagctgccttttaccagttttacacctgggttcagtgaatatttgtggagttatccttctatacaaagtggcgtgaaggttacaagggtcacttggcactgtgccaacagccagaaactctcat

SEQ ID NO: 6501 - DNA, 6000 bp, Homo sapiens
atagtttaacttgtttctgtggacagctttttaaagaagaccatcatgtgggtatttatcattcagtatgtagactgtggcagatgtttaatcccaccctgcccctcgctcctgctatcaggagatagttctgggacaagtggttttagcctctcgtaatctccattacaccgcacgaaaccaccctaagaggcttacactgcaggcttctctacatgcagctccaagcagaggccccagccccaggcaaaaccttctgggcttccctatgatccgccaggcaaaactgaaatgacattttaacactaccacctataaaataaaagcaggaaggtaaatctgactgaaatcaaatctagtaattattttaaaggtaatattccaaagccaaaacaaaactgtggggaatgggagaggtctttgtttctttctgatagatgatttaaaatgatctgctattagggacacttcatcccttagatgacctatggggtcccctgcgttactaacaaacagcagcaagcgatcagtatctaactccgtgtcactctctgagagcactgtggcatcaagaaaggtgtcccaggagacctggcctaggcgccctctctgtcgccaagttaattgcatggccttgggcaagtcactccaccccgaaagcctcagtgtgtccatctgcagaatggggctgccacctcctctcacctgatgttatggagatgaacggagtacgtgcaaaagctcgaggggctgcctggatggcccgacgcactgccttgggccagtacacacagtgtggggcctacctggacatggtgctggggagccttcgggtcttcaggcggggagtgggggccggggagagacgggtagcactgggtggggtccactttcctgggaacctgcttggtaactgcgtttcctctgtgtttcttctgtaggaaggccaacagctcaggagaagccatgtcactggggagccacagcccgcagagtgactccctgacacagcttgtccagcagccggatatgatgtattttattctcttcctgtggctcctggtgtactgcttgctgctcttcccacaactggatgttagcaggctctgatacgtgtgtctggataataaaaaagacaggaccctgaccaggggcggggttacttcattttattttgggttctgggtggggcacttctacagacagttgaggacctccgaggaaacttagaccccctttctcgctattgtggtttttttttttttttcaggtttccttttttttctggacaacctgagcatgcttttttctttggctgtgtactcaaaactcaggcatgcagctggatccgtaggtggggttttgtccttgtgtgccttgctgggttggatagggagcattgttagtgatcattagcccgcctggatcttagcacaccccacattgcaggttcacacgctggatgaacttgagtttcttacctctcagatgaagggctgcttaatgagaaagagggtgggcaccccaggccaagccccagctggggagagagctgccacgttttcctccaagcgtgggtgtttgagagaaggtgctggggtccatgcacctgtcgcagtccggtaactggttgcattcactaggggaaatccgagcagccagctctgtgtaagcacatccaggaatggcagaatccagggaggaaggtgaaagctgtgttgagagccactgtgtgctctttttcaccctgttttttttgttgtttttttgttttgttttttgtttgaggggagataacacttgaaattcagttttccattgattggattgagatagaaccatgattttcaaaccagatcgccagggcccagcagggccatataaaagccatgaggagtggctgggctggaatcagctcccagcagtgctggagctgggtggtggggtagcttcctgcccactaaagctttggtgcacacctccctcagaatgcatgtcttggaacgggcattctttgtggtcacttgtaatgggtttcttgaagaggctttctggacagcactccgggagcaggccagcacaggaggtttgtgaaagaagagaggcatctctagcacccctgcccccagtcttcctcagccccaggctccctctgctctctcctccctgccaagactcaggtccgtggtgagtctctgcattggttcctcctccccttgctctccccttcagaaagcatgtaccaggcaacccttataaaatcacaaatgagtcaggaggggactcagtgagcatcttgtctagctggacccagagagacagagcagcttgaccaagatcatatagccgaccaggggcagacttgcagtgagcacacaggcacctgatgccctgtccagagctgtcaccccttgtaggaaacttccactgggcacaccaatgtcctgagaaaaagataaaatgactagattaaaatgtccacattcaagcaaaaccaaaaagtttagaccaactatcgacatttgttttgttcttgtatttttcccatgaggaattcttactcaccttcaagctcatccccaattccttctgaaatacccttgacagctgcaacagcttgtcatttgacataccagcgtcgctcttactccaggaatcacgtttctttctttgctagccaaggacttgctcatttcaagcagtgggtttcaagtttacagaattccagcatggccagaagaatttacatagcacatctgagtcgatgacagccaaaatctggcctctaaaccagtctgattatagtctgtctcccctcctgaaagaatttcagccttccaaccagaaagctgctgggagcttggagtgattccatctggaaggccaagagccccatggaaaatgagctaattaatgagctccctggcatcaatgaaagctcaaaggtacagataataaagattatgtgatagtttataactctgggcaccatgcagtccttgcctaaattagatgctcgaagagcctgggaagagccaacccaaatgtgaatcatttcattttatgggtctagaccttgttcagaaaaacctctgcaagatacttctctcacctattacaacttgtaatattgtttaaaacatctactggcaagatgcctgaaagtcatttggttcaggttggcagtcaactgatattttgcaaaggaaaaaaaaatctcatttgagtataggcttctatggaagaagctggatatagaaaatggatgtggaagtctgcaggacaaaccaccccattgcttgtaaattttttttaaattaaaagaaatacaataaggcttttaacaagaactagcagtcccctaagtctcgctgcttagaagtaaccactttcaactctcttatgtttgcatttctacataacgtgcttacactttattttttaatttagaaacatctactggcttgctgtcacagtagaggaggatttcactcttaccataccgtgctttggttttccagtatagctagatcacatcatttagtacatttctattaggtgttgacattacctggagcacttaaggattgttgactcccaagcccagcagtgtgttatggttacatgtcctttctcctccaaatgtccccattaatttgctattctctctctttactttttttttttttttggtgtggcacattctttaataacttcctgaggaagagaacatgggaagtaaatatggttgtaaatattttgagatttttgcatgacttaagatgtctgtattctgcccttaacagaaatgtggctgagcatagaatgacaggtggaaaataataccctcccctagcccctcccaagcgtgctggttgagatttctgatgccattctgattcccgtacctttatatgtgacttaggtttttttatccacccttcctggaaacatttaagatctctttattcttggtgttctgaactgtcatgatggtgttgtatcccgggtgttaaaccttgtgctgggccttcatgggaaatttcttaaattttcttgtgattatttacattctttctttctggaccacctattatttcaatgttggaccctcccctacacccaggctgatgctctaatattttttatcttttctatttttcgtctatgtttctgatctgctttcaggaagaattattcatttttatcttcccaatctgaatgttttattgaatttttattttccaagttaataaaacctttggttattatcctgtctttgttttacagtgtcctgctcttgatgcgtggatgcagattttgtctctctgtggacgttaatgattgtggtctgaggggaagtcttttctgctccctgtgttgccctcattttctctgagttctctttattttggtggtctcagtctctatctttcacgttgtgaatttttctcaaatatatggtgatcctatggatctgttcatgttttaagagtgaggcatccaaaagctgattggaagttgtgtgtgccaactggtgagcttttccactagggtcaccaggtgggcacctggactcatcattggagaacactgcctgtcagtatttgcacgtgttttctctggggctcattctgtttcttgagagatattcccactactctccttcctgggaaacgggcatacacagggcttttagcctatgctgagtactcatgtggtttcaaaaatggtgtcccatctgggcagaagtccccatgagcacttggcttgactggcaaaggacaccttttgccccttcctccagacatacccagctctgagcttggacaatgctcgaggaacaatgaaaaggctagattttaactcctaattgccctctttagccaagtgcctctgtgcaatgcacaactgtaggaccatatccagagaccctggtctatactcagtgtgcccgagtcctgaccgctgagcaggcagcctcatcacccgtgagtatttagactttcattaagttgcttcaacctttgctgtgcctggtgtccctgagttggagctgctctgatttctccatggagtaggagcacagtggtcatctggctgcatgggaaggacaggggacctcagagccaataaatgccctggtcttcagccccatgtctcaccccatccctcctattccaatccccaagcctctcctggaggccacagggcatctctgctgaccactctgtggcctcccctctgcaggcatgtggttttaggatccccctccctgctcacttttccatcagttccattcctgcataaataggttgctagctcttgcttactgttctcttctgtattctgtgttcatggttgtattaatataactttcattcctctgctcctattttcatggggtttcatgagggaagaaacaggctcatgtgttcagtataccatcttgatccataaaccccatttgagttatctcacaggttgcttagggggcttgctgctctgactggtttgtgaacgtgccctgagtccagctgggactgcagcaacatccatcctgttgagctgtggtctgctaagtgattttgtgtaatgctgtgccaagtgcaggagagggatacatagcatggctaagctctgcttgaatgccatgattagttattaccttccttccttccccctggttttgctgcctattgtcagtaaatgatcttagatctcctgcctccccaaagatatagtctatgtggtggtctgggttctaggttttctttaccacccttgcttcacttaagaaacagaaaactggctaggcacagtagtggctcacacctataatcccagccctttgggaggccaaggcaggaggatcgcttgaggccaggaattcaagaccagcctgcacaacatagcaagactccatctctacaaaaagttaaatttaaattagtggtggcatacacttatagtcccagctactcaggaggatgaggcagg

SEQ ID NO: 6502 - DNA, 6000 bp, Homo sapiens; identical to SEQ ID NO: 2789

SEQ ID NO: 6503 - DNA, 6000 bp, Homo sapiens
gtttcttctgtctgtcctatctcccctttcctcccaaaccctcccttccaatttctttctatgcccacttcctccttcaagtctccacttaaatgtcattttctcatataaggctaacctgaattcacagtctaaattgtttgccctgctattctttcttacaaccgtctggatgtttttgccacagcatttatcatagcactataagtctgtcatacttctgttgacagtgcattttataaatctgtggcaattttacaatgtagtatgcttgttagtttccgtgtgatgccagcaatggcccagagtaaaaaggtaatcagtaaatatgataaatgtgactttaaatacaaagacagatgctttattgcaaggaactttcttgattatttttatttttgtttttatttttttgagatggggtctggccctgtcacccaggctggagtgctgtggcgcaatctctgctcaccgtagccttcaactctcgggctcaagcgatccctccatctcaccctcctgaggaactgggaccacaggcaatgcctggctagtttttgtattttttgtagagatggggtttcactgtgttgcctatgctggtttcaaggtcctgagctcaatcagtcgtcctgccttggcctcccaaagtgctaggattacaggtgtgagccacggctcctagccttgatattgattaaagaatttgtccttcggtttattttattgtaattgggtgagtaaatacttaaaaaagttgttagttatatgtggggattgggaaaagctcctagcagggaagaaccttgctgaagttactatgttactatattgctgtttagagttaatgctttttaagattaaaagtaattgctttaagtgtctctcttctaatgaaagatgttgctggtagcttatgggggcaagagtaatcattttattgtctgagacagctttcaactctagagtctgggtggtaaatcagactaccctttatctattttaggcaggccttggaagaagttggaaactattaaagatagcatggagcaagtgttttgaaactgttcacatttttccccttttccttggagccatttggttttagattaaaatcttattgttcttggtttctcatggggcggttctgttctctactgaaggaactctgcctttgtaggtctcctgaatctgagtaagactaggtaagttgaatttctcctttttcctgccagaactgagttggtcagagcttttcacagactgttcgaagtcgcagaggtaattgaatccttgtgctgaataaagacgactttagagcaagggggaagataaatacagggcactggcataggataggattttttgagcagttgtatgtagtggctaaagaagagtccatggtgactgcttgttttctttcttgagtaactggatagattgtggtgacagtggtttttgtgaacactttgtagagagtagaggattgagaaatttcagaaagctgttttaggcatcccttgtgccatttaagtggatatagtcattttacaattaacatatttctctggagtagaagaaaggctacaatgggagtgattgaggaagataatccactatcaacagtacatatggtagatgtatattagatcagggaggatgtgagaggtgatagaaggctcaagaatgaaccccaggaaacaccaacaatgaaagggcaaggaaaatcaccatgaaagatactgaagaggagcgaagtggtgggaggaacaccaggaggtagtggaatcacagaaactttgagtttgggaagtagggagcttgggggaatgatcaacagtaacatgctttagagatgtcaaggaggattaagattgtaaaactgggtttgatatccttagtaaaagcagtttcattgcagtacaagactataaataagtaccaaatgaatgggaaaagtgacagcgagtgtccgctacgagtaagcttaggtgggaaggggaaaacagcaaaagctagaagggttggagcagggatgttatgttgtgtgagtgcacacatgcccttgtattcgagttatgaggcacttgagagtgtggttaagatcctgagctctggagtcagacttcccaaattccagtctggactctgccacttgcagctttgtggccttagataagttacttagcttcagtgactcagttttcccatggctaaaatgggaatgatcaagttttgagaattaaatgctagtgcatgttaggtgctataaatagcatataataactgctgaaaagtgtaaactattattgtaattattagtaagaaaatgtttaattattaattttttatcattgacctttaaatatacttgcttcagttatattttaaactttaaattattaacaatttgggccccatgctgtgtagcaggaggaactactgttataccacttaaatttttttcctagcttctttcttccaccagtctcaactttcattaataatagtttttctgtttgtcagatacttgtaatatttaacatcttttctgtgattataattttcatgttttagttttaattttatagtttaatggtgggtccagatctcaatgttagtacttttgtcatagcttctttattcatctcttggttagctgaagttgtttttcctgggattttgtcaaaaaattttcgaaattttggcaagttaacatgcttttcttgtatttgtactcaaataatagtttggtggggtataacattccagaatttcatttttttttccttgaaacattttatgcatttgttgtttcactgttctctttattcatattgctggtagaggtctgacgccagcctgcattttgcacccttttcatgtatttttgttaaactgcactctcacaataaaacattctttgaataatcaatcacgtgtttattatttactggatttttttcagtgtctgacctactctacacacatcaagggattcaatttctttggcattcagtaattgtactataatatggcttgacattgactgctctgttaaacttcccttggacacagtatgccttttcagtcattagattcaagttagcttttattactgggaagttatatataatgttcttgaaataagtaaaataatggagatcagttaaatacatatgggctctccactgcctaccttcgttgtcttttcatatctttaacaaaaaaaaaaaccctaacacataaccaaagaaaactttatttctactttttatttatttctcttcaccattgtctctatggctcttactgtgtttacagcggcatgtgcttttctgtttgctgcttccaactgtagtattatttctgggatggtgttgcttttgcttccactttagttttgccagctcacgtttcatctcgttttgtgttatcttttctctgagctcttttattttccagagatgattactatattagatttttaaccacagttttttcctgctgtgtgataacctttttctggtgatttttcttcacttgttatttgtgtttttcttattttcattttttggtatcgtgtatagatcctgttttgttttgttttgttttgtttcattttatttactactactgttcttccaatgaggggtgtttttcttggatcatctttgtgctagagcttggtgttgttgaagggtcagggatggctggtgttctccttggggactgtgtatgtaaaatgatttttttagcctttgctgcttttcagataagaggcttagggtctccctgtagagaatcttttgactgcctcactggctagttgctccctttgagtgatgtttttcctcttgagatgtgggattttatctgcaactttttttttcttttccttcttgagaccttcttccaagaaagttcctgcttgcaatctttgcacttgtttgttgtttcccatgtcaagttggggatggctggttttacctttcaggatgtgcctgttaatttcagagaactacacatctatggcacctctgtagccatgggtatattctgacagggtcgtggagcatctgaatttgatctttactatatttggtggtctttccttatatgctttgagattacaggttactgtcattcatagcagcttacattttggtttcatattctctcttttgatctagcaggagaaggaggaaattactgtcttgactctgagtttaaaactggaattcctgtagttcttcgtaaaaatctgttccttggttgatatgtatctagttggaaatttcaggatacacaacattaaagagatttttctgaatatttcactgatcagtatttggcagttattttactttttatgtagtacagaactctgcattgacccaagaacacttgatgttagatacttcattttcataatttttttttaatcttagcaccttttattttttattttatttatttatttttcttatactttaagttctgggatacatgtgcagaacgtgcaggtttgttacataggtatacacatgccgtggtggtttgctgcacccatcaacctgtcatctacattaggtatttctcctaatgctatccctcccctattcccccacgccccgacaggcatgttgcccttcctgtgtccatgttccccttcctgtgtccatgtgttctcattgttcaactcccacttatgagtgagaacatgcagtgtttggttttctgttctggtgttcgtttgctgagaatgatggtttccagcttcatccacgtccctgcaaaggacatgaactcattcttttttatggctgcatagtattccatggtgtatatgtgccacatttcattttcataatttttattagcccatggtaactattactaattctgcattgctttctcaattgcagtcaagtaagggagaattgactacgcttatacatcagcttcaagaaaaggacaagttactcgctgctgtgaaggaagatgctgctgctacaaaggatcggtgtaagcagttaacccaggtgaagacattcttatgtacgagggatatacttcccaaatcagaagcaacaaaagattttagaaattgtccataatcagtagtttaattatttgtaatttatgtccaacaaaagtaactttcctttagagttttgggagggtagatagagctgtctctctcttttgtgatattatagcctatagttgaattatttaaaataagagtacttacagatatcctagcttcagaataacaaaagcactctgtacagaagcatgggaatttgttttaattggatctgacctagatctgttctcaatagaaacacagaatttggtgtgatcttgtttaagtctgattaatggaataagtgtgaaactcttaacataggtaatttatttatggagcttcttgtgataagtataattttttgtcaagttcttcacatctcagaaattttactttgagaggttaatagtaaaaaataccagaaaagccaatctttaaaacatcatgaaactgagagaacagaattgaaactatagaaaatatggtttaattattcctgaagtgcttgtttctctttctagggattaaatgcagtagaatacatgatgtttatttatgagtcattcacctagccacttgatgacattgtaagagtgaatggctttgtttgaatataaatcctttatgtgaatttgaagtaaataaaaaaagtcaatggaaaaagttggcaagattaattaaagttgttaataaaattagaaactttaacatagttttttgtgactatatgactatataaaaaattaaaaattaggataactaatttgataattcattgagccgcatacttatgatgtgtatacttctaagtatgttatacaggagtataacaatttgtaaagatgaatgaacaaactcaggcagccataaattatgtaatatctcaaattttgtcatacaattgc

SEQ ID NO: 6504 - DNA, 6000 bp, Homo sapiens
gctgggaggtatgatttgattggatcctgccatggggtgatgccaagcttgatacgattagatcctggatcctacaatgtggtgtccccttcttaattcagtcctcactcctcagtcagagcacttaggttcccgctgtagttgcagactcggttcatctgggcatgttcaggttaggtgaccttcaaactggggggccattggtaactgaaaaacaactcacaactttgttacataaaagttgaaccagattggtgtgatgtggttacaaaaaagctagtaagtctgagagtaatatactggctcaatacttctctatcctaagttggaaactatggtcaattttgatgaagaaattattagctatttccctacttcaattttgccataccaaagctatatgagcttgataaaccttgtaatgtcttacaaggttttaatctcttcatctgtaagaagattggattgaatcaaattactctctctccttgttaatacagataatacttttttttctgaaggcaagagtatgatctattacattaaaatgtttttaatgtatccaatatatttaaaaaaatagagacaggggtcttgctatggttgcccagcctggtcttgaactcctggcctcaagtgatcctcccaccttggcttcccaaaatgttgaggtgaaggtatgagccataattgctggctatatccaatacgttttagtgcttcttgagacatatctgtgttaggaactgagatgaaattaaagatatacaagatagagtttttgcttacagtgttatggtgggaacaaacaaacataattattattttgtagaattaatagtccaggaaagaatagttttcaggagtggtatgaccacagctcaatcaaatctgcaagggttttctatctgtctgccatcgccagtaggttgacttcattttcaggttagttcctcttgcaagattgctgccaatggcaatctgggttacaggttgacttgctcatatctggcaggaaagagagaactccttcccccagatatggactgaaaatcctttccttcagtctgattgggccagtttatcctggtcctaatggttttcaagtgtatcaattagaatagtctaggactattctaattctagcatattctagtctagcataacctagatgctaggtcatactgcattgaaaaatgcccccaaatctcagtggcttaaactacaaaggtgtatttcttattaaaaccagatgaaaatgggaggcaggctgctctaccttgtccttttttttggaagttaagccgagagaggctttaccgatactttcaagataatactggtcttgagtctggagaagagtaaacactgtaaggacttacgctggccatgaactgttctacctggaattgacacataccacttctgcccacaacccactacagactggtggctatagctagtcagtcacatggtccagcccaactgcaaggggaggagggtatctgggggtgggtgtggaaaaatataatctttttgtatgtctggaaagagagagtaagcatgataaatctcctaccatattagggaacccatttattggctaattgagttgcctttctgtagttggagttttgggtggttacctaaagaattggcagatgaaaacaaaaataaacagccctattaataaggaaggacgggagtgaatgttcaattagaaatcaatagtgtgaactatatgctgctttatcccagtggagaagacagaaatttcagccatggaggcaagtcatagggagggatagtctggctagtttcatcagtctttaaatcaatcacttcatttactcttgtaatgggaaagatttgctctggctttttaatgagtaggtatagagtttgtttaaggagctggctcaaaagtgacttaaaacacattgaatttgaaaatatagattcttagctactcaggaggctgaggcaagagtacagcttgaggccaggagttcaagacgagccttggcaacattctgcgaccttgtctctaaaaaataaaaatgaaaatatagactttttttccctatatttcatttttgtagttattgtcaatggtgtgtcaagttggctagatttatagttttagaactgacgaacaactaaaacttacctagtccaacccttttattttacaaatgagaaaactgaggcccagatgggtaaaatgattatctcaaggtcaccccttcttgctcttggcaataacaatgctgccctttggatgacttcctggaaaatcggatcctgtaagtgaaatgtagctagagcaacaattataaaacaacgagaacaattaacaattattcagaatgcttccatggctgacagtcagttggtacacgttggtagagatagaaaaatttctaaactatttggtaagtagcttatgctaagccttctgagtgcctcaaccccttgctggaactccacagatctccccaccgtaataacaggatccacctcaaaggtttgatttgagaattaaatggtggaggtaaagagttttgcatgaggcctggtgctcagcactattacactttggctattatttttattacagtcataataaaatggtagtaaatttcaaaccagtttctacatgaatgttcacaacttaggaaatgtgatagcattcacgttcattaactttgatctagctaatctctcaataaaatggccactcatgtactcactttaactttcattttgatcttttccatagtctaagggttgactccttcttgccccgggacacccgagtccccatagctctagctgatggttaagaatttgaccgaggctatatacaagaaaacaatgcactgacaaggccctgttacttgttgtataacagatcataacgattgttctgtctaatcttttgttgaacagaacttgtctttaacttttgggataagcaaagatgggtccaaaacctagtttggtgagggaggggtggagtaagaggtggagtacctgtacttacttaagcaactattacaaactggcagtgatgagcagcagaggcaagcagttgggagaagagaatgagagagcgcagcaacagggtgggacctgcagcttgtggaaaaatgcttttgacacagatactttctgatggccagtgatgtttagaaccttttgggggattccttctctctcagaatttaacctggcaagagaacgactgagttctaggaattttcttgtctggagagagtaaaataaatgtattttttaaaagctgggactgttatccacactgagaagaggcagggtataaaattccctttcataagtgaatttcctggaaattcatgattggcttggaacttaatgtgtaaagacttgttctcaaatatcagttgtttgacagagacctccagttttgggatggcagctaaatcctgagcctgccttggaaagggttttgataataatgttccatcacaggtggagaagcacattgattcaacaaagcagacttcaaaaccactgaagaattagtttctgagtgtattcaagagataccaaagttatttgttattttaacgtatattatactgttctatacaaatgcaccaaatcctgggcaaaacattcctaggacaggtttttttttttttttttttcagttggaaggaggtagggaaaataagtgctttaattcctaggattttggaagtaaaaatggaacaccagacaaaaatggaatttttaggcaaatgtaaagctttgtacttgggtatctcaaagtattatacagtgtaaactatcatgattattaaccaactagaagtagttcttttttttaaattttatttttaattttagacatgagggtcttgctatgttgcccaggctgaagtggctactgacaggcacgatgtggcactgcagcctggaactcttgggcttaagtgatccttcctgcttcttctatcttaaaaaaaaaaagttacgcttgcttgttaaaatatttttaaaatgctgtgtttaaactaagaagtaaatatccaccccacctctgacttctaaaaattatctaaagtatgactggtaagatttttacctttaatcccacataagtctaaaatttgtgttcatttccaacaaccaaagtgtgtcacttttataccagaattttgtcctgcttatacgtttagtacagaaatctcatgggagagagcatccatgcatttacaaattgttattgaattattttattgaatgatgacacccaaactgagctagaacataattctggctctgctagtacatcttctgtgtgatcttggacaagtcactctactttcctttcaattttcttttctcacagggagataatcataaaaacgactgtaaagtacagcacttcatagagtgctttttgtttaaagagctgacaataaatacgagtctcaaggtctaggaaagcctccctcacaacctgagctgcttgaggacaagggattttcttttgaatcagcagtaccttatttgtgtatctgtgatagagttcctggtacataagaaggtctcaataaatatgtgaatttatgaatattaggcagattgcaaccttgacaggccactgcctcttaaatctcctttctgtgatcttttaatatttaacatctaaaaggccgccgctacttgctttgggataagtatccccggtatgtactttaaaatgcccaagcctagagaaatgattcttgtcttaagggcaccatttcgctctcccaccgtaaagcgccccaggcttgggatctgggtcccaaggctacagggaagagtttggaacgggaagctcatcttccggccctctgattggccggctcgcactccactcacgcggcgcgcagctctgattggcctcggcggcacccctcgtcccgcgactactttgtgtgctggggcggcgcgctccggtcctcccgctcagctggcggtctgggctgctctggggcagcccttcggtccactgctctgcatcgcgggcgccgggaattttccgagtccgagcgggtaggacgcatcctagggcaaagcctctcccctctccccgtgctgttctctttcccgtactaaataaacttccgcctcagaggggctgtcgcagccgcgggtcgggagaggccgggcatcgaactcaggccctcgtggggggggtctttctcttcgagtgaatgtggaaacagctcttacaagataaagtagggcttcgctgagtctcctgggggagcgatgccattgtaggatcgcgctggaagcagcagtcaagcggccaaatgcgggctgcaggggctgagcagcagcagcgcgcacccctaaaagtagcaaggagccagcttcaaaacctctagtgcgggtgccccctagggccgccgactgagctggcacgggccggtccattcccggcgctgtagggagcacagcattctctggaggcgagtctcctcccgggatccaggatccgctcgcgccccgctcagcctccggccttcaggcggtagagggcggcctacgcctgtgtgcgagccggagccggcgtgcgcagccgctgccctgctggaactgtgccgtcccgctgtggcccgcggctctgctaggcggtggatgctgctgctacgctctccaccggcgcagcgaggaagggggcggggagaatccctggcacatgccagggtcgccgtaggtggcagcggccggcgcatgcgcgccctctcccagaagccaggaacgccgaggggcgcgctcccccattcgcgcgcgcacgccggcgctggccgaggcttccccgcctgcgctcgttgtcagagccgctccggcgcgtgcgcgcgttatctccggccgacccgagcagccggttccctcctctccaggccccctccccatcccacccccgccgcctggccccagccgacccgtcccttc

SEQ ID NO: 6505 - DNA, 6000 bp, Homo sapiens; identical to SEQ ID NO: 696

SEQ ID NO: 6506 - DNA, 6000 bp, Homo sapiens
gatttgtttctgctgaatagaaataaaaatccaggctccccatgtggtctcaattgacaccatggaggtggagggttttgttgttacatggcagagatgaaagtcctggctcctggcttggccttatctgataccactcaggctggcaagttgagaccccattatagcctaacaagtgtgagggtctatgttcctcagttgttcttcactggactgggtagatatgggaccacactctttctgtgatgtttggctggagtatggaaattgctttgtgaaagttttttgtcttcctggttctttgactagagatagcaggccttctatggggctttttgtcacattaccaatttattcaatacttagtctgagatatgcgatacaaaacaaaaacacagaaaacttattgctgtgtcattctttagatctcaaggtcctgaattagtatacattctcctatcatttcttatggttgttttatatatagtataaaaacaaccatatacataataaaaatacacataataaaatatttaaaaaatcttatgtttgttttatatatagtatctagagtttttagttgtacttaatagaaggaatagaaacaagcatgtatactctattctccctgaaacagaagtctgtgcacttgtttcaaaaacaccaaagcatttgataagtgtatgagaaatgatggtcaattacagtataggctcattttggaaatacgaaggttcccagggagctgtccagggtgctggactctccttaaagctctcagactcagtgcatgagaattttccatttctctgtcttctaatttcttcttctgtttaacctttttaaataccagcctctaactactctgctctacccttccatactcaatgtctaactgctgcctggtgaatttgtggttagttggcccttaataactagtgatgcattggctatttttgacagtaatttttatttgctatccattctagctattcgctagtctggctgaatccttgggaaattcacaacactgtcatagtcttcaattgcttgtgtcactgccacctctagccattaagttgctctgttttgtagaatggtagaaaaagtcctccggaaaaatgcaaggcagcagagaggcccctccctcaagatcctaatagtgtcagagggaaactagaattagctatgtaactaggggaaattttctcacatcatttatctatactacatttactattctttgtttttacaatatctattgtaacagaaaataaataattgaccagtctgtgttttgttttctttttctttcagtatttgcagagaaataactgtaaaacattttacttcattctattagaaatattgaaaggggatgatgcagccatggcagaaaaaggcattattcccctttaagagaaatttctctcagacatagaaaaaatacagcagtctcctattatgagttgaccttggagccaagaagtagtagttattccctccatccattccattactaatacagcaggcaaaagtcagaaagattagtttcaaaatttctataaactcgaagtaaagtttcagctgtcttcctttatctgacagtgtttttactggtggtacttttaagacttaaaccaaccataggcaactattttctcttcttgagctttatgggcatcttttatagaaactttacctagctgtcagtctattaactcccaagtatttagtttgattcatcggattgcggatatttctaaaaggtaccgcaaaaatacatgggcctgagaatcctcaagggggttggattccagtgagctagtgaaggatcttcaaggtgtttattgagcacttattccctggactgtgcatgatgctgtataggcattattaagttaaacctgacaattctctaagttatggacttagtatgtaattgatggtctctgtcttcaaagtggaaatacactctccactgtgtttatgaaaatcactaaatgactgcctggctgggtgtatgcagtcggtttctctctgattaccagtgatagattatcatgattaatcctcaccatttcccattctcctctgcaccctcccccaatttttatgatgaaaaccatcttcatctgtttgtgctgctataataacatacctgagactggggaatttataaacaagggaaatttatttctcacagttctggaggctgagaagtccaatatcaaagtgctggcaggttcagcatctggtgaggaccctgttccctgcttccaagatggtgccttcttgctaatcctctggaggtgacaaatgctctgtcctcacacggtaaaaggtggaaaagcaaaaaggtctaagttagttccctccagtcattttataaagcactagtggggtcccaaaatgccactttttattttttttgggatggcgtctttctctgttgcccaggctggagtgcaatagcgtgatcttggctcactgcagccaccgcctcctgggttcaagtgattctcctgcctcagcctcctgagtagctggaattacaggcacccgccaccatgcctgactaatttttgtatttttagtagagacatggttttgccatattggccaggctgatcttgaactcctgacctcaggtgatctgccctcctgagcctcccaaagtgctgggattacaggcgtgagccaccacgtctggcccaaaggccactttttaataccatcacaatgaggattagatttcaacagtggaaggtggaaaagcaaaaaggcctaagttagttctctccagaccttttataaggcactagttgggtcccaaaaggccactttttaataccaccacaatgagtattaaattttaacataaattttggaagggacataaacattcaattcataaatcaaaggcagatattatgctcctttgcttgaacaaatagccagtctctggcaatggaccattttctaacttgtataaagctggctggcccacataaggattcaatctataactcatacttaacttcttgatctaaccagctaaactattcattatagttaaaaaggcaatacacaatagaggaacatactcactagtttctaagttttaataatttttaatgccttgactagatcaaactagtaagatacagagcctgcattcgattccaggtttgctgaattccaatgttgtacagctttaaaaagggaattattgcatgctttaaaatggtgtttctgtctcactgcatgtggtgagtgatgaatcactgaatggatgattaactgttctgaatggtgcggtttattacacattgtacattgtgtgctatgcaccactaacctgcataggatctatgtgtgttcttctgaatattgaaaaaatgaggaaaatggtactttctatctgcccttgaggatgttatgtgtgttaataaactagcatctttgaagaaaagatccacatgcaacgaccttttcacttgatagcaagaagtctgaattagtgaaaagtcagaataagtgattacttggaattttaaaaaatcaccttcaagaacattcagtagtgaaaacaaagatttactaagtggattgatgggtcttttattgaatatataataattcttaggaaattcctatttatatgaattataagtgagtaggtgctgcccaagtgcttaaaagccgtttgttcttttaagaatctttaccattccttctaagactttggagcgtttggtgatgtccttaacaagccattgtatatagcagaggagtaaagtggaatcacacataaatggtcacatatttcaaatatgaagatgtaaacagtttagggtctactctgagcacctacttagtgtagtagagctgagcagttgaagtcatttgttctgaaatcacataggtctaatcctgaaatcccctcttaaccatgtgactttggacaggttacctagtatctctaacatcacctgtgctcatttctaaaatggagagaatactgattagacatatcttatacgatttgggggctactaaataagataatgcatgaaaagtactatgaatcatatttacaacataataaagatcagctgcttctattattaatattaacactattaaggagtaattttacaaatgatgctctctccctgtgagaggttatgggtaacaactgagtctatatttgttggcatcataagaagacaactccatatatagtattctgcccccggatttctgcttcttgtttgaggtgggagcaaagaaatgacaggttcaatccaaaatatctttgagttgttcagctaaccgtgggattgggtgaaggatttaggaaggctatgttttggatctgaaataaggggatttcaagactcctgtatttactacagaatattccaaacttttgcagctaccttgaaactatgaatcagccaataggaagaaggggccccaggtaactgctgtagaaacactgccggctttcgccctgacttcttttctgctcactgcagtagcaacttagcttcaaaatgtcctctttagtcatgcattctgatcaaagtagttatttaaagattgtggctaatagtagagtagatacccctggtatttcccagagcagagctcgcattctgggaatcttaggtccatgtgacttcctgagtcagtgattcacactgagaaaagagataggtttggcatgacacaatctgcagattcaaataaatcccctgggagaggatgaggctgctgagagtcctctttgctggctgaagctcccagtgtatgcacaaaacaccctgtcccgggccccagatgtgtgcaggtttctaattgccggtgctgcactaagatttgaagggtgagagagttgcaaaatcacgaacaccgagggcggtgttaggaaggcagcttcctgcacactgttgtaggtgttagtgagattatcaattgctccgggagagacacaggactggagggcttgaggaatgtggtggtccctctcttcgttgtttctgccccctgaggttgtgctttctcagggatatgcactctgcacttccattcctgcagtgaaattaactcgagcttggcaggtaagtctttcggctcacctttaaaaagaaaagatatgtgagctgcggtgggggtgggctgttccccatttgccttacattggatgtattttattggtgcaaagtggtatttggaagcttaaatgtggggcagaggtttgaagtagccaaatgaactctgtggccctgagagaagagaaaggataaccaaaagaaagggaaggggactcaggcatttttctcctaataaatctctaatttttcttggaaattttgcctccaggccgatgcctggccccagaacagggtctttggcatgagttatagctgtgatgttccctattttcctttttttttttttttttaagttgtcgctgcatgggagcaggcagacagaaacagggttgcatgttgtcaatacaggctgcagaagtcaataagcagccagacagggaatgaaattggaggaggcagctatagatttcttaggttatttcttgtgagtttttcagaacttgtgtgattcaggcttgtcagatactattttgagctgggctgagacaaacacattcccctagtgcaccagatattgcctgcagcctcccaatttctggaggcacctgggtcggctttcttgggggcaagggaatgtccaaggaaaggtcaggaatgagggaattggaaactatgatgggaaaaacaactgttttactgctctagaatctaacagaaatcataatgtcaccctggagataattattatgctgttagtgatcggcttgagaccagggactgtgcctcattcaattcactgcttggatcagagtgaatactcaataaatgtacaatgattaaatgttagtatcaaaatacatacttttgggataagctc

SEQ ID NO: 6507 - DNA, 6000 bp, Homo sapiens
gggtggatcacgaggtcagaagattgagaccatcctggctaacatggtgaaaccccgtctctactaaaaatacaaaaaaattagttgggcatggtggcaggcacctgtaatcccagctactcaggaggctgaggcaggagaattgtgtgaacccaggaggtggaggttgcagtgagccgagattgcaccactgcactccagcctgggtgacagagcgagactccatctaaaaaaaaaaaaaaaagctctgagaggactggctgaggcttgaggtctgtaacccggacctcagaaatcagggagaattgccttccccccttctagatacagttagggccagcctttaaccatatttcaaagtaggcatctctcatctgtttattctttcttgtacatctttctaatgcgcttccctacagattctgcttaaaccctctccttgggcactgcccctcccccccaccctggcacatatgctgttttcctacattacatgttttacatctcttcagcccagtcactcacttcagtgctgctgatgcccagtgttaagaggtaaagcggatggggctagtttatactcatctgtaattgattgacagctctttttctctgagaagaattgcatttttagagaagatttttgaacaggcttcactctgggcttgccagagcctcaatttacagactgtgttagaaaagagtaagtcttactgaattaacagtggcatacataacctcacctccctgctgctaagaagctacggctctgactccgcatctaccctaagtctcactggcatctgtcgctatgatctaatgctaccatcgtctctggctggactattgcatagcccagctggtcttgctttcttttgctcttccctcactatagcctcttcttatgacagccagagtgatctttctaaaagaggaatcaaatcacacaactttttttgcttaaactgtccagaccttttatagtgcaaatagaacaaaatttcaaactcctctttgtgactaaccatcccccatgtatgaaggcccagcagtctacctctcctgcctccctgagcccccagtccccatccatcacagtgctccagcacactggcaggagatgtagactgctgggcctcttccttttctccaacacagcagcatgtcagccctggctgttccttgtccctgatatcctccacctacagacttctgcatggatttctttttctggtcattcaggtccctgtgcaaataacacctcctagtgaggcacttcctaaccacccccatctaaagcatgcatcccttcactccccttcactcttctgccacacatatgtatctcaatgccaactttacttttttcataagctctggaaactatcagaatggatcttaaatatttgtacgttctctccactcccaccccttacttcattatgtaatttttgtaacagcagggatcacatctctcttgtcctctcctttattcctatcatctagtcctggcacataataggtcctcagtaaatacctactaggtgaaaataaaaagaaaagaaaagaataagtcttatacatttaaatgaaaataaaaaagaaatagattttaaaaaaatactattcctggtgttataggcgggtacatatctgcctccctgaaaagagaggccacacagtgtagtgatgaagtacttgctgactgcctgggtacaaaccccaactttgctacttgctgtgcaactttgggtaagttacctaacctctctgtgcccttgactcatctattgcagacctttcttcactgtcccaggagtggtgtctgcccagccaggcagaccaggttgatcggttagccctccaactgggagtctatctccaccagagaaatgatgggtaaatttaagaacaggccataggagctgtttgtgtttgtaaaaaagaggtaaaactgaacaatcaagtagaaactcttccattagctcctgactctgggtcattaggatagcaaggcaggggttacctggtatgagcctcactccagtagtggcatacagtagcaaaggttgattatagcattagaactagtttgcagggtgtattagtctattctcacactgctataatgaaccacctgagactgggtaatttttgaagaaaagaggtttagttgacacacagttccacaggcttaacaggaagcatgactgggaggcctaaggaaacttacaatcatggcagaaggtgaaggagaaggaagcacatctcaccatggtagagcaggagagagagagagaagggggagcttccacacagttttaaacgatcagatctcatgagaaccatcatgagaacagtaagggggaaatctgcctccatgatgtaatcacctcctaccaggcccctcctccaatttgacatgagatttgggcatggacacaaatccaaaccatatcatcccacccttgacccctcccaaatctcatgtctttctcacatttcaaaaccaatcatgccttcccaacagtcccccaaagtcttaactcatttcagtattaatggaaaagtccaagtccaaagtctcatctgaaacaaggtaagtcccttctgcctatgagcctgtaaaataaaaaacaagttagttatttccaagatacagtgggggtacagccattgggtaaatgttcccattccaaaagggaggaattggccaaaacaaaggggctacagactccatgcatgtccaaaactcagtagggcagtcattaaatcttaaagctccaaaataatctcctttgactctatgtctcacatctagggcatactaatgcaaggggtgggctcccatggccttgggcagctctgtccctctggctttgcagggtacagcccctgtggcagttttcacggctggtgttgaatgcctgtggcttttccaggtgcacggtgcacactctctgtgaatctgccattctggggtctggaggatggtgaccctcttctcacagctccactaggtagtgctccagtttggactctgtatgggggctccaacccaatgtttctcctctgcatggccctagtagaggttctccatgagggctctacccctgcagccgacttctgcctggacatccaggcatttccatacatcctctaaaatctagcggaggctccaaaatctcaactcttgtcttctgcacacctacaggcccaacaccatgtggaagctgccaagactgggggattacatcctctgaaacaggggcttgagctgtgccttggccccttttagccacagctggagctggagctgctgggactctgggtgccatgtcctgaggctgcacagagcagtgggagctctgggccctgcctatgaaaccacttttccctcctaggcctccaggcttgtgatgggggggtctctgaaatgccctggagacattttccccattgtcttggctattaacattcagctcctctttactatgcagatttccgcagctggcttaaacttctcctgagaaaatgggtttttcttttctaccacatggtcaggctgcaaattttccaaacttttatgctctgcttcccttttaaacataagttccaatttcagataatctctttgtgaacacatatgactgtatgctcttagggacagccaggccacatcttgaacactttgctcttaggactttcttttgctagataccctaaatcatctatctcaagttcaaaattccacagatccctagagtaagggcaaaatgctgccagtctctttactaaagcatagcaagagtgaattttactccagttcccagtaagttcctcatctccatctgagactacctcagcctgaacttcattgtgcatgtcactgtcagcattttggtcaaaaccattcaacaagtctcttggaagttccaaacttttccacatcttcttgtctttttctaagccctccaaactgttccaacgtctgcccattacccaattccaaacttgcttccacattttcaggcatctttatagcagtaccccactcttgatgccaattttctgtattaatccatccttatacagctataaagaaccacctgagactgggtaatttatgaagaaaagagatttaattgactcacagttctgtggcttaacaggaagcatgactagggggcctgaagaaacttacaatcatggcagaaggcaaaggggaagcaagtacctcttaccatggtggagcaggagagagagagagagagaagggggaggttccacagactttcaaatgatcagatttcatgagaactcactcactatcatgagaacagcaagggggaaatctgcccctgtgatccagtcacctcccaccaagccccttcctccaattcggcatgagatttgggcagggatacaaatccaaaccatatcacagggtgatcagatacactgcctacagagtgatattgtgtgtgtgtgtgtgtgtgtgtgtgtgtgtgtgtgtgtgtgtatttattttttggccaggtgtgtttccagtgtggattcagatagaaattatttccaataaccgaaagtgttgaattgtcatgggatgttcatatggttatatgtatgcttgttgctacagcagtgtgtgtgtgagtgtgtgtgtatttattttttggccaggtgtgtttccagtgtggattcagatagaaattatttccaataactgaaagtgctgaattgtcatgggatgttcatatggttatatgtatgcttgttgctacagcagtgtgtgtgtgtgtgtgtgtgtgtgtgtgtgtgtgtttcacatccacaagggggaataagtcaggatagaagggaaaaaaggggatgactaaattgacctggaatttgaatctgttattgtgtttgttgtggctaaattgagtcttctgggcctatctgtttaaggaaatggcttacttcattatttacttgaccatcccagaatagcaagcaataagtgcctgtgtgttggcaactgcagctaaagctctcctatctctgcaaacatgtgagtttattttaccttggaagccttcataggtgggctgattgttttaatgatggctgtgaggagtgagccaaggtagaaaacctcccgtggattggagccaggtctgtgtggcttggggatgggttctggctgtcctgtttacaggctgaatagcctcaggcaagtcacttagcttttttcagcctcagttttctcatttgcaaaatagacataatgagatctaccctctaggtagtaattaggattaaataagataatgacttacaaatgtggattttttttatttctctactggagttcaccagtatttgttttactttctccattgttctgaagcaaattaatctatacttgttcccccaacaggaagtttccctggtggaaagttgaagtagggcagatttatttatgaatatcctttcctcagtggttgtggggaactttcatttcagtatctgtgaattacaagttatgattgtccagactacatagaacatcctagaagctggagttttctgaaagagaaaaggtgtgggaaaggaaatctggcctgaggactgcctggctgagtctgcaggatgaagggagggagccatatatgttgagctgggctttggctggggtttctatagaaagaggtgggactgggtcaggacggcctgtggaaaatagctcctcagccaacatggagtcaagttcagtctcctcagacctttccaagctcagtcattccagttgctctgggtctccgaggccaggaaggggtccaggaagttgatgtcacaactccagagaggaagagatattgagcaactggatggagaatggacctagggaaggaggtgtggaggggagtgtcagagccaagtcccaatgaccatgcttcctgcaaagctgagcaaagctggaggctgtttgagtttctgaagcgtagtgacggt

SEQ ID NO: 6508 - DNA, 6000 bp, Homo sapiens
gtgagccacccccacccggcctacagcttgccgttttatcctgtagccacatcttttggctgttacctgggtctctagttgtaaacaaagcatccacaatgatccagaggaagcactgggtccaggggacaccctttcccaggcttccatctgtgcatctgtgcaactctgcattttcctttgggatccgtttgctccccattctcttggagactggatcacctttcattcagtcccctcctggcctccttcctctcatttggggttggagtcatgtccagcacctgaagtggaatcaattctttttattcaagttccccacttctccctgaatgtcttgacctaaagaagttccttctccttcctcaccctcaggagaaagaaatatcctgtatgcatctctcaaggaaaaaatgcttctaatcttgttttctatctttctactgagattcctaagaggctagctttttccagggcttcagatagctcttcttccttgagctatttggaaaggaaaggacttcatgtgttgcttcaaactcctgagttgctttgcaattcctctgcagaaagcctccaactgcctggtgcagaatgctgtcacagagaaactcgtgagttgttttgcaagtctcttgcaaatttaatcaatcccttgacctcagagcattcaatagtctttcctatcatctaaatcccttaacctcagtttattttcccttgagccttcacattctctacccccaaactgctcctccccagacactaaacattttccttcagatacctgggcagcactgccttcttgcccttccctagtccccagagagttcttcgggtatccgatcagcctcgtttatatgaattcagacaaatacagactggcctacatttgattcccatatatccaagactccatttttctctgtacgccttctaactagccagcatttaaaatctaaatgtattgaaaatctcttgatttttactcaatggacagtttgactaacatctcatttttcatttttatgatgcattaagatgaaaattattctgtaagcagattttttttggaaaagagaaagaaactaaaaaaatccatcagctaattaccatactgaactcctacactaaggggagataaggtatgatttatagagtcttagaaaagattagtctagtgaagagaatcgtatgcaaaaacacatcattacaatacaatgtgatggggaaaaaatgtgggcaacacagagaacggggcttcaaagttgggaagacagtgcttggaaaggctcccagcttgagctaaatgttgaaaggtaagtagattttatccaaggaacagggaatcactgaaagattttgagcagaggagtcacatgattaggttcacatttgggaaagaaaagactgaaacttgaagcagagagacaagcaggctaggcatttgtccaggccagagagatggtagcctgaactaagaatgaagtaacaaggatggagagatgacaaaaacaagaaagatttaggagtagaatcagctggacatattgattaattgactactaagggaaggaatcaagtttgtccccaaatcaaaatgaaatacgtttcaacttaaatgttcccagcattgatgacaagcagttagaatgtgttctatgtcggccgggcgcggtggcttacgcctgtaatcccagcactttgggaggctgaggcgggtggatcacgaggtcaggagttcgagaccagcctgcccaatatggtgaaaccccgtcgctactaaaaatacaaaaattagctgggcgtggtggcgggggcctgtagtcccagctgctcaggaggctgaggtaggagaatcacttgaacccaggaggcggaggttgcagtgagccgagattgcgccactgcactccagcctgggcgacagagctagactccatgtctgccttccatgtcctccctagagccccgaggggtgctgagcaggtctctggttagaaccttccccagggtggtgctcccaggatcctgctcaaaattttgcctgctctagagcagtataacttagaaagggattgggactcttgggaaatgttatataaatgcaacactttattcactcaacaaacacttatcagtgcccatgatgggctagttactgttcttggcacgggggagacaacaataaaccgaaagactctcattctcatgtgaagcagcagcagcagatttagccttctttcttaacacatattatactacacccacctgtgtgtcctctattgatgccgcgggtaatacacaatcagtcatacgttattaaatatttgagtgtctgttctgctccaggcactgtggcaggcatggggatacttagtttttgtaccaaggaacccacagtccagtggatgttcctgacaagtatacagggaatttcagttcaaactggagttccagttccccaggaggccagcatccaggcagctcctgcaagaaaagtgaggatgggactggggttgaagaagctcttggagaaagtgacatgtaaattgagactgaaagaccagttggacatagtcaggcaatattcagcacggagggagggtggagtagaatggggtggggagaatgttctagcagaaggaattaacatgtgtcaaggtctgaggacaggaaaaatcacagttgtttgtgggaactacaggttgttcagtatagccacaccatagactaggaggcaagaaatatataatagaagcaaggaccccatcatgaaaagcctcatgggccataaagagattgggctttcccttaggaggaatgaggtttgaagggtttcagacagaagaccgacatgatcatatctgtattttaggagagtcatgctgcaaagctaaaggatggattggtgaggggaataagatcagaggcaagaaaagatgattacaattcagttgtaaggattcagattgcagatgactatcatgtgcatcttggggcagtgggagtagagaaaagtagatgcatttggcatttaggaggtagaattggtaggccttggtgattaaggttgaaggagtcaaggactgcatggtcttgttggggatacaggtgaagtaaatcaaggacaacactgggtcgtattgtctgtacgtattgttgtatcatctgaattggtgtggttcagactggtcaagttgacccctctgtccttgtcaccctttctactcactcttcaacacttaagacttgctgggacttgagaaagcatcccctgtgcttttggactcttatgtctacaatggcagagtaagtaagttacctgagaagtcagccttcttcttcgtttcaatgtgcttcaactgctggcccagatcacctcctctttcctgattcccatagtgtctcttctgctcttcagcttctactctcagacagaagttctgctgttcagagagtgtgtgtgcccacaccctggaaatggaggaatgaggggcttgttctgggaatatgtctacttctgattggaagaacagtgaatgagattgaggtttcctgaaacaggaaactgttttggagttcagcttccaccaggtgtggtagagatttgcctactttcttgtaccagcctagaaacttaaattctctggccttttgttgctgactgtcaaggatcactttgtttttctcagaggagccagggcccatggtttaaataaagtcacccattaattgtgtctggtaaacttttaagggttaatgtgacacaccaaatttatatcacatacctaagaacataaaatcagaaggcttatgggagtgaggcccagtggtacttggagctttgggggaaagaaaaaagggcatctctgttataagagttcagcaagttgtgctcactttagcggcacatatactaaaattggagcagtacagagaagattagcatggccccatgtacagatgacatgcaaattcacaaagtgttccttattaaaaagagaaaaatatccgggcgcagtggctcattcctgtaatcccagcactttgggaggccgaggagggcggatcacctgaggtcgggagttcaagaccagcctggccaatgtggagaaaccctgtctctactaaaaatacaaaattagccgggcgtggtgacatatgcctgtaatcccagctactcgggaggctgaggcaggagaatcgcttgaacccgggaggcagaggttgcggtgagccgagatcgtgccattgcactccagcctgggcaacaagagcgaaactccatctcaaaaaaaaaaaagaaaagaaaagaaaaaagagttcagcaagtttaagtacaagctacccttggaattgggttataactgaaccgttttgggggaattttgcagcctgggtccaggtttatagaatttagtgaacaccaacagagcctacaagccttctggtccaagaaccaactaaacctcacaggatccacaccctgtcttccaagactgaaatatgatggagggtcaggctagccctcctgggctcagtgcagactcaacagaacccattctcatccaccttgctccatgtctcgggggacatcagccctgagaattggtgtgtgagatagcaatttttcaggcccaggctgaaaaagtaatgagtaggattaaaatagggttccccagggtggcatggcaggccaccctggatttcttggtgtccagtttttcgcttctccccgatccaggccagctgaggagccatgtttagctcatgctgaagagagaactactcagctcttggaaaatgctgagctgggtattcctgcctcttggctgagctaaatactgggtggtgattcagcagaaaccccagctccagcagctggcgcaggagctaacaggataagaaggaaggggaagagagagccaggaagggaggaggggaggggatggggcagtatgggcaggagcttagctggaagtgtttggtaaaagctgtgtgcctccaggagcactcacagccctcacagcttctctgcaccctcctcctctgctggtgtgtccttggaagagagaggcccttccggaaggctcagagcacctcctctcctttggagggggttccgagatttctaaaacgttgtaagtgcttcgagatgaaaagggctggagaaggggaaatgttactatcgtgcgataggcaagatctgtttcaaaaccacactccccactgtgcactttatagaagctgggatcaaagcgcagtttatgaggaagggctgctttgatttttttttttttttttttttgtctgttgtgtggctttttgtgggttttttttttttaacgtttttctctttcaccagtcaagttatatgtataactttatcagacaagttatgttacatgtacaataatccaggtgcggaaggactttataatgtgggcccctcacccgctctaaaaaatgtcttgaggtgggggtgggcggggaatagagaaggattctaggagggttctgtgaagctggatccgtgtctgcccactcccccacacctccaggcctctctgggtctttgacgaggaaagactgttccgtgtggcctgcgtgggcagaactggaaccttatcagagccttgggttgtgtgcgttagaggtcaaacaggcctccgtgttttctttgcctatcagcgccttttggcagccggcactgcttacctcctagatctggaaacgcctgcggttggacaggccaagccgaagcggcttttccacaattagaaacacgtgctcagttccttccacaagcgggggaggcggccaaggaactcggtgcagccaatcacagagccgagcgtagccacacccacgcccccacaggcccggcttccctgcccagcggctccaacctccagcctgggcacccagacccagagggctgctgggagggacatgcctcaccccttttgctccagctggaggggagggagtctgtgg

SEQ ID NO: 6509 - DNA, 6000 bp, Homo sapiens
caattcaagcccatggcagctcgtcggcctgccttttcctcagctcttttgtgccccaccctcagaattacagaactcatttaaggatgacaaggcatctacgattaacagcagagggtgaaagggaagagaaaactgaggaagcatctgacatcacagggagaactgagaagcaacagtggggaaggactgatcagactcccaggctgcctgcacctaaggagcagggaaggtggtagggggttgtggaagggagactaagggtttagccagaagtgtagttgcaatggtgagaaagcatattgcatgttagtagggagaggggatgggatcattaccgaaaggggagacccactctcattccagttccagagctcaggaaagcatgacggggggcagtggggtggtagcagtgacaagaggaagaacagtgtcataacagaagaggctgaaggaacgcaagataggaagttctcatgccaggaaatctgtacgggtagaggtaggattaatagtaaggagaagtgacagtagaaagagaaagggaggcagagactgttaacataagggagacggtggctctgaacgagggggcggggcaggggcgaagctgcttggaggggaggatcaaggtacaggaccctgtgctagaccccacagagaggcctgtgactccaggggggtgagaggggttagtaacaacaggaggtgctaactgcaaagaaggtggtagtatagctcataagcaccaagcaggactgcaggggatgtgctaaaagagtgaggtctcgactgtcactgggaagggggcaggataggaatggaattacacagttccaggagggcctggcccttgcaactggaagaagtgttactacaggacgtagcagtagaagggtgtgagaggagcaggagggtgtgatggtggcaaacacagcccaggtcagggggaggaaaccaaacgggagctgccctggcctgccaggaagggaagcagctggcagagtgtggcgaagggtgacgactccagaggagaggaggatgtgatgtagaggggacaggggctagggggctggagcatctgagcagggactaacttgaagtgggggaagttctgctaaatccctgtctctggacccgacagggcagcagacgccctcctaaaggcagtggcagccagcagtgtcgctgagaaggccgtggaggcagctcgaatggccaaactgatagcccaggacctgcagcccatgctagaggccccaggtgaggcatggacagctggggggagggcagtgaggcccctagggagctagagaggctcaggtgtggggaaacagatgagaagccctgcaagggaagtggggatgggaaaaaacaaggaatgagggtgcaaggaacacagggtgggggccagacctggtagtctggggagtgggacttgggaatgtatgcagtaggataatggggggtttggggtctggcggtgagaggctatgagcctgggaattccaaagtcctgggaagtgcccagtcaggaataaagctgcagccactccagcccaaggccagttaggcccctctgattctcagctatccctacccaggccgcagacccaggcaggactcagaaggttccgacacggagcccctggatgaggacagccctggggtatatgagaacggactgaccccctcagagggatcccctgaactgcccagcagtcctgcctcctcccgccaaccctggcgaccccctgcctgccggagcccactgcctcctggaggggaccagggtcccttctccagccccaaagcttggcctgaggagtgggggggggcaggcgcacaggcagaggaactagctggctatgaggctgaggatgaggctgggatgcaagggccagggcccagagacggttccccactcctcggaggctgcagcgacagttcaggaagtcttcgagaggaggagggggaggatgaagagcccctgcccccgctgagggccccagcaggcacggagcctgagcccatcgccatgctggtcctgaggggctcgtcctcgaggggtcctgatgctgggtgcctgacagaagagctcggggagcccgctgcaaccgagaggcctgcccagccggtgagatcctctgtccctgctgtgtgccctcttctcccaaagccttgcctcccaccctttccagaactgtctgatcaccgggggggctttttatctcactcggcttcctctgcctggccagtcttggaccacatcccacctcaaaaaaatagagggcgttcgagctggaaggaaccttacacacctgcaagcccaactccctcatttgacagatgggggaactgaggcccagagcacttaaagtaacttgcccaggccgggcgcggtggctcacgcctgtaatcccaacactttgggaggccgaagtgggcggatcacgaggtcaggagatcgagaccatcctggctaatacagtgaaaccccgtctctactaaaaatacaaaaaaaatttagccgggcgtggtggcgggcgcctgtagtcccagctacttgggaggctgaggcaggagaatggcgtgaacccgggaggcggagcctgcagtgagctgagatcgcgccactgcactctagcctgggtgacagagcgagactctgtctcaaaaaaaaaaaaaaaaaaaaaagtaacttgcccagggttgtaaactaataattaatgggagagccagaacatttttcccccgttctccttccatatcatttccagctctcagtttcctactccacccccacccccacctccgcactttctctctttggtgcccagaaataaaaaaggaaaagattgttccctccctaccctgactctccctccctctcccgggaagaagttgaaatagagaagaaggcagaaaaccgggagaggcggagtttgcccagaaccctctactctgattgggctctaggccttctgtttcctagcaaccacatcctcaccccttcatccctctgccttactgcagtactggctgctgctgccaatgtctgctactaaggccaggcacctcctgcctgggacacatgatatgctgatgggaggggactagagggaggaggtggaagggctgtccctgcattgaaggtgtcagaggaaaggtggggccctgcctgggagaagagggggttttgcaatccaaaacaaatgttggcgatccccctgctccaggctgtgcagggaggtgcctgagacccttcagctctgccacctcagtcagggcaggaaggtgggccctgtcctcggggactgagtctgcttccccctctgtctctctagggagctgccaaccccctggtggtgggagccgtggccctcctggacctcagcctggcattcctgttctcccagctcctcacctgaggctacttcctggcctggttctggctttggttgcgtgcctcttcacccctttgacctgccttttttctcttctcctcttcctggctgtgttttctcctatctttctttctcttcttcctttcttttctgtgctcctttgtttttttctctcgctttttctttccctgtcttctttcagattatctcatttcttctggatctgtctctgtattcctcactcccttccccatcccaaccccttctttctctagattgtttacatatgaagggcttttctctctcagagttgctgtcttctctgagacacacaaatctaagtcagaccattgctccacgccctcccaccttttctttagacctcaacttcgctgcgggtgggggtttggtgtcctaaggagactcctggaagctgaatggagaggaggaagaaaatgaagaaggagtgattgaatgtcgggcaaggcactggctgagctgctgtggctccctagcctaaggggcctgctgtccctctgaggcctagtgaaaaagctgcaggaggtgcatcctccacctctaatcttggaggctattatcttacctccaagcactgagctgggttactgcccaattccatccttccctgaaggagagaagggaagtgaaaagtagagtaactccccagcatttccctctttttctcctcatcggccagcccctcctccagccccctctggtggcatgccatgccaagagcaacgtgtaaaggaacagagaatatccaatgcagtcaagtccaccctgcccagactttgccactgacttctcccacccttctgtctcccccataatagtttatttggttggtctggactcacttgtggcctttgattaaattcctaaggggcctgaagaagacatttctactgcagagggttagaggcacttgagcaaggcccccacatcccaactctgggagttgtggtgggaggaggcacttctgggggataggaccagacaagataacaggagctcacatggaagcagaagctgtgacaagtttagtagtcccaaaatgggttatatcccttccccctttacatcagaatcttgtgaaatgggaaaacaacagaaggaggggatcaaagatagctgatctcacatgcttcccaggcagggcagaggtgggagtcaaacccgggtgacaggtgggtggagagccctgtttgaggttgtggctgatccctctctggtattagtttttcccctgggagcaggaagccctaggaagaggggactgcagggtccccaggggatctttcctccctcccctgcatgaggcagaggcaagctgcctgccaaccccctccctcaaggaatggccttgcccaggaatgcccaccacacataccctcttctttttttctagtcaaactcttgtttattccttggcttgcctccctccttcctcccctctcaacctttacttctgatttctatttcatggaatttgggattgaagttaaactacaacagtgccgccaacaccaagtcttgcaggaaaaaaatacaaagaaatttaacaaaaaaaatatattaataaaaaagttcaaaaaaggggggggattgtcatctcctttggggtgcgatggcttcaaatccaaactgaggctctccgggtggtaaggatgtgcgaggaggcctcttgaagaactccaggcctatcatgctgtctctccgctaaagcctgaggcccgaggtcagaggattcaggaaggctctgcagtcggcccaggagggcggggtcccgtggtggaggcggggagagggaaggaccgcacggagcaccaacccctgctcggccccgtaccaggaagcgctggggggcagaggagcggagttgaggcagaagccaggtgaggctggagtcctggggtaggcaggctgtcgctgccgctgccgctgcctgagatggaaatcgggggaggaagctcgcggaagaaacagcggagggtcgtggaaaaaaaagcaatggctgagctagggatggggtaccaggtagggggaggaaacggtagagagaaataggtggggctcccgcgcatgctcaataggaaggggcgccggtggggtgcggacgcatgcgtagtgggcttctcgggcggtggggtgggcgcggaatttggagacccacttcgggaaaggtaaaatgcgggcgcaattttagggtacctgtgggacccgggctcttagggtcttgacacaggacgggcctgggccgaaagcccaggcacgcccgaccagagagtgtttctccactcccggactctgccagtcaggatggtggtgccttcgctgaagcttcaggacctcatcgaagagattcgcggggccaagactcaggcccaggagcgggaggtgatccaaaaggagtgtgcccacatccgggcctccttccgcgacggggacccagtgcacaggcaccggcagctggccaaactgctctacgtccacatgttgggctaccccgcccactttggacaggtactggccaggaatacctccctcctgagcttgatgaaggctagtg

SEQ ID NO: 6510 - DNA, 6000 bp, Homo sapiens
atagctctgtgtgtcagatccaaggccctggtggccctcatgaggggatctcctgatccgagagttgcaaagatccatggaagaagcgtggttttccaggatcacacagtcactcactgcttcccttggctgggaggcaggggggttcccttggctttgtgttgcttctgggtggactgtcaccctgccctgcttttcttcattctccgtgtgttgtttccccaatcaatcccagtgggagaacctggatattttaattgaaggtactgtattcatttgcccctttcgttcctctccatgagtgccagggaccgaagctgattctattcggccatcttggccgctccatatacctacttcttcaggattaacttttaaactagttttcagggccttccatgaccaggggcctgcttccattttcagttacatcaaccctgcatcattcccaataatactccagttaaacgtttgactttgtccttctttgagcagaccccttcctttttcacttccatatctttgcttttggagttcactcttgaacaatgcctgcctttcaaggttctgtttctgttccaagatcaattcaagtgcagcttcctcaatgacctcctctaagtttctctagaacattgtacaacacaattgcacctagcccattctgttttgttttctttttattctctaggagcggcagggaatactgtgagtcataagcacagtaatggtaattgggacctagtgatggtggaaatgggtaaaatcaccttgagatggagtggagtaagaagagagcctagggaagaactctgggggagaccaacatttcatatctgagaagagatgagatcaggagagctaggaggaaaatctgaagaaagtagggttgcagacaccaaaggaggagtggacagtgtgtcaaatactgttgagaagacaaataagatgagaactcaaaaacgattgggaagttgccagtgaactgaggcaagcagtaagggtacaatccagagtgaaatgatgtattcagtagaattcagataaatcccaaaatcttggtggcttaacataataaaagcattacttttcacttgtagtacaatccaagtttagattcaaggccaaacttccatttttttttaaacagctttattgagatataatccatatactatacaattcatttaaatgtacatttccatggtttttagtatattcacagagttgtgatccatcactgcaataaattttagagcatcttattaccccaaaaagaaaccctgcacccccttttctcaccctccaaatctccccactccccataactactactcttctttctttctctataaatttacttattctggacatttcatatgaatgggctcacataatatgtggtcctttgtgactgacttatttcactgtttttaatatttagccatgttgtaacacatatcagtacttcactcctttttatgtctaaataatattccattgtatggatatattacatttttatttatccatttatcagttgatggatattagattgtttctaccttttctggctattatgaataatgctgttatgaacattcatgtacaagttttttgtgtggacatatactttcatttctcttgggtagatacctaggagtggaattactggatcatatgatgactctatgtttaaatatttaaggagctgtcagacttttgtccaaagcagttacaacatttttcattcccaccagcagtgcataaaggttccaatttctctaaatcttttccagaacttgtttttatctggctttttgattatagccatcctagtatggttatgaagtagtatctcacagtagttttgattcgcatttctctggtgaataatgatgttgggcatattttcatgtgcattttggccatttgtaaattgcctttggagaactgtctattgaagttctttgcccatttttaattggcttgccttttattattgagtcgtaatagtttgtcatatattctagatatgagtcccttatcagatatatgatttgcaaatattttctcctgttctgttgattgtgctttcactttctctatggtattctctgaagcacaaaagcccagtttattagtttttcttttgttgcttctgtttttggtgtcatatctctgaaacgatttctaatccaaggtcatgaagatttacttctatgttttcttctagagttttatgattttagctcttatatttaggctattgacccatttgaaggaaattttaaaatacaacatgaggtaggggtttaatttcattctttttcttgtggttatccagttcacttttcctctccttctcatgccccaaaatataacttgccacatctcagactgcatcccccttttaaaaagatgtagcatgatatagtgtaaaacacatgaaatagacatgcattcaaattcaggtcaaataatttctaaccatgtagttatatcatctagggtcctagcaagaaaaaagtgacacactcaaaggttgtgactgaagagagtttaaagaaggggctatttacagaagtgtaaagatggccaagaaaaccgacaaatgatgccaaagccttaacattagggagctgttactacccctagacctaaagaccaagaggaaggaacagcgttcttgaagcctgctaagagctggaacttcagaagcagcagagggtataaatatctcaacatctccttcatcccagcccttgggcttcctattggctaaaaacaaccagaaaccaaagggaaaggaatcctgggtatgctttctatgtaggtcagcctctcagagcacaggagagggcagagaaagaaaggaatggatccaagcgggcagagagaaaaccactacagtgaccttggacaagtagcttaatctattgtccctagaccctaagttccatatgtaaagtgcgtgacacccagcagaggatgctgctgctactagcagtgctctggaggtacagaatatttcttaatttacaccactccttatcttatttctccgtgctctagtcaaccactcagaagtaagctggtgaaactttcacacttttccgctgtctgaaatcatatcaaacaactatgtgtacaacttattaaggaactaactcctgtaaaaatagagttgaggatcatagaataaatttttaaaaacatgattcatatgagagataatgaagtagttgttgttttaagttactaaaaaagggggggaacccatagatcatatccttcctctgcttaaagccctccaatgtcttctaatctcactcagaataaaagccccatgagatcctacatgatctgccccaactccttgggtcactgatctcttatttcccaacttattcactttgcccagacataatggcctgcctatgatacctgggaatcagtgcagctcccacctctgagcctttgcattatctgttttcctctgcatgacgtgcttttcctctggatatcttcatgagtcactctctcacctgcttcaagtgttaaatataggttactttctcaatgaggcctacacggactcccctatttaaaattgcaaactcatctccaccctgacccagaacttgtgtttccttaccctactctacttttttccataacacttaacatcttctaacatactatatactttacttatttactatatatattgtttgtatattgtgttccctccactagagtataagcagagactttgttatctgtttcattcgctaatatatcccaagtgtgtagaaaagggcctaacacatattaggttctcaataaataacagatgaatgaatatggataaagaataaaatcaattctgattcataaataattaggaaaatctaaaatgttttatccatttggggttctcccacagtcctaaagccacagatccctcaaagctttggataaatgcaactagttattgctaacaaaaggaccagatcccactaagatattctaaaataaagcccttctgtatggcaagggaaaacgagactcttgaacactgttgtcatggtgatcccaggtcgtctcatctatgggagggaaagctcagcaagattgccagtgtagcctttaggccatctggataaacatcaggcagaaggcaggcattcatccagggaccaggagtgactctcaggttttgttcttctcgagaggaagtgaagagaggagaagaaagggaaagaatacagtgggctgccactatggaaagccttgcaggatagtccattatggtaatctgcacagcctgcttggtggaattggcagaagtgatctcttacattgctccacttagttgcaaaaaaaaaaaaaaaaaaaaaaaaagatactgattcttattggaaatataaagctcagaagtcaagttgtgtccaaggctcaaaactacctgctttgtcttgctaaaggagaggatataaacagcaatggacgaggaataatgggtgattttcagatttgttgatattcgtgggcccaattagagtgctgtatacatcagattatctgataaaatctgtgaaattgaaaaagttccctgagagaatgaatcagaaattaaaacgatgacttgtagaatcttctctgcattgaaacaggaacaccaactgagattctgttgctaagatattgctgggtcattttttaaaatagctagctgaagatagagaggtctgtaaaacactaattaattgggccataacagtaattagccttttagttcaggtggcctgtctttccagcatagccctggaaacagattatttttgtgctaatgagatatgtgtttctcaagcaacgacaaaacatctcgcctaatggaattttgttttatccctcctctctctgtccatctgtctgtccgtgtgtgtgcctccgtggctctccttcgctctgtgggacgacagaaccatctgctgcagaatcccaggggaaaggcagcatctccgaggatgagctgatcaccgccatcaaagaagcaaagggattatcgtatgaaaccgccgagaacccacggccggtgggccagctggccgacaggcccgaggtcaaggccaggtccggaccgccaaccatccccagccccctggaccacgaggccagcagcgcggagtcgggggactcagagatcgagctggtgtccgaggaccccatggccgcggaggacgcgctgccctcaggctatgtgagctttggccacgtgggcggcccgccgccctcgcccgcctcgccatccatccagtacagcatcctgagggaggagcgcgaggccgagctggacagcgagctcatcatcgagtcgtgcgacgcctcctcggcctcggaggagagccccaagcgggagcaggactcacccccgatgaagcccagcgccctggatgccatccgggaggagactggcgtccgggccgaggagcgtgcgccaagccggcggggcctggccgagccgggttccttcctcgactacccctcaactgagccccagcctggccccgagctgccccctggagacggagccctggagcctgagacgcccatgttgccacggaagcctgaagaagactcgagttccaaccaaagtcctgcggccacaaagggccctgggcctctaggtcctggcgccccgcccccactgctgtttctcaataagcaaaaaggtaaaggatcccaagcagggatgcttggttagtgtcctccctctgggtgctctgagcattcagcaggggcggttctggctcagccctggagtcatccccatgctgatcaaacagttgaccagagaacggttccaggggggatgggaggagatgagagaattcagatctgcagctgggacagaagtcggtggcagaaccgcgtgctcagggcaactcaggactggctgaacccagcctccctaataatgagcggttttgtgtt

SEQ ID NO: 6511 - DNA, 6000 bp, Homo sapiens
cattctcgggatggctgtcatcacttaccaggcccctgagttatcaccctacatgtgataactaggtgtgataccaccttctcccagccgcagagggagacggaatatttccacaaaccaattggtccacttgttttcaatctggcaaaactagctgagttaggaggaacaagaggaggaaagcattgtccctgaagctctgaactgaagtctggctgttaacctttttgttcaccaccaaaaacaaaatggtagctgggcacacaagccacagtttttggaaatatctgccccttggggcctcggaccacctgcagtcaccaccttccctcatcccagttctctgagggaactgggcacctcaggagggtgctttattccctgctcagccctgcccttcccctcttgggatggtgcaccatggtgtttacggcacccctacaaggcagctctgtcttctcactttgaaacctcagcttacagggccacagctgtcacttgccatttgggcttcccccaggtgaaagggaaggccagggtgatcaagttgactagcggctttgattcccctggactggaatgtgctcagtaagccacagaaacaggagctgtcagagcagaggcttaggagacgagcaggcgagttctcgtgggtgatccatcatgcaggacttgcgctcgtgatgaatgcggagatagtactgaacctgaatccgatcaactgtgttattcacagtattgacaacttccttcctggcctctgacctgccagtgatgagcctgtgttgtctgacttatattcttggcatctgtcctcaaaacagactgcagcttgggaacccagaactctccctcgattaggcaagcccaggcctaaatgattggtgttgtcggaaacccatgatgaactgataggatcagagacccatgtcagacagtttaaaaagccatgaagggaagagagagaggaaagaaatagaggaaaaagaaaaaggttttgtatgagatgctctcttcaggttctctttccccagtctaccaggcagaattttgcagtgtggacctgatagtgtatcttgactttctctttctcctgaagaatgacttagacttttgctttattaagcgttgttaagaaagaagaaaaatgtgtggcagacaccagtgtggcctgcaaagccttaaatatttactctctggcccttttcagagaggtctgcagagacccgatctgtgtccagtgcttagattttgtttgtggaatgaactgatgacttagggcagtgatcctcaaacccgagcatgcactggaatcacctggcgcacttactaaaatacagatttctgggcccacccacagagttcttgattctgtagacataggggagaatgagcatttctaacatgggggtcccacgtgatacagatgctgctggtccagatgtcaggttggccttagggatttaccaggagcatcattctgtggtcagaacatagttaaatacatagataagaccctgagggtttctacaagaggcacattttaactaatcagtgggatcttttctaatggtgcagaaaccctgggtataaaccttatcccagtacactatttctaattagcagtcaactcacccaccacagtccgtgactgctcatgtcggtgctctgtgtttgtcccaaggacatgctaaatccaggcgtggtggtgtttatgtagcagacagatgtactgggcattttccatctctcttggaaaagaatgactgaagccttaccagctatgtgacactgggcatgttgtatttaacctctctgaaattcccttacttgaactggagggacaatagaagtacctactgatatggtttggctgtgtccccacccaaatctcaccttgaattgtagctcccataattcccacgtgtcgtgggagggacctggtgggaggtcattgaatcgggggagcaggtctttcatgtgctgttctcatgatagtgaataagtctcctgagagctgatggttttataaaagggaattcccctgcacacgttctcttgcctgtcgccatgtgagacgtgtcttgcttccccttcgccctccaccatgattgtgaggcctctccaaccatgtggaactgtgtgtccattaatcccctttccttttataaattactcagtctcaggtagtatctttgcagcaacatgagaacggactaatacacctacatcataggtttattgtgagaataaactgagttaatatttgtaagaagtttagaatagaggctgcatatggtaagtgctgtgtatgtgttaattaaatacacttttgcatgctgagtgtccctgagaatggcagggtaagtaagaaaaacaggctcatgcaaacacacacacacacacacacacacacacacacacacacacacacagagagagagagagaaccagaaaataacatatgttatcctccctggacacctcgctttaagttcataaattgcttccctccaggtaaaactggttagcattgatgcagcagaaatagcagatggcaacccttctttggttcttgggctgatatggaacataatcctcttcttccaggtaagatcatttcttttccaaaacacacaatcatgatcttgtgtctgctgagcagccacagaagagagtggggccagattaagggaggcagtgaggcttagtttatggcagattttatcttttctactcactgaaaaagcactagaagaatctggttgctaaagtgtttgagtctctgtgattttaaaagcggtgcaagttctctagaagagaatatctatcctcttgggtctggaagagttaaatatttacttcaaaaaataactttgttctaaagtgtcacaagaaccggggaatactcctgaccaaaactggaacttggtagagttactttcctgaaatcactcagtgttccttagaggtgattaaagagcttgcactaaagatgcctgaggaagaagaataacaggcgagaccttattgttctgttctttgcaacttcagcctctaactggaaatgcagatttgatagagggagaactggatctgtgattggaataagaagatgacattttatttttattttattttttattgttatactttaagttctggggcacatgtgcagaatgtgcaggtttgttacataggtatacacgtgccatggtggtttgccgcacccatcaacccatcagaagatgacattttaaattgtgctcaagttcatttccctgtcagaaggagagagctggtatctcattttctagagcccacccgcttttggaatagaaacttgtggttcactgttcgattaccctcccaagagtgaaagtgatccacacgggcatgatttgcttggattttggcgcaatgcctgcatttcagagaagcatgagcacaaacaaggtctggagacaatagttcctgttctgagtgaaccatgaacttaaaaaaaaaaaaatactgtctctctcagagcctcagtttccatgtctgtgaaatgggagcagtggtcataataggtggtgagcatcaaaagaagccatgtgggctgggcacagtggctcacgcatataatcccagaactttgggaggccatggcggcagggtcgcttgagcccaggagttccaacatcagccctggaaacagagcaagaccccatctctacaaaaaacaaacaaaattagccaggcatggtggtgtgtgcctgtaatcccagcaacttggaaggctgagtttggaggattacttgaacctgagagttcaaggctatagtgagacatgatcatgccactgcactccagcctgggcaacagaatgagatcctgtctcaaaaaaaaaaaaaaaaaaaaaaagcagcagcagccaccatgtgttatacatatgcttcaattactgctacctgttattaaacttcctcagagattctggaaacatcccgaagatgtggtaaaagtcaagaccttaaatccaccaccgtagggcttcatttatttatttaacaaatgtctattgagtttctccaagatgccaggtgctgaaagtaaaaggccctgccctcatgaccctttaggatcacagacaagtcaatcctatatggtagaaggtgatgcaagagctccaagcaggggcagctagctcagatgggggagtgcagtaaggaaaacttcctggaagaagtgacaccagagctgggttttgaaggatgagtaggagtgcgctagacctcctactcatctttcaaactaagttagacgtaacctactgtgtgtgtgaattgcctgagggtggtattgaaacagattctgattccagtagctctggggtagagcctagggttctgcatatcttacagaagtcctcatgagaggagttcactgatggagggaagggacatcgaggcagcaagggcaggatgagcagaagcaatggggcttgaaagagctcagtgaagtctgggagtgatgggcggtgagaggaaaggggcggcagagttgggtcaggaagacctggtgtgaagtgctggctggagctggagagactccaggaaaagacggtcctccctatagagtgtaattacgtgtaccacaagccacaagaaacggacaggccatcacaagtactgcctgtcccctgccacagccatcagaaagggtttctctgcattcagagaagcaatcctgcctgagccggtccctccagccatggtccatatggccacccgccagacaaggggcttgctgagagggtgggtctgttgctggggtctgaaatgccattttccttccagattaaggagctcacaggcaacctcagcagaaactctccatcttccagcttgtcccctggctcagggggcacagactcagactcatccttcccacccacacccactgcagagaggagcgtggcaatatcggtgaaagaccagaggaaggctatcaaggccctgttggcgtgggtgcagaggaaaacgagaaagtaagccgcagcccctctccccacactacttcatttaactagctgctttcaggcagaggaaaggagaattagtatttattaaggtgccagttatgtatgtgcccattgcttcatatagaatatcagaacagggggcaggcgcggtggctcatgcctgtaatcccagcactttgggaggccgaggcgagtggatcaccaggtcagggatcaagaccatcctggctaacacggtgaaaccctgtctctactaaacaatacaaacaaaattagccgggcgtggtggcgggcacctgtagtcccagctactcgggaggctgaggcaggagaatggcgtgaacctgggaggcggagcttgcagtgagccgagttcactccactgcattccagcctgggcaacagagcgagacaacatctcaaaaaaaaaaaaaaaaagaatgtcagaacaggaaaccctgcatttttctggttttgcagtacacacaaaatgcagtttgcagaatgtttggtttgcacaaagctgataagatttgaatacagatcagaggagccttcatcatgttgcctctcaacatgggcatgtctcttggattctaatgacttgtgtgcatttaagcttcagggtatcttccagagtctgtacctactttaaaaatagtaataataaaggctgtaacatactcaaagttaggtcggaccttccaaaatcgagacgggaactggagccaagttccggccctgtttcaccccacaccggcagcagagtgattttagcagttttgtatcaggcctttttaccagcagcaggcccacagcccctggaccatgggcacaaatgccagaccagtgtggtggaaaccaaaccaactcggggccgccccagctcctcagcgtacagactggttgagatcctggtgaatcatttacctttccaagccccaactgcaaatagtatcctatcacacactgcc

SEQ ID NO: 6512 - DNA, 6000 bp, Homo sapiens
tactgaaatctaagggagtattgctagtaaatggatgtgtgttttctgtttttcaaagtttgtgttaaattgttaatttaacaagttgacattttcttgtacccctgagtttgtcaaaattaggtacatgaattgccacttctgtgttggtataacagtactaacagcattgcttagccacaaaacttgaggtgaacttgccgatatactgctaacatcttaactgtgttttattattggacttctgagataaggagggcatggtaatgcagcagcagcagcagcgctggagacattgaacccgtgtgaaaagagccaggacactggaggccagcagatagcagtgtcagtctttccttctagttttgccacttcgttttctgtgtatacttggctcagtttcctaacttacttgagctgtggtttccctatctatagaatgggaataaatacctcatggggttgttgtaacggtgagaatttgtgaactgccaagtacagtggttggcatatattaagtaataaatggtgattattggctttttatttttcgttgttggtttttatctgtttagatttctcattctgaaaaaaaagactgaaatatagcagattatatttgtgaatgaaatgctgttaaaatccagatctctcaatttttaataacctctttcgcctccaagagaatctattttatagccttccagccttcccctttgctttgatcaactagctcatacaattcatgtaaggttgttttgtggcatgaatgtttggccatgccaagaaagacataggacacagtgggttactatgggattcctaggtagatttgaaacatgttaattgtattaaaccatagagaaaaaacgttacactgcagtggaaagtcctatgagtgttattgggcctcgtttaaacatcacatgaaaagctttttataatacttctatatttgctctgtctttaatcttctaatgttcaatgtacctgaaatcatgtatgtattcttggtttgtgtctttacttttgaatgctttcttctttgtcacatgtgcatagtaattattttaaaagctggcctatttgatatatatactaaaacatggaaagtgggcgtctttattttctcattcaaacttctaaacattgctttttatttttttgctaatatgcatattttcccattgaaataattttgcagtaaccagcatttaaatgcagtgcaaaatactgatgaagtaaaaaagcaaaaatctttcaataatggataaactgaaatcattctttctaaaaatgattaggaccttcgggagaaaaactgggaagcaatggaagcattggcatcaactgaaaaaatgctgcaggacaaagtgaacaagacttccaaggttgtaatgctaactcctagaaacaatccactgaacagagaaaatctgcagcttgtcttaaaatcagactaaagcatttacttttactgcaatttaaatataaaatctccttatccatatttatcatctctatcatctctgcttttttcatctactccttgaagctttaattttgggcatgctgatttgttgtgattacctgattgtttgggctttgttgagcacaactttaagctgaagagtctcagaagaccgatgttaacctcttgtcagacaatatgcgccttttgggttggttaagataactttcatgaaaactttgaaccaaagaaatctaggtgaattaacaaacacatttgaatatgtaggatgtgccataaactacgtgttttggagggcacaccaagatgtctcagataaggtagagaaatgatcaaagtcttaaatacaggaaaggcatcaactttgggtgtgttgcttggaatggttccttagaggtggtggactgaaacttcatgtattactggctagcaatgacacatggcatgtttagatgaaatattactatcaagggataattctcttgaccagagtatgtaaagtactcctgaaatatatagccccctctgtcttcagaacaatggaggacattctccttgagctcaagttgtaccattgggtgtgaagatttctaatgaattgtaatagagaagttgtttttaaagattgagaaaattgaatctgccagtccagttaagtattttgaaaattcctgtcaagtgtaaatgtgaaacaggggtattgaattttgcagacaggtaaaagaaagaacctacatgattaattttagcactatgaaaatattttgtgtgccatggtactctattgaatctttaatataagtcttagtgacacctgaaggaatgtttaagcataaaatagttctgtaaattttttttttttttagcaagtatacgtttgtagttacatttcctgtagcttagtggatttgtatttaactatatccctatttatctagccataattttcagtaaaggttaaattcgagatagctgagaggtatattgggaccagagagtaggaaaatctaggtcagataggacatttcattattatttcactgggagtagttgcaattgtacagtcatttctgtcagcgatgagggttttagtgtggtttctggttgtttatattactttgtttttgatggttaagagccacctttttggttttatttttttagtgggactgggtatgtgggtgctaatcacaccattcctacaagaagttacatgctacttgccataggcatttttgcattttatgattctaaaagaaagaatttttgtgcataatgccttcttgcatagctaaagatctacagagaatagaattgaaagtcttctatatttcaatggaatttagacagtccttagatagcatacgtgtaaagggatgttgattgacccagtgccataaattatgttgtgatgaaaaggaactatgtgaaacacttttagtattttaactagaaataagttacggtcagcttacctaaaatgtaaagaggatgatatatgctgtctttacaggattatttttaaaggctaaatactcttgaggagctactgaaagaaactcttatacatttcacttaaagatggtatgcaaattatagttcagttttcaatattagatctttcccagatgttaaagtggaatggaaattgctgtctataaccaaactactgtgtcagatgaaaactacttagctaaaattgttaataccaaataaaagtaacttcccatgtttgtggctcttggttatgttagatactttgttcttttagttagtctttttttttccttggaaagttttcaaaaagctgttcctcagtgtctcttttcctaaccggttttctttaaagattagtactttggtcaaatgataagaattacctcttaatgtccttgaaatagcattaattattttccttattttatgcagttaggtgtattcctgaaaattagtggacttcattgaattattgaaaatatcctattaaaacacctattgtaaaaatactgctgctgatctttaacagctttttgtgtgtatggaaaatggcaaaatctgtagctgttgtgtaaattttcatgtgattagattttctaaaattgaagtgtgtagaccttgaatcagtgatagatttcaaatttcacatataaatgttgggggaaagatatggttgagatgtttctagcttgcttgccttcttgtcacctgttgaactttgtgactgttgtttttagatgattttcttggcttggtttagatgtgcatttttataggggtcttttttttcaagtcttgtggaggtagttgaaatgttacatttttgtttttggtgcgtgataagtcattaccctaattttgacaaaccatggttttgagtttataattgatatccattagacttggatttaatatcagcacatttagacttagacatttgtaatatttgtaaatttatagcagagtccatatacaagtgtcagaactagtttttatgatgtgtggcattagtgaagtaatatgccatcagttgctccttgttctttctttttcccatttatgtcatccatcagattttgatggtcctccttgtttagcataaatacttcacatgaccttgaagttggaaataagagagttaccattttaatgccatgatgttatatagtccatcagtgatgcattttttaatagagatataccagccaataaagctcagttgtgttcctccaatgtgtattttctactataggtagtttataaagttttagctataagaaatgctttttgtgtgtctgattttgaattgttcctggacaggcaaatcacttgatttctaaatgccagggaaaatgtccatattgtcagatattgctaaggcattatttgatatttaggatgctttagagattttgcagattttttcttatgggagcattttaatatcttaaagtgggaaattttaatatttgttagtattaaaaattttttttaaactttttcttcccgtagaattataaaacactatagtttttttcttttctttttttaaaaacattctgtgatcttgtaagtttgatttggctcatcttctgctttaggaaaggcagcaacaggtggaagctgttgagttggaggctaaagaagttctcaaaaaattatttccaaaggtgtctgtcccttctaatttggtaagactaatttattatttttttaacatgatgacattattcaagaaaggtgtgaataagcaacatcatttgcactccacttggtttcagtagagtgctgatttcttgatctttcctattgttaagctggtgcttttcagtaaagattaataacttggttcaaaactcatttctatttacctgatactattgtttctataaaattttatatatgagacattagaggattaaaaacatcatatttgggaaagaaatgttttttaatgctaataaaaccaatatggtaacattcttaatggctttatttaaaacttaattttaagtgattgcttcttagttttagcaacacttccttaatgtacttgatactatgaactaggctctttacattttaaaactcaagatttttggtcatctattaccttcttcaagcagaaatcttacagataatatagaacaacttggtttacttgaggtagtacatgttctcctttgttcagagaattaataattatttgagggcagagaaagtcagtgaatgtgcatgtgagtttcctaaaatagagtgtagggtctttttttttttttcttatttaatggaaaactgttcaacagtagagagacgagcataatgaggcctgatgtacccaacatctctccatagcacttatcagtacatggcacgcatataagcaatcttcttttacctcccaccttgcattccctagattattttgaaggaactcaaacatcagagcatttcttctgtaaatatttcagtacacatttctaaaacataagcatttctttttaaaaagtgtgatattacacttaaaaatacattcttaattttgtatagtatgcatttctccagttgtcataaattgtctgttttattaaataataacttactgtagtttgttttaatcaggatccgaataaggtcagtatgtaactggtttgagacatctcttagatattttttaatcctcgggttccccgactctttctcagcaacaccccacctcctttaaaaaaaaaacaaaaacaaaacttagtggtttcctatgaagtttcccacagtttggatttagttgactgcatccctgtggtgttagcatgttcctcttttctttatgtatcttttatgtatcaaatctgtaatcaggaatctgattcctggtcagattaaggctcagtattttgggggtagggtagagtaggggcaagaccacttcatgggcggtggtgtgcactttcatgaggagattcgtaatgtctgcttgtcttcctttggcccattggaacttatttaggttt

SEQ ID NO: 6513 - DNA, 6000 bp, Homo sapiens
gagaacaggatctatcctaatgcataaaaatggtttagctatgaataaacatcatttaatagggctgcaatgtatacaacatttactatatgtcaagaattgtactaagtgctttttgtatgttgagtcatttattttatacaaccccatgagctaggggacatcatcccttcttatagatggaaaaaccagagctcagagaggttaagtaacttgcccaaggtcagattgtaactgagcactgtttaatgtgcatagaggccaatggccaataccatggcactggcttttgagaaaataaaagctttattgcaagtcaaccgcaaggagacaggaagatatgctcaactctgtctccctgtgcagggcttgttttctttttcttttcttttcttttcgtctctcgctctctctctttctctctttctttctgagatggagtcttgctctgttgcccaggctggagtgcagtagcataatctcggctcactgcaacctccttctcctgggttcaaatgattctcctgcctgagccttccaagtagctgagattaaaggtgcccactaccacgcccagctaatttttgtatttttttagtagagacagagtttcaccatgttggccaggctggtcttgaactcctgtcctcaagtaatctgcccacatcggcctcccaaagtgctgggattataggtgtgagccacagcgcctggcctgggccaggttttataagcataaagtcatgagatgtgatctgattggatcttgcaatgaggtgatgctgggaggtatgatttgattggatcctgccatggggtgatgccaagcttgatacgattagatcctggatcctacaatgtggtgtccccttcttaattcagtcctcactcctcagtcagagcacttaggttcccgctgtagttgcagactcggttcatctgggcatgttcaggttaggtgaccttcaaactggggggccattggtaactgaaaaacaactcacaactttgttacataaaagttgaaccagattggtgtgatgtggttacaaaaaagctagtaagtctgagagtaatatactggctcaatacttctctatcctaagttggaaactatggtcaattttgatgaagaaattattagctatttccctacttcaattttgccataccaaagctatatgagcttgataaaccttgtaatgtcttacaaggttttaatctcttcatctgtaagaagattggattgaatcaaattactctctctccttgttaatacagataatacttttttttctgaaggcaagagtatgatctattacattaaaatgtttttaatgtatccaatatatttaaaaaaatagagacaggggtcttgctatggttgcccagcctggtcttgaactcctggcctcaagtgatcctcccaccttggcttcccaaaatgttgaggtgaaggtatgagccataattgctggctatatccaatacgttttagtgcttcttgagacatatctgtgttaggaactgagatgaaattaaagatatacaagatagagtttttgcttacagtgttatggtgggaacaaacaaacataattattattttgtagaattaatagtccaggaaagaatagttttcaggagtggtatgaccacagctcaatcaaatctgcaagggttttctatctgtctgccatcgccagtaggttgacttcattttcaggttagttcctcttgcaagattgctgccaatggcaatctgggttacaggttgacttgctcatatctggcaggaaagagagaactccttcccccagatatggactgaaaatcctttccttcagtctgattgggccagtttatcctggtcctaatggttttcaagtgtatcaattagaatagtctaggactattctaattctagcatattctagtctagcataacctagatgctaggtcatactgcattgaaaaatgcccccaaatctcagtggcttaaactacaaaggtgtatttcttattaaaaccagatgaaaatgggaggcaggctgctctaccttgtccttttttttggaagttaagccgagagaggctttaccgatactttcaagataatactggtcttgagtctggagaagagtaaacactgtaaggacttacgctggccatgaactgttctacctggaattgacacataccacttctgcccacaacccactacagactggtggctatagctagtcagtcacatggtccagcccaactgcaaggggaggagggtatctgggggtgggtgtggaaaaatataatctttttgtatgtctggaaagagagagtaagcatgataaatctcctaccatattagggaacccatttattggctaattgagttgcctttctgtagttggagttttgggtggttacctaaagaattggcagatgaaaacaaaaataaacagccctattaataaggaaggacgggagtgaatgttcaattagaaatcaatagtgtgaactatatgctgctttatcccagtggagaagacagaaatttcagccatggaggcaagtcatagggagggatagtctggctagtttcatcagtctttaaatcaatcacttcatttactcttgtaatgggaaagatttgctctggctttttaatgagtaggtatagagtttgtttaaggagctggctcaaaagtgacttaaaacacattgaatttgaaaatatagattcttagctactcaggaggctgaggcaagagtacagcttgaggccaggagttcaagacgagccttggcaacattctgcgaccttgtctctaaaaaataaaaatgaaaatatagactttttttccctatatttcatttttgtagttattgtcaatggtgtgtcaagttggctagatttatagttttagaactgacgaacaactaaaacttacctagtccaacccttttattttacaaatgagaaaactgaggcccagatgggtaaaatgattatctcaaggtcaccccttcttgctcttggcaataacaatgctgccctttggatgacttcctggaaaatcggatcctgtaagtgaaatgtagctagagcaacaattataaaacaacgagaacaattaacaattattcagaatgcttccatggctgacagtcagttggtacacgttggtagagatagaaaaatttctaaactatttggtaagtagcttatgctaagccttctgagtgcctcaaccccttgctggaactccacagatctccccaccgtaataacaggatccacctcaaaggtttgatttgagaattaaatggtggaggtaaagagttttgcatgaggcctggtgctcagcactattacactttggctattatttttattacagtcataataaaatggtagtaaatttcaaaccagtttctacatgaatgttcacaacttaggaaatgtgatagcattcacgttcattaactttgatctagctaatctctcaataaaatggccactcatgtactcactttaactttcattttgatcttttccatagtctaagggttgactccttcttgccccgggacacccgagtccccatagctctagctgatggttaagaatttgaccgaggctatatacaagaaaacaatgcactgacaaggccctgttacttgttgtataacagatcataacgattgttctgtctaatcttttgttgaacagaacttgtctttaacttttgggataagcaaagatgggtccaaaacctagtttggtgagggaggggtggagtaagaggtggagtacctgtacttacttaagcaactattacaaactggcagtgatgagcagcagaggcaagcagttgggagaagagaatgagagagcgcagcaacagggtgggacctgcagcttgtggaaaaatgcttttgacacagatactttctgatggccagtgatgtttagaaccttttgggggattccttctctctcagaatttaacctggcaagagaacgactgagttctaggaattttcttgtctggagagagtaaaataaatgtattttttaaaagctgggactgttatccacactgagaagaggcagggtataaaattccctttcataagtgaatttcctggaaattcatgattggcttggaacttaatgtgtaaagacttgttctcaaatatcagttgtttgacagagacctccagttttgggatggcagctaaatcctgagcctgccttggaaagggttttgataataatgttccatcacaggtggagaagcacattgattcaacaaagcagacttcaaaaccactgaagaattagtttctgagtgtattcaagagataccaaagttatttgttattttaacgtatattatactgttctatacaaatgcaccaaatcctgggcaaaacattcctaggacaggtttttttttttttttttttcagttggaaggaggtagggaaaataagtgctttaattcctaggattttggaagtaaaaatggaacaccagacaaaaatggaatttttaggcaaatgtaaagctttgtacttgggtatctcaaagtattatacagtgtaaactatcatgattattaaccaactagaagtagttcttttttttaaattttatttttaattttagacatgagggtcttgctatgttgcccaggctgaagtggctactgacaggcacgatgtggcactgcagcctggaactcttgggcttaagtgatccttcctgcttcttctatcttaaaaaaaaaaagttacgcttgcttgttaaaatatttttaaaatgctgtgtttaaactaagaagtaaatatccaccccacctctgacttctaaaaattatctaaagtatgactggtaagatttttacctttaatcccacataagtctaaaatttgtgttcatttccaacaaccaaagtgtgtcacttttataccagaattttgtcctgcttatacgtttagtacagaaatctcatgggagagagcatccatgcatttacaaattgttattgaattattttattgaatgatgacacccaaactgagctagaacataattctggctctgctagtacatcttctgtgtgatcttggacaagtcactctactttcctttcaattttcttttctcacagggagataatcataaaaacgactgtaaagtacagcacttcatagagtgctttttgtttaaagagctgacaataaatacgagtctcaaggtctaggaaagcctccctcacaacctgagctgcttgaggacaagggattttcttttgaatcagcagtaccttatttgtgtatctgtgatagagttcctggtacataagaaggtctcaataaatatgtgaatttatgaatattaggcagattgcaaccttgacaggccactgcctcttaaatctcctttctgtgatcttttaatatttaacatctaaaaggccgccgctacttgctttgggataagtatccccggtatgtactttaaaatgcccaagcctagagaaatgattcttgtcttaagggcaccatttcgctctcccaccgtaaagcgccccaggcttgggatctgggtcccaaggctacagggaagagtttggaacgggaagctcatcttccggccctctgattggccggctcgcactccactcacgcggcgcgcagctctgattggcctcggcggcacccctcgtcccgcgactactttgtgtgctggggcggcgcgctccggtcctcccgctcagctggcggtctgggctgctctggggcagcccttcggtccactgctctgcatcgcgggcgccgggaattttccgagtccgagcgggtaggacgcatcctagggcaaagcctctcccctctccccgtgctgttctctttcccgtactaaataaacttccgcctcagaggggctgtcgcagccgcgggtcgggagaggccgggcatcgaactcag

SEQ ID NO: 6514 - DNA, 6000 bp, Homo sapiens; identical to SEQ ID NO: 694

SEQ ID NO: 6515 - DNA, 6000 bp, Homo sapiens
cagtataaattggctctgggtgcctgggtgtccgtgcttgttcttgtttggaaataaatatgtcccacccacctcaactctgtttcttttgccttacagttcatatatgatgaacaaattgtgtggtaagtttttcaagtgtagttttcattgttcttttttgttgttgtttccagtatccttatttgttgggttccctgaatcgttttaaaaattatttttataaacttaagcttattaacttgtgaaagtgaaaaaaagatattctaagcagtcatgcctttctttatcctgtcaaagtgagaaaaattgtttcccttaatagtcccagcctgctaggtatcaggatatattataaagcaaaaattctgaaaacagtatggtattttgcaaagggatatgcataggccaatatggaatgcagtaatgggcctatttctggaatgggggacattgcagagatgtcataataaggcagtgagttaggaatagagtcttgaatgctgcagggacaactgggaatccacacagaacaacacaacatcagatccctacctcacaccttatacaagggtaaactccaggtgatttaaagatattactgtaaaactgagactttttagaaaatgtcaaagaaaatatagagactcatctttaagacactgaggtaggaattgatttcctaattaagatacatagccaggcatggtggctcacacctgtaatttcagctactaaggaggctgaggtgggagaatggcttgcgcccaggagtttgagaccagcctgagcaacatagtgagaccccgtcccccaaaacagatacataaatcacaaacttctgaggaacaggttgatgtttccactctatttgatagcatgggaatgcatcttacatttgtaactcataaaaattttcttttgattgccaacgattcagaatctgcgtgcattctatgtttttttttttttgagacccggtcttactctgtcgcccaggctagagtgcagtggtgccatctcggctcaagtgattcatgtgcctcagcctcccaagtagctgggactacaggtgcatgccaccacacctgtctaattttttaattttttgtagagatggggtttcaccatgttggccaggctggtctcgaactcctgggctcaagtgatccacctgccttggcctcccaaagtgtctggattacaggctgtgtcctgtatgattatttatggaaagagagtcagacaatcaggccgaggacatcagccacctgccctgagcagctgtgtgctatgggcccccagaaacctggttctggtcctctcctggcccccaatctgctgtgtggccccaggaaagcctctgaactcttgggtttcattttcgtcatctgtagacagggttgagatggcagtggttccatgatctggaggttagcaaaggaagagctcccaaaacaactgtagcccatgctggacacatagtgggctttggtttatatgtgtcaagtgaatgaacaagctaaagcttgtgtgctgctccaggggcttgtggtcagagctacagaaatccccactgctaatgggattgggtgggatgcaccagagggtagtaatggttgcatcccaggaagaccccagccttccatgggcagcataaggcctgggaggctcctgtgccacctgccgcatattcagtcagctctcaggccctacttccgggactggggcccctttcctcccacacccacagcttctctggctcctgcccagaatcttgggtgatcacagggtctctcagggtcgagtttgtgtgacttcaggccacgccactagcctccgtgaatactgggacatggtggccctagtccctcctttttctaggaagctgagggaaccccacctctgtcctgcagacctctatagttgagaagagacccctcagcttttctcgcttgaacatcaagagggctgctggtggcaagacagccacaggctgggggatctctctcacatgcctgggttctgggcccggcactaggggcgggggaggtaaagacatcccgcccttccccacttctggacccctcattcccagccttcacctgccccgggccccgagctctaaccgcaatctcctttctctctttgaggtgggaaggcctggtgctcatcatcttgtatgtgttttatattctgatcatgaagtaagtgccctttctcctccccggggctgccgacgccttgccccactgcctgctacagccttttgtgacagcagggagaaaaacatctgtcagatctttgtccttttaggccagccccagctctctggtagacaccctgctgggggacagctggagtaggggaggggtgtcagatgctgttccgggggtgccgtccacactgaggccaggggagtcacgctggtggctgatgtgtggaccacaaggctgctctccagacaagtagcatgcaagggcctctttcccgccctgctctgggcagcttctccatgccccagggtaaccactcacttgtgctgtctctagaagccttctgataatttaataccactcttttcaaaaagccaggcaggtctgccccaggcttcataaaatgccacttctcagggccagtgcttggtacaactgcagcaccactgatagtactgaggatgcaaactcaggctatgccaccttgagcccctcgagaagctacccaggtcagaaccatctcaaaactacccatgaggaatactatgcagccagaaaaaggaataacgttctgacagtctaccacatggatgaacctggaaaacattatgctaagtggaagaagccagtcacaaaaggacaactattgtctgattgcacttacatgagggatctagaagagccagattcatagaggtggaccagaggtcagtgcaggcggctggggagcaaagaaggaggaattaatgattagtgggaatagtgttgtttgggatgatacaaatggtttgggaaccgtgctgatggttgtagaacaatgtgaatgtaattaatgccactgttttgtgcccttaaaaagggaaagtagttagaatggttaatgttatgacatatatttttttcccactacatacacacacacacacacacacacacacacacacacaaatccctactcatgagctgagccatgttcaggttcatcttcctcctcataccgcgatacgtaattaaaaagacaacactctgggttttatgaggatataaatcccacatttatataaaacatttataatgttttataaagatgggtgataaactatcagactgcaagagcattgtccttaaatgatctccactctgagtgcctttcagcgagagcccgcctgaggttctttgagatggagagactcttccctcaggggtgatggcagtgctggctgtgagtgtgcaggaggtgcccgtgagcatcctgggagcaagatctgctgctgggggagaggggacaggcctggtaatgccccctgcgagcctgcccagaggcgaggccgagcttcctttattaggacaggctccagtaagtaggcctcagtcattttcttaggtgaaagttctctcatgcctccaggaagtccaccaccagctcaataggagcaggtgccaccagacaacacaatgctcccaggtccctgtcaggaaactgtcagcccagttgaaaagctgaggctccacacctcccctgccacccaccactcctgggctgtgctgactgcgtgcagggatggggtgtgatccacccgctgcccagttggtgggactcctttccattgccctgacctcctgcctcccctcgcttccaggtacaatgtgaagatgcaagcctttttcacagtcaaacaaaagagcattgcaaacggtaacccggtcaacagtgagctggaggctggtaatgatttctatgacggtagctatgatgacccttccgtgccattgctggggcaaggtaaggctgagcagacaggagtgggcagaaatgtgtcctggaagccactctctcctcttttgtgtacacacacacacacacacacacacacacacacacacacacaccctctcacaatgtcccccctctaaattgtcactctcttacctttgaccacaggtgccctaagagaggagggagagtcagtatgggagatggggtttgcttaggtggggcaggggtggagggaaactacaccaggaaagagaaaaaccacagccacgtttctgggcgctttcccatgccttctgggaaaggcgtaaggcctgcttggctcttcagaatgcagtggtatccctgacccctgtaagggcccacgacaggcagctgaggagctggggcagcagagccagcctgggcctccctgcggtttctcaaatgccagacccagtcctggatggagaacggctctggacaaagcatgggttctcgggctgggaactgttgcccggaggaagaacaaggccaggaaaggcagacatgaagctgagcaggcatccccaggccagcctcagacagccccgccggggagccccttcccctggggcagcagcctcgtctccccagcggctctttggcccccttgtccgggaactgggggtctgggcctccagagccatctgctgtcgtgtcttactgaattctctgaatcatctgggcctgaccgatggcttccttggaaacctgaataatccaagaccaatgaccaggcggctccctttgttggggcagctgccgggaaggagagagcgttcactctagcccagaccagtaggagagcaggggctggttcttgcaattggtatggaaaaacaggtctgacctccacccacagtgttgggcaaggccttcaccaggtgagcgccttgcactggtgtctgggggctctttcccccgctttctccatggcctggggctaatcacctcctcttttaggtgaactcttttgtgatgtcactggtgggatggagtggtctcagatgtgtctgggacatctggggtgcagaatctgtatttctgggccccctctccagtcatcatcctggagccgatgaaggcaggggcttcctcccatgtgcattttgggagtctgttctgccctgtctcaggtaacccccaagagggaggagtctctccgtatagaaggaggaaacctgccagggtggcggggtgcggtccaggccacagcctggctgctgaggcccacccacaaaggacagagctgaggagctgatgggcatggagtttgattcgtgtgtcgtgtttcataaatgctgagcagactaccccaggggaagcccgtttccaggacaacctcagaaggggaaggagccatgagggcggctgtgtcggattttagctctatggacgcagtggccccgagacggtccccacacacagcctggtccccacacacaggctggcaggacagaggctggttgctgccctgtcgtatatatggtgcttctgggtcctctgggccttcatggtgaagaagagaagtattgtgtgctgagtcactcaggccagtggcagatgcccatccaagagccacccaccacctgtgccaacccaggagacctcccaggaccctgcaggaaacattcctcattcacagcatgggggcctcagctcctcaccttcccagagcaacccaggctcccagaggcccccgcctacacagtgccttttctggcactgctgtgactgtctccatcactctgtgcctgtgacagtagcacttccttgcaagtttattttctcccaaatctctttaagtccaggacattttctggaaaactggaagactggacacaggactgcccccaagcactggggaaggagggagaatcccatcttcctgcagcttttatcagagggaatgcatttagataagggccaagggagaaaacagtcctcagaaagtgtggagggaagtggggtacaggcctggacgcctgg

SEQ ID NO: 6516 - DNA, 6000 bp, Homo sapiens
tgatgccggcagactagttaagaggttattttagttttctaaaattaagatgtaggcctgaactatggtagtgacagaagaaacaaagttgagaagtatgcaaagtaagaatgacacgaataacctcactatatagaggtgtggcagataaaggagaagataggattaaagctgatctcccaagttctgagttaggttggggttggcaaactgcaacctgtgagccgcatgtagcccacttcctttttttatgcccatgaaccaagaacactttttgcattttaaatggttgggaaatagaataatattttgagaaatgtaaaaatgtaaaaaaaagtcaaaatctcagtactcataaagtgtttttatatgcagctacattcattcactcattcataatatgtttatgactggctttcatgctgcagtggcagacttgaatagttgtaccagagaccatatgtcctataaggtctaaagtttttactacgtggccctttgcagaaaaagtttgccaacttgtgcttggcagatggttggtagcactaaaataggtaatactggagagagactagatgtgaattgagaagagaacacttccagtttgtgtttccaatgcctgtggggccatctacgtagagcaactcaggatgcagtagggtatgtaaatgtagaaaagtagattcagaagccttaagcgtgaaggtagtagaaggcatgggagtagatagctcatccaagggaagtattttaattgaagccccaaccctgagaacaagcagtattcagtagaagcagttcccaaaggataccgcaaaggaatatttcaagtgtaagaagagaattatcatgggaactgataggagataatttattttatttatttttattgtggcaaattacagcatgaaatttactattttaacaacttttaagtgtgtagttttgtggtggtaagtacattcacattcttatataatcatcaccactagccaagtccagaactctttcatcttttccaaatgaaactctgtacgcattatacactaattccccattctgcctgcctcccccttttcccccgtccctcccccttcccccatatcttgacaattacccttctactttctgtctttatgaatttgactactctgggaatgtcatataagtgaaattatacgatatttatctttttgtcactgccatattttacttagcataatggagaggagataattttaagaaaggggtagagaccaaaagtataaaatgccaaagagtagtcaaataaggagtaatgagtatttgtagaatatggcatttgggacactgggggatctgagttaatcctttcgtggaatgaaagagataaaaatcaggttgcaattagctgaggaatgattggtagaaaaggaactaagagtattttgtcaatatgtaaggaaatggatgtgggatgctgggaattatggtgatggggaagggttttctcttccttcccttcccttccttcttttccttcctttccttcccttcccttccttcttttccttcctttccttccctttctttcttccttttcttctttctttctctctttctctctctcttttctttcttctttctttcctttttctttcgacagggtcttgctctgttgctgaggctcgagtgaatggtgtgatcttggctcactgcaccttcgacctccggggctcaagctatcctcccacctcagccccagagtagctggaactacaggtgtgcgccaccacacctggctaattttttttatttttttcgtagagatggagttttgtagagatgaggtttcaccactttgcccaggttggtctggaactcctgggttcaagtgatactcctgggttcaagtgatccacctgcctcagcctcccaaagtgctgggattacaggtgtgagcagctgcaccttgctgtttattttttaagatgatagagacttgatcatgcctataggctcagtagggttgaaaatagctgaggaatgggaaaggaggagtaagtacattgaagagctggtgtagtggagtaagaaagctagaaaaagttattggtgagagcgttatatgtcagactttaaatttttagtggtaaaacattctgggaattactcagtgattgcatcttttccgttatgttcattgtttgccacaattattttttttgtttgtgtttaataaagatgaccaggataaaaaggtggaaactctcatggtaccatcaaaaaggcaagaagcattgcccctccaccaagagactaaacaagaaagtggatcagggaagaagaaagcttcatcaaagaaacaaaagacagaaaatggtgagatgtttagatatgtatttttataatgctaattctagagaagtacaccagcacaaggaccctggaatctcacacgctctttagctcccagtttaatgtgtgctaatgacaactgtaatactaatgcaggtctaaaattatctttagccttatgactttatagcgctttgacagatgggcagggtgtacatttgagatgaaaaagtttatataccatttacaaagggcaaagcatttataaatattcttaactcagttttgaaaaaataaatagcatacagaccatagaagaaaaacattcttgaaattttgtgctttttaatatcacttaaaggtaatgcttaaggacattagctagatctggcattagcttacatttccaattaattcctaaacagaactcacatgtgtatatggcaagcatcagattataagagatggagcaatcttatttgttcacagttttccagggaaagcttggctgtgaaatttgtgaagactaaacaacttaaaattatgacatatcaattaggtatgagagaaatattacctgaatatatttgttaaaattaaatgttaaacaattttaaataaaagaagagacatatataagtaaagaagctctttttgaaaggtaggaatgaaaagaaaagagattttcatctgggtgtggaagtttgtatctctaaccagcagacattaggcttgatgttcaaactcttcaaattcttcccattaaaattaggaacaaaataaagaggcttccttcttccacttttaatgtattttggaagttttagcaagtgtagatgtgccatggaaattagaggcataactcttcagaaatgagaagctatctgcaaggagcactgtggtttttgcacttagcaagtacaaagaacttgtttaaaaattatcaactacagtaagttggtaaagtaccaacataaataaaaactaatagttttccttgagcactaattaagtggaaataattcttatattaaaacaaaaattaaaggagacttaaggatgcataaaaagtttttagataccattagaggagatatgctatacacttttagatgatttaaatgatttactataaaataagactgttgagctggtacggcttcattagaatgagtgttttgacttgttaaatgacgaaataggaatttaaaaccaatttgagctaccagtaaatgtttcaaaagaactgcatttatcattaaattatgcttgcatgtcatttactctgttttgtaaaaattctaattatgattttgttgaacttaaattgcagtcttcgtagatgaaccccttattcatgcaactacttatattcctttgatggataatgctgactcaagtcctgtggtagataagagagaggttattgatttgcttaaacctgaccaagtagaagggatccagaaatctgggactaaaaaactgaagaccgaaactgacaaaggtaatatatgggatttatagtctttgttgtactataaaaacacatttctgagttctgatggagtcatagatttcattttctcatagaaacaatgcatttcaaaagaatcaaatccttgtggtagaagacttattggtagtcttttagtccagcctcctcagttttgtagatctggaacttgaatttgactttttaaaggtcctacagctattttgctatctgatgattatttcccagctactactgtctcctgtgaggtttcttggctaattcataactgttgtttttttttaatagactgttttttttagagtagttttaggttcacagcaaaattcattggaaagttcagagttcccacatatcccctgtttccacataagtacacaactaccttttaaaacttataatttagctgaagtattaaaagcccgaggctcctttgagtctgatgggtggcagctctttttaagaagaggttgttaatgcctaatacgagaaccttgggaaaataagggtgggtgggtcaggaggtgcttgatgcatggatttttaaaatgtcaggatggtttgcatatatttgatcttcatagaatcagatttcctttttacaattatcttagaacttattttctcatgtgtggaatttggcttaatatctctcaggattattttgtttttcacagttggttgtcagtgtgcaaggattattaaagttcattgagattattgtgaatataatagtgcagatattagcacatactagacacctaagtgatttttttttaaagtgagggtatattggcattttagtattttgcagtttgagcaaacttttagctaatgtaattattccgtattatagatgataaaccctttttttcctcttgactggagtatttgttttatttaacctgaagtatatatctgttttctttcggttattgactttctgggccgtgaattcttcatgcttacctttgctgaagttattatttgtgttttttaaatgccaactctttgtttgtttgtttttttcaaattaagaaaatgctgaagtgaagtttaaagattttcttctgtccttgaagactatgatgttttctgaagatgaggctctttgtgttgtagacttgctaaaggagaagtctggtgtaatacaagatgctttaaagaaggtaagcgtgttttttgattatgggcatattcatgaccagtcattagaagttcaccaaacaagactttagccagagcaattaatatctactcccatccttaacatctcagaacatacatctggaatgccttcagaaattactttatatatcgtattagtctgttttcatgccgctgataaagagatacccgagactgggtaatttataaagaaaaagagtttaaatggctcacagttctacgtggctggggaggcctcacaatcatagtggaaggtgaaaggcacgtcttatatggtggcagggaagagggaatgagaatcaagcgaaaggggtttcctcttataaaaccatcagaccttgtaaggcttatttactaccacaagaataatatgggggaaattgcccccatgattcaattatgtcccaccaggtccctcccacaacacatgggaattatgggagctacaattcaggatgagatttgggtggggacacagccaaaccataacattccactccagaccctcccaaatctcatgtcctcacatttcaaaaccaatcatgccctcctactggtcccccaaagtcttaactaatttcatcattaattcaaaagtccacagtccaaagtctcatccgagacaaggcaagtcccttccgcctatgagcctgtaaaatcagaagcaacttagttacctcctagatacagtggtaggcattgggtaaatacagccactccaaatgggagaaattggccaaaataaaagggctacaggccccatacaaatctgaaatccagtggggcagtcaaatcttaaagctccaatatgatctcctttgactccatgtctcacatccacgtcatgctgtttcaagaggtggattcccatggtcttgggcagctccgcccctgtggctttacagggtacagcctcctttctggctgctttcatgggctggcgttgagggtctgtggctttt

SEQ ID NO: 6517 - DNA, 6000 bp, Homo sapiens
gttcacattttcaaagaatcagcaactctactacttgattgtggaaacaatattgaccaaatcttgctgaattttatcagggttctctcagattcaaaaaggctcttaactcttcctaaggtacttgatggtatgggttctgctttgatctaaaaaaagaccagcttgctgtgacacatttgaatatgaaaggtacttcttctggaggtaacttgtagtttcccttctcagtctttcctttggaatcattttatagactgcagcttttgtttctagggctctgcttgacaggacagataatatccctggaaaatagttttagagttgatgtttggtgactgcattattcaaggctcatataaattgagaactggttacattgcctcttgctatgtaggataaaagcttctgttcttggaattacccgtcctctctcttgtagacaaaatagctaggaaaactgctcagactgattttgttatatgaagaactaagatgcctaggaataatttagcaatagctcatccaaattaaagcagagttgaactttagaatggaaaaaaaaaagaaattatcatgttagctaaacatttgctgtctggatctcccagttaaaaagtggcataatacttctcaagttagccagtatagaacatgttccacattcagttgtgaaaatggctggtagctattatcaagtatgattttttaaatgttccatgcctgatattttgtaattgttgaattcagatatccctctactcagtggcttttacttcataatgaaaaagtagatttggttgtaatatataaaattgtgaagatagatggaattaatagagaaattagagtttttcttttaagataatttgagtttcatcatagaaggtaagctcagaatgctgaaatgctgctggaataaatgaactgttttacttttttcataaagatattgatgtatgcaactttgaattcagagatgattccatttgcatgttctgagtgatgaataagtgaaagaaataaaagactgaggaataaagaagtgaaagaaagaacttatacactgctggtgggagtgtaaattagttcagccattgtagaaagcagtgtggaaattactcgaagaacttttactaccatttgacccagcagtcccattactggatatatacacaaaggaatataaatcattctaccgtaaagatacatgtatgcatatgttcattgcagcactattcacggtagcaaagacatggaatcaacctaaatgcccatcagtggtagaatggctaaagaaagtgtcatacatatacaccatggaatactgtgcaaccataaaaaagaatgaggtcatctcctttgcagggacatggatggagctggaggccattatccttagcaaactaatgcagaaacagaaaaccaaatactgcatgttctcacttataagtgggagctaaatgaagagaacacatggacacagatgggcaccacagacactggggcctatcggagggtggacaatgggaggagggagaggatcaggaaaagtaactaatgagtactagacttaaaacctgagtgactaaataaagtgtacaacaaacccccatgacacaagttaacctgtatacaaacctacacgtgtacccttaaacttaaaatttaaaaaaaaaacaaaatgcaatgttaaaaaagagaagtgaaagaattttttaaatgtaactgcttaatttcacattgtttacagttcttctcaagtaagcttcttttcactgcaatctccttaaatatgtacatacggttttctttggattcactgaaatccaatccagcaggattctttcctgaataagaaacgtactggatcagtcctgacctattttatgatttttggtacttgtcacctgtaaagagaagttaagggaacatcaccaccaaccccacagaaatacaaaaataccatcagagactatgttcataacactctgtgaacacaaattagaaaacctacaagaaaaagataaattcctggaaacatacaacctcccaagactgaaccgggaagaaattcataccctgaacagaccaataacaagttctgaaattgaatcagtaataaaaagcctgccatccagaaaagtcccaggaccagatagctaaattctgccatacgtataagaagacctggcaccattcctactgaaactattccaaaaaattgaggaggagagactcctccctaactcattctgtgagggcagcatcattctgataccaaaacctgggaaagacacaagaacaaaaagaaaacatcagtccaatatccttgatgaacatagatgcaaaaatcctcaacaaaataatagcaagccaaatccagcagcatatcaaaaagttaattcaccgcgatcaaataggctttatccctgggatgcaagattggttcaacatacacaaatccataaatgtgattcatcacataggcagaactaaaaacaaaaaaattatctcaatagatgcagaaaaggctttcaataaaattcagactctcttcatgttaaaaatcctcaacagactagccatcgaaggaacatacctataaatagtaagacctacctgtgacagacccacagacaacatcatactgagtggacaaaagctggaagccttccccttgagaaccagaacaagacaaggatgcccactctcaccattgctgttcaacatagttctaaaagtcctagccagagcagacaggcaggcaagagaaaaaaattaaaggcatccaaataggaagaaaggaagtcaaactacctctctttgcaggcaatatgatcctaaacctagaaaatcccatattccctacccaaaagctcctagatctgacaaacaacttcagcaaagtttcatgctacaaaatcagtgtacaaaaatcagtagcatttctatacatcagtaatatccaaggtgagagctcaatcaagaatgcaatcctagtcaaaattgccacaaaaagaataaaatacctaagaatactgctaactagggaggtgcaagatctctacaaggggaattacaaaacactgctcaaagaaatcagagatgacacaaacaaatggaaaaacactccaggctcatgggtaggaagaatcagtatcattaaaatggccatagtgcccaaagcaatctacagattctatgctattcccatcaaactaccgatgacattcttcacagaactagaaaaaactgatttaaaattcatacagaatcagaaaaaagcctgaatagccaaagccatcctaagcaaaaagaacaaagctggaagcaccgcattacccgaattcaaactatactgcaaggctgcagtaaccatggtatgggtaccaaacaccatggtacccataccatgtatcaccataccaaacagcatggtactggtacaaaaacagacatatagaccagtggtacagaatggagagtccagaaataaagtcatatacctacaactttctaatctttgacaaagctgacaaaaacaagccaaggagaaaggactccctattcaataaattgtgctgggataactggttagctatatgcataagattgaaactggaccccttcctttcactatatacaaaaattaagtcaagatagataaaagacttaaatgtaaaacctaaaaccataaaaactctagaagaaaacctagggaataccattgtggatataggccctggcaaagattgcatgatgaagacgccaaaagcagttgcaacagaaacaaaaattggcaaacagaacctaattaaagagcttctgaacagcaaaagcaattatcaacagagtaaacagacagccaacagaatgggagaaaatatttgcaagctatgaaaggtctaatatccagaatctataaggaacttaacaaggaaaaagcaaccttattaaaaaggcaaacacttttcaaaagacagactcttttcaaaagacatatacacagtcaatacgtatcaaacatcactaatcattagagaaatgcaaatcaaaatcacagtgatataccatcagaatgaggcaacagaatgctgttattaaaaagtccaaaaataacatgctggtgaggctgcagagaaaaggggcatttatacattgccagtggaaatgtaaattagttcaaccattggaaagtggtttggcagtttctcaaagaacttagagagctactatttgaccccgcaatcccgtttttgggtatataaccaaaggaatataaatcattctgctataaagacacatgcaattaacatgtttatcagagcactatttgcaattgcaaagacatggaataaacctagatgcccatcagtggtagactgaaaaaagaaaatgtggcacatatatatcatggaatagtatgaagccataaaaaagaatgagatcatgtcctttgcagcaacatggatggagctggaggccattaccctaagcaaactaatgcaggaacagaaaaccaaacacttcatgttcttattaaaagtgggagctaaacattgagtacatatagacacaaataagagaatagtagacactggggcctacttgagggtgaaaggtgggaggagggtgaagatcaaaaagctgcatatcacttactatgctgattacttggggtgtataccaaaccccacgacacacaatttatctatagaacaaacctgcatgtgtacccctgaagatgaaagattaaaaaaaaaaaagagcagttgacctctctgtacaacttatctttattttcatttctctttctccctgacagaatcccaaggactgcagcaaagccaaaaagctggtgtgtaatatcaacaaaggctgtggctatggctgtcagctccatcatgtggtctactgcttcatgattgcatatggcacccagcgaacactcatcttggaatctcagaattggcgctatgctactggtggatgggagactgtatttaggcctgtaagtgagacatgcacagacagatctggcatctccactggacactggtcaggtaaggagcttgtgcagcatatgagatctctgggctgtttcactcaattaccagattattagatttctaggtagaccttcatggaacatacttatcttttcctctggatccatgaatactatacattatccagataaaatctagaagaacagtattttatcttaaaagtattttattatgtatttcatttctgatgctcatttttatgtgaatttagcaaaatcactgagtttttttcagggagcataatttaatcttttaataataatgatatgactttcactctataagatgatttcacattattgaactcattttaatatgaagtaatcatcatataaagtagtccagtttatatggactactatatatgagtagcatgagcatgcatgagaatcatctggaaggtttcataaaactccattttctgttaaggaaggtctaggctgcagcctgagagttttaatatctgacaaaagttttaggtttagggaccgtgctttgagaaccactgaggtggaccttgctggtaactttatcttcaaatgaagcctaatttgtttatgtgattttaattgtattcaggaaacatttaatgaatagtaatgtgactaaggtactatactaggcattataagcagatagaaacatcagtaagaaatttcctttctctccaaggaagtggtgaaggagtagaatatagaaaagaatttcttaccgctagtctagtgcttttctttctacaatcatgatctttaagatctaaagttgggctaccttgttaaaattgtggctttattgttttgtaatcttggacaagttacttaacctaggtcttagtttccttatcagtaaaatgaagagtaatcactttattgaattgttggtagattaaatgaaataatatatgtaatgcacttagtactgatatatg

SEQ ID NO: 6518 - DNA, 6000 bp, Homo sapiens; identical to SEQ ID NO: 695

SEQ ID NO: 6519 - DNA, 6000 bp, Homo sapiens
agaaggacatccctgggcagggacagtcactgaggtcagaaccaagctcaagggcacacagagaaacacaccaactagggatcggggagggcttcctggaggagaggttgcctgaatggagaccagaaagcctagctgcaatgcaggagatgaaagggcaaggcaggctgctccatgctgaggaacattgtgtgccaatgtcccctgggggtcctttgctgtagctgtcgcttgcaagcttggcgaagatcctgccgaggaaggggtccatgttctgcctcccggccagggctgttgggattgaacagtacctgggttggggccccagtctgggcctctggaggagctgatgcgtgtcctggagaagggactaggagaaatggctgggagaagacgggagggcgctggtggtttccaaccccctgaaacactgtcctgcctcggcagagggggttagccctgcccctgtggggccacagttgtagctcagaactttctgggccattgttaaacggtagagacttcttggggggaatttctcatcacctgaggtgtgcaaggaggggctagatgcctcttttagcctgatgtatggttttgactatgagccttgccgggcatcagcagtgggataggtgggaggggcctagctgggagcaatctgggaaagcttgcaagaagaagcaactttgggagctgagatgaggaggtttccacatggacactccacagaagggcatctcaggatgagggaactccctgtgcaaggacccggaaacagaaggtatggacagggatgatgtagccggagctcagcctggctggggagggcaccacagcagcagcagggccgagcctggcccaggacctagcaggtgggcccctgaaggagcccagacccccaggtggccttggtgaacccctgctgactgttcgcagcagcacgcacacccagtggcagtttctgtcttagtgaggccacctcggtgccatcccctgctctgtgtccgctccccttgcccaggctcaagcatgggaggcccaggatggtgccctccgtacccaggcccagggcataaagagataagcccagtcacactgagatgagatgggattttgcttgacaaatatttgtttgaaaatggtttcccctatttacagttttgaagcccaagccacagcatccaaaccacctccacctgctggaaaggcctgacaggggcagaggcccagggaggaggccactgctgcttcccatggagacagagcagggcaggcagtggggtggaggccaaggggctcacagcaccaccccaggaggagcagtgggccagacccctgggcctgggacctgcctcggacagagcacctacgaggctcccagctgcctgtgcccgcttcctacggtcccaggcccccctcatcgttgctcccaggacaagcaggtgaaggaacagggcagcggggtacggttagggttagggctggggttaggattagggttaggatttggtttgggattagggttagggtcaggttgggattaggcttaggtttggggttgggattatggttaggatttgggctagtgcttggggtgtttttggcagtgtttagtgttagggttagggctgggttggggtttggtttaatgttccttttgggatttggttttgggttggcgtctgggttaactttagcgtgtggtgtgggttgaggttattgctttctggcaggacagtgttggggttagagtcgggtttagggttcatgttactgttcaggctagcattggggtagggttaaagtttgctttggttttgggtcccattagagttaggtttagcatttgatataggttggaatttgggttaatattgcagttggggtcattgttagatacacacttgggccaattcagggccttctcaccacctgtggagggcagctgtagcccgattctgcaggggactccagagtttcagttggagcacctgttgtttgtgggagagtgggaagatacctctcaccttcccattctctagggctcatagtcagaacccttgctcaatctgttcttgtgggtggggattggaagatgaggcagggaactggtcagcatggctagctgatgctggagcccctgtatgtggctgtctgcgggtgcctcactgtcaatgacttccctgacgtgctgtcctttcttttatactcagccaccagggccagaagcctggcatcacaccaggctattcctatctcccccacctccatccatccatgcattctttggcacatttaaccatgagccccagtgtggtgccacttcctgccctgctccctgaccacagtagaggaccacgcatcccagcggggagattgatgtccacatcaacagacagatcagatagctctggaacgcagtaagagacacgcaaaaaacaaaatagggcaacgagattgagccatggggatggtgatgtcaaacagagtggtccgtagaggtctgaatgagggcaggggcctgaggagagggtcctccatggccccagggcatcacctcgaagtcctgccactttcatcccttcttcccaacccggctgaaaccttgcctcctccaggaagcctgcctgatgccccaggctctgctgcactgactgtagtttccccatctgcaaaaaggggctagtaccacttcccctacaggggcattgcagggatgctcccagacccacaaccaatgcctgctttctctccgccttcctagcttaagggggctggagtgggaaggatagaagagagggcagggagggtggggacgggaggtgcgtgcagcatgggggaggggctctcctggggccttcccaggcaggcctgagctgaagcctgcaagctgctggagctgaagcaggagccgcccccaccccacccgcccctcccccgcctccccagccatctgtggcgttggcagcagcagtgccagggcgggcggtgaacattctggcaccatctgagcaggaccagcctctggggaagggccgcagcccaggaggaggcaatgtgggcagagccctgcctgtaccccaggttccacatcccccattggtgtttgtccccttagggactggggagggaagggacactggagctggcaggctgggcctcactacctctcacaggatgcctccactgctgtgtgctgcctgaatggtgtctgaacctgagaggccagagtggaggtcagggagcctgtccctactcctgctggggagactaaggcccccttgagcaaagaggctggtcccgtggtgcacaccagcgacggtttgggcgaagtctgtccacgcttcgcccaaactgggagagccccgccctgagctgccgcctctcattttgtcttgactgtggtggggtgcacttggaggcgcctccctctgtccattggttacccaatcatgtccctgggacctgagagggagcagagacaggactttgcttgacacgaagtggctccagtcagctgctggttcttttgcttgtctcctttttttctgggtttcccctcttgccttgctatcagtgccttttctcagcactgacactgcctgaatgtagcaacctactccccagattaaatgagagagcgtagaaactgcaaagcatacaacatacagcatataaggatggtggtgatggcagctcaacagtgggaactcagtgtccccaaactgtacactttaaaagtggttaaaatggtaaattttatgttttccatgttttccacaattaaaaaacaaaaatatacaaggtactcattcgcagcatcttctaatctgccatgtacttggaaatgatataagcatgtgtgaaccatgagcccataggtcccgagggaggatatgagcgaagcacacgggctttgccagctctgtttccaccacgcaggaccctccctggctgccagtgctcctccccgggttcccacgctggctgctgctgggctggctgggatggaagaccctcatgtagctggcaccctcagggctgccccttgcccgctctgggaggagagaggagggttcacgctgcacctttaccagggtaggactggccagcctgggctctaccgggcaggtcggtgggatgcttcagactggagggataggcagggggcaacactggtcctcctgaagccaccttcccttcctgagagctccttggggagaaggcaagccctggaagccaccgactgggggctcgggcagagcaagggcagggtaaggggcagcttggccaggaggcacccttgggagccagggtttcctcatctgtaaaatgtgactctgcgagggcaggagcttggtttcactcgctactgtaccccctggggcctacagcagggctggttggtacacactaggtgtctaataaatgttgagggattgaatggatggaccgatgaaaaggttgggcaggtcattactgacagcctctgggtttcaagggcccattcactctgtcactcaccttcgcgcccgtgcattagttctctcatttattcattccccccgcccccccagccccgcatgctctaccgcactcattcattcacgcgctcagccattcaagctggcgcgggttcattcattccctgcccctctgccattcctcgcctggcccccgcgcacgccgcacccccgcgcccctgcccggccctgcgcccaccacttgcgccccggccgggcgctgccgggaggacgcgcgggctcagccgcggctgcgcggggccggggctggcggggagccgggctgggggcggggggcgggcgctccctgcgggaagccgggcggggtgggggagccccggccgcgccggctcccggcgcgctcggcctcggaggggagggggcggcggtagcggcggcggcggtgagcggcgcggctgccctggggccatgtggactggcggtcgccggccgggccggctgcgccgggcggtgagtacctgcgagccgggagggcagggcgcgggcgcgggcgcggaggcggggcgggcgccacccacgcctggggcggtccctgctcagcgcgggaggtggccggccccccgccccgctcccctccgcgctgcgcccccgccgtggaggcttcactggcccgggaggagccgggccgggtctcctgggaactgggcactctcgggtggggcggggatgcccagcctccgcgcgccgccgggagcgcccgggtcctatcgcggggtccttgcgccctgacacgcgcgcccctgcggcggaaggaaaggagggacgggtgaccaagggcgcggccggaggactggggacccgccgctgtcccgggcgggtggcgagggtgcgggcaggcctggacccgcctgcgtctgggggcagggccagcccctgcttgggaggccggagaaaggcccgggagccggaaggaggctggacccggggccgcctcattgagcgtttgcagcgcgtgggcgcgcacgaacctcggacaccaccatcccattcagtacctcgcggcaggtactatcctcctgcccctttacaggcgaggaaactgaggctcagggaggccagggcctcgcccagagcggctcagccggcgcgctcaccctccctgagccccagcacgttggatgggaatttctgccccagcgtttccgcttcctgcttggtttagaggtgtttccttcctcgtctgtgccccaccccatccccaatgtggtttcctcagggcaggaacagcgtgggcgacgcgctggagtctcctgagccggcagaatgggagcagagtgggcacccgggagcggggccggatggatagggagcactgcacgtgcaaagtccgcatggccaaggtcggccgccagtgcagactgggggtccaggccctgggggtatgggtggggcggggtctccacagccaggctccgtcggaggccccagtgctctggctctctggaggccatgg

SEQ ID NO: 6520 - DNA, 6000 bp, Homo sapiens
attgcgccattgcactccagcctgggcaacagagcgagactccgtctcaaagaaaaaacaaaacaaaaaaacaaaaaaattacattccatgttattgatttcaagtacagtaaaagttcaaagatggaaaagatcaatatgaatagaggatgtattggaggagttaggatgttacggagcttgagctggaaacaggaaatctaaataaagattcttcaataccacttcagcatcttactagcaagatttcctacttggaagtgtgtgtgtgtgtgtgtctgagtgttggagtgtgtgtctgtgtgtgtctgagagtggggtgttggagggaaggagggaaagggccgggtctttgtaatgaatttctcttgtacctttttcctctcacctttctcaagaccaaccctttagaatttggctgtcattgtctacaatccttcctgttcctagcatgttccaaaaaatgcctggcccacaaacatgtgtggggtggaagaagtactttgccataaagacaaaactaaaccctctcttatggactgaagtttattaagagtttatagagaggagaagagtgggagctgtgagatcttatgaagggtttctagtggatacagggttgatctgggtgtgagacataaagacacagatttacccacacccatgaccaccagtattcttccaaactgccgactaaaatggcgctagtcctccaagccagcaagagctgcactgctgtattggtagcctctaaccacatgtggctatttaaatttcaacacaatttaaaattcagttcttcaaattgcactaatcacatttcaagtgtccaatagccacacatgcctagtggcttccatattaaatagctcagataaagaacatttccatcatctcagaacattcagttgaaaaacgcagatctaaagagtacatcttctctgggatgctgaaggtgggagccacatttaactgcttttcacaggcttggaaaagttccttttcacttttagctactataccgtaggatttaaccaacacgtccattactgatggtttccacactttcagaatgtatgtattctcagagagcatgcagtgaattttctttaacaattcagtggtttttagcacattcacaaagttgtataaccataaccactaattacagaacattttcatcaccccaaaaagaaagttcatagccattaagcagtcactcctcatttccccttggcaaccactaatctgctttctgtctctgtggatttgcctattctgaatatttcatgtaaatagaatcatacagtgtgtggccttttgtttcgggcttctttcacatagcatgatgttttctagagttatccatattttggcttttatcagtacttcatttattttatgcctgaataatattccattatgtggatatacagtaagttctcacttattgtcattgataggttcttgaaacggcaacctttaagcaaaacaatgtataaaaacccccaattttcccataagggaattgacataaacaagaataaagttcctccagcacatttctggtcacaaaaacatcaccaaactgctaaataaagagcaaaaatccttctaatattaaatttggaaataaatgtgagctatatgtacacttttaaaagattaataaaaacaagtaagataattatttgccccattactccagttcaaggtctcaggtgattggagcccatctggctgctcagcacgccaacagggaaccagtcccaaacaggacatcattccatcgcaagcctctctctctctctctctctcagacacacacacacacacacacacacacacacacacacacacacacatcactctcattctgggacaatttagacatgccaatgaacctaatgtgcacatctttggaatgcaaaaggaaactggagtacctggagaaaacccatgcagatgtggggagaacatgcaaactttcagctgggagttgatcttttttttctcatcaacatcctaatgaaacaacgttattggaggaccttctgtgctatttaatacattttgtttatctatcattaatcgacgggcgtttgggtggtttctaccttcagctattatgaataatgatgctacgaacatttgtgcacaagtttttgtgtaggcatatgctttcagttctcttgggtgtatatcaaggaatggaattactgggtcatatggtaactctatgtttaactttttgagaaatagcaaaactgtcttgtaaattaactgcaccacttcaccttgtgttcatttaaagaagagcttattcttctcttggcctgacagtgcttgacacacagaaactacctattattgttggattggatggatgatcgctttgctccacaccaaatatccttccagtctggaactgaagaatgccctgttgaagaccacgatagggtgtggccctagtctccttaataccaccctattagcctgtcaggggttttcatcagtcacttcatgtttattaagtacctacttaattggggatacactgattgaggatacatcgctaagtaatgcacagtgtgctagttagaaagatggccatttgagcagatcactagaatgctgttgcttattgatgttatgggaatataagaccggcaagaggttcacagcttagcctgggagaatgagtgaaggcttcacagaggaaagaatatttgagttttgagcactaagcagtagtcaccagggaagaaatgcgatacagggggcgaactaaataaagcattttgctagagacagagaacagaccaagacataagcagttcctggcctcagtaagattccaaggtaatggaagtagaattcaggttcttctttcacttgtcactcttccttcatttgccatcctttcacttgtcatccctgggctgagtttaatgtgatgtgatgagggttgagcagtttgacaaaccatcttgggtcagcttggttctctggctgaaacagtccttcttctttggagtgatagtttgaccaatccaaatggaacttctgctttggcagaagccacagctatggaaagccagcaacctgaattatgggctgatgtctccatgtgcttccgatgcttggagagggatgcccatgaaagaactctcctcacacagtccacaccaccccgtgctctgtctggtgttcctcccaggtgaggttcaacccatgcgtgtccacctattcaatataaagtgaatcaactgaggcccggcgcggtggcttacgcctgtaatcccagcactttgggaggccggggcgggccgatcacttgaggccaggagtttgagacagcctggccaacatggtgaaaccccgtctctactaaaaatacaaaaattagccgggcgtggtggcacgtgcctgtaatcccagctactcaggaggctgaggcatgagaatagcttgaacccgggaggcagaggttgcagagagccaagatcgtgccactgcactccagcctgggcgacagagcgagactccggctaaaaaaaaaaaaaaaaaaaaaaaattgaagtgaatcaagtgtttgtccattgatataaactggagaaaacagaggtaatttcctcttggggtcttgggctcctcaaagtaaatgactgtaagctcaccctaaggtaagggtcaacactgttcagagtgggtgaaactgttaaagccttgagtctttacttctctcctaagccaaatttcttgctcaaggcgttctgtcaacataggagaataaacaagggggaaatgtctgtagaaaaatgtctacatacttgctttcaaggtagtgccaccaagccaaaggtcctacaatgtaagttgtgttacttacttctactcatttcctatctgggtgtttagagagggtgttttatgagtagcagaacaaaggtctggtggcacccagatttatgttttgttttcattccttagaaagattcagggcaggtgggagaagagacggaggacagagcaatttcaattccctatacgccctcggttctaaccagtgcctctcctccacagtgtggagtgactgctggtgtgtctttcaatgaaaatctctccagactaaaaactggtgtcacttgtccacatgttcacggggcatatggatgttcttatgacagcctctgtatttctgaattaataaatgtaaagcgtttggaatagtgcctagtaaataatatgcaccataaaaacgttagggtcattatcattatccagcctcatctctctagctaggtatgaacttccctgtaattgaagatctcaccatttttatcttttttccccctaaacacctagcacggtgtttttaataatttgttggcgtgattaagaccttaaacaagttgctctccctttgagagctcaggtaggaccactgagaggttgtgtgtagagtccgatatgagtccacagaactatttggcgcccgctgtttacaagccactgtcctgagcctacgccctttgtagagtcaaaagtatcaataaatgaacgtacaggagtgaggctggttgagcaatgattcccgctcctaggaggtctcaactaccagcccgcaggcggagcgggtgggactcccatgcgctccccattccacgccatttccatgtcgctcgaatcgatgctttccgtgttgcctcgtgcctggacggccggccccactaggcgcagaggggaagaatcccagcttcggggtctggttggggccccgggagccgcgggaaagcgagtctgcggcgcgggaagcttggccagcagatcccggcggcgcccggccagtccccccgccccggctccccggctgcccaatcatggcgcggctcgggagcgcgccgcggccaatcaggagcggcgggagcggcgccgggagccggcgggcgcagagcgagctcgagtctggagccggcgtcggcgctgcggccgggagggatcgtggcgagagcagtgcggccgggtgggtatcccgcggccagagaagccggctttgccgcggcgacctttcggcggacgccggggaccctgcggaccgcggcgcaggtaactgcacccacgccccgcagcaggaggcgagcgcgccccccaagaggggccccgcaggtggagcgggcggggggcgggggcgggggcgggggcgggccggccgcgaggtcctagcgccgctgtgccccctggcgcccccgagcctgcctggtcgagccacgcggaggcgcggcgtttccaccagccgcgggcgtcccggggtgggggaggacgaggggactctgcttaaggcaggtaggggtggaggaggactcctgcgacacctggccccatacacagacacttctggccgacgggtgtcttcgagattgggacgcccaggatgtcttcatcggcccgagtggggaggcgacaacaggtgtccctggggacggtgcttcccctacactcccctcgcctgaaaccccgggttggcgccgcgccccgccttcggggtgtcgggaggcaggaccccagcttggcctcaggcgctctgcccgctggacagcgcccagaggcggcctggacgtggggcttggatggagttttctctgcgcgttgccaagcaatttgcctgacacccgcctctcgctgggatgaagagttgaagatgagagtgcgtgtgtgcgcgcgcgtgtgcgtgtgtgtgcattcgtgcgtgtgtgtgcgcgtccgtgtgttctggtgcaacccctactggaaggagctgcctgagggctgtgagtgaatcattaactgtgcttttgtgcagctcctggtctctgcctgcctccccgcctctcccgacgctccccgtttcccccttgagcaggtccttcttactctctgtgcctccctctcctgatctgtaaggtggcgataatgattgcaccggtctgatagcgttgttttgaggattatatgagccaa

SEQ ID NO: 6521 - DNA, 6000 bp, Homo sapiens
gactcatgaaaccattgcctgtttcagacgctgaccggaaaggagattgagattgacattgaacctacagacaaggtgatgcatgcccaactcctcttcatgtacttcttgccatgtgtatttgtttgcatatgcttatgaacttggtccttttgctctcatgctgtctgcatagcccttgttctttccgtttccatggtcctacccctaagcagcagcccctgactacttgtctctctaaaggtggagcgaatcaaggagcgtgtggaggagaaagagggaatccccccacaacagcagaggctcatctacagtggcaagcagatgtgagtttggagtgagaatgacagcatggcgatcttatgtgaagatgagaagaggagagggggcacgtactgaggtggatcaggggtgcctcttgtttttggtgcctaagactctttggcaatctggtgaagcctctaagccccttctcagaataagattttttcaggcataaaacaaaatatatagaattaaaggaaaactaattatattgaaatagttattaaaatactaaaacaaatttgtgatatagtaatatatgtacttttttattaatgcataagatctaatggtaggtctaatatgaccataattttgaaatattttcaagatacctataaatgatcatgatagaaaatagttaattgctattgttaacaagttacctatattgctaatactactgtggtttttgggctatgtttaaagttagaagaaatgttaaatttcagttgggggttagtaaaaataaagatgggattttttttctcattcaagttcacagacccccaaagagatccaggaaactcaagaactcctgttctggccgggcgcagtggctcacgcctgtaatcccagcactttgggaggctgaagggggtggatcacctgaggtcaggagttcgagaccagcctggccaacatggtgaaaccccatctttactaaaaatacaaaaattagctgggcgtggtggtgggcgcttgtaatcccagctactcaggaggctgaagcaggagaattgcttgaacccaggaggtggaagttgcagtgagctgagatcgtgccactgtactccagcctagatgacagagcgagactctgtcaaaaacaacaacaacaacaacaacaacaacaacaaaaaactcctaagtcttctttttcttttttttctggcttccttttcctgcaggaatgatgagaagacagcagctgattacaagattttaggtggttcagtccttcacctggtgttggctctgagaggaggaggtggtcttaggcagtgatggaccctccattttacctctttaccctgtcgctcataatgaggcatcatatatcctctcactctctgggacaccatagccactgccccctcccctggatgcccagtaatgtatgtctactggtgggagactgtgaggatcccaggattcagtattcctggcccagagggcccttgctggctactgggtgttagtttgcagtcctgtgtgcttccctctcttatgactgtgtccctggttgtcaataaaatatttcctggcctcctggaatctttcttctgttgcacaagttgactgaaataaaaatggacctaatgctcactcagttatagcaggctgaaggaatcggacagtggaaggaatggtgctcttacggggattatcagactctaggaaaacctacttagtggtgtgttggaaccagttcctagtggctaatgagagccaattattggcacctttttccaactctattaagtgacttcatgttggtagcttgaaattggccatggtaggattatttacagaaactagcaaacactacagatcagttcctccccacaaactggttgttatacatctaccagtgtagtgctgacatggatggtgaaaccttcggagagtgaattctctcttgactgtggctgtactggacatttaggcctggttggagaacgccttcaagggtttggctgacactgtactctatggctggaatattactgaggactttgggttctacactgtcaggaggttgataatgcagaaagattgagtgacaagctgtgatgtatcacttgggtctcaagaagaggcaggtgctagaagaaaaggctttccttcttccctggcttcttagtataatagaatcgggcaaggctgggtggagtggagaagtagggaggatgcccgtggccaatgccttagaaagacttgactgctgtggttgcatgtgtggtcgtgttggtacctcgctgcaatcctcttccccgcccagcatcagatggcactcttgcgccatctccaggctgatgacgccccgagtggcgacgctctagtcgccatttgtctatggcaggcagggtggctgccttagctgccggaggttccgcactctctaaggccccgggtgaagccccacctctgctgcgcgcagcctgcggtgcgggtcatggcgcggctaccgaagctggcagtctttgatttgggtgagggacgggaaggggagaatttcgtaaggtgctctccttttccacatccctaacagcagctcccgaatccctgcatctcccgccccaggctgaaccttccctctccttcctctcgcagattacactctctggcctttctgggtcgacacgcacgtagaccctccgttccataagagcaggtgaggtagggacagggaagactgggggcgagataggacccagccagggctgagcgcactcttgccctctccagtgatggaactgtacgagataggcggggccaagacgtccgactgtacccagaggtgcctgaggtcctaaaacgattgcagagccttggggtgcccggtgcggctgcttcaaggtaagaagagcgactgacaactgacagtgtaatgctgaagggtgcatgcaagagacagtgaaacccctggtctacaaaaataggggcggtgcaagtttccaagtatttacatattttttcccttgaacgctctcctgtgccttttaactattaaaaagtggggccagcaggcgggcgcggtggctcacgtctgtaatcccagcactttgggaggccgaggcgggtggatcacgagatcgggagttcaagaccagcctgatcaacatggtgaaaccccgtctctactaaaaatacaaaaattagcagggcgtggtggcacgcacctgtaatcctagctactcgggaggctgaggcaggagaatcgcttgaacccgggaggcggaggttgcagtgagctgagatggagccactgcacttcagcctgggtgacagagtgagacaatgtctcaaaaaaaaaaaaaaaaaaaaaagtggggccagacacagtgactcacacctgtaatcttagcattttgggaggcctaggtgggaggatcacttgagcccaggaatttgagaccagcctaggcaatagagggagaccctatctctaccaaaaaaaaaaaaaaaattgtagtggcgtgcacctgtagtcccagctacttgggaggctgaggtgggaggatcacttgagcccaggaggtcgtgaccacagtgagccgtgattgggtcgctgcactccagtctgggcaacagagctagaccctgtctcaaaacaaaagctaaaacattggcccagcaccaattgtgtcaaataggaaggcaatggagttaaacagaggctgaggatgcctgtccatcccggaaaaacagcaagttgatttccctggttatacttactaactttgcttaataagttaacgtagccctggcccttcactttgctaatcccatcttttacaccgttttgcaggacaagtgagatagaaggggccaaccagctactggagctctttgacctcttcaggtactttgttcatcgggaaatctatccaggcagcaagatcacacactttgagaggtatgcggagataagggaggagcagggtgagaaagtatcagagaggcctgggaaaccaagatactagcttggttactcctgccctgtcttgaataggttgcagcagaagactggaattcctttctcccagatgatcttctttgatgatgagaggcggaatattgtagacgtcagcaaactgggtactgagtgatgaggaacagccatttggggtccctaggagggattaggtagatacatacaggttggatagtttgccctataggtggcactcacaaaggtcagagtaataatggagaaccctgaaagcttaatgaaatgtgacttcttatctttctaggtgttacctgcattcacatccagaatggaatgaatcttcaaactctaagtcaagggttagagacatttgcgaaggcccaaactgggcctttgaggtccagccttgaggagagcccatttgaggcctaaactgaaaggaaatcaagaaggcattttcaggtgcatttgtaatttattaaagttcatctgtgtgtgacagaagagattttacccacagtgtggggagtttctatttttctagcctgtgaaatggggttggttgtcctgaggtgcagagaccagaatgtgagacattagactgcatcaggtttgccatctaaacttagggcaaccccaagtgcttgaacctataccaccccactttcctgagctctgtaaagagcatgaagttttcccactgaccccatacactgaggtgccatcacactgcacatttccttccggagaacaagcacgtactcaggtggagatagaactgtctttttacttaatagaaaatgatgtggcagctttaagaggagcgcgtcggtctggggctggtggcttgggtcacgtgacaccggtggtctcgtttgcgcctcttgatgtcgcggcggcgccctgaggacggattgggcaaggctggtccctgtgtgatgagacatcaccctcccaggagcaaggcggaagtctggaggacgctgaggggcggaggcgggagaggcgagctcgcgatgagtggtctcggcaggctcttcgggaagggtgagccagggtgggactggccagccaggaggcgctggctggtgcaggggaagaggagaccccggcgagattcggccggaccgctgcgccgggcaggggaagagaatcaggagacaggctgactggaaaaccccggcggccgatggcggagcaaggctcatcgccggtgccaaaaggcacaccatgtcggggcgccttgttcccgtccgccgtcctcccccactctcagagggaagaactcaagatctgggaggggacttgagttgagggcgtggcgatcgtgctgactcccactgttcaggcttgaagacgagtttcctgctgtcttcagccattttcaaaaccttgttctataatactttgtgctgggcaagagggatctaaggtgaagaagaaagactgccttcttagcccggcgcgggggctcacgcctgtactcgcaacactttgggaggccgacgtgggtggatcatgaggtcaggagtttgagatcagcctggccaatatggtgaaaccccgtctctactaaaaatataaaaattggccgggcgcggtggctcacgcctgtaatcccagcactttgggaggccgaggtgggtggatcacctgaggtcaagagttcgagaccagcctggacaacatggtgaaaccttgtctctactaaaaatacaaaaaaaaaaaaaaaattagctggttgtggtggcacgcgcctgtagtcccagctactgggggaggctgagacaggtgaatcgcttgaacccaggaggcggaggttgtagtgagccaagattgcaccaatgcactccagccttggtgacagagggagactccattctcaaaaaaaaaaaaaaaaattaggtgggcatgatggtgtgtgcctgtagtcccagctactcagggaggctgaggcaggagaatcacttgaacccgggagacggaggttgcaatga

SEQ ID NO: 6522 - DNA, 6000 bp, Homo sapiens
ggtccacgccattctcttgcctcagcctcccgagtagctgggactacaggcacccaccaccacgcctggctaattttttgtatttttagtacagacggggtttcactgtgttagccaggatggtctcgatctcctgaccttgtgatccacccgcctcagactcccaaagtgctgggattacaggcatgagccaccgcacccggcccctctttcttttttttgatggaatttcactcttgttgcccaggctggagtgcaatggcatgatcccagctcacttttttttttttttttttgacggaatttcagtcttgtcacccagcctggagtgcaatggcatgatcctggctcactgcaacttccgcctcccaggttcaagcaattctcctgtctcagcctcccgagtagctgggattacaggcacccaccaccacgcccggtgaatttttgtatttttttagtagagatggggtttcactgtgttggccaggctggtcctgaactcctgaccccaggtaatccacctgcctcggcctcccaaagtgctgggattacaggcatgagcacctctttttctttataaattacccagtttcaggtatgtctttattagcagcatgagaacaggcacacagcctcactcataaaaaaaagaaaaattatagctgggtacagtggctcatgcctatcatcccagcagttgggaggctgaggtgggcacatgatggcttgaactcatggctagtcatgagttcgagactagcctgagcaatgtggtgaaacctcatctttaataaagatacaaaaaaattagctgggtgtggtgctgcacgcctgtagtcccagtaactcgggaggctgaggtgggaggattgcttgagcccagaaggcagaggttgcagtgagctgagattgtgtagccatattccagcctgggcaacagagtgagaacttgtttcaaaaagaaaaggaaaattgcttgagtttcacttgcattatggaaataatagtgcccaccttatgtcacaggattcatatgaggatcaaatgaaataatttataaacatgtttagagaatgtcttcgcctattttctactactgtaatagaataccaagactgggtaattcataataaaaagaagcatatttggctcacagttctggaggctgggaagtgcaagagcatagtaccagtatctgttgagggtcaccccatggctgaaggcatcacatggaaggagtagtgtaagagaaagaaagacagggaggagctgaactcatccattttatcaggaaaccactcccacggtaacagcattaatccatattatgtgagggaagagctctcatgacctaatcaccccttaagggcctcaccctcttaatactgtaccatggcaattaaatctcaatgtgagttttggaggggacattaaaaccataacagagaattataactttaagaccatattaagtatgtaccatattaccttttttttttttttgagacagagtctcgctctgttgccaggctggagtgcagtggtgcaatctcggctcacttaaacctccacctcctgggttccagtaattctcctgcctcagcctcctgagtagctgggactacaggcgtgtgccactacgcccagctaatttttgcatttttagtagagacaggattttaccatgttggccaggatggtctcgatctcttgacctcatgatccacccacctcagcctcccaaagtgctggaatggtacaggcgtgagccaccgtgcctggcctgtaccatatttcatccaatcttagacacatccattgtatgacacgccattaatttatataccactaagaaagaaacaatgtggctaatttaaaattataatatcttatcacttggaacttgtaatacctagtgaaacaactcttctatacttaattagacatggattgttatatctaattcctgtgcaaacattaagaggaaaatataaatgaaataaattggctaaggtattcttttttggggggggatggagtctcgctgttgcccaggctggagtgcaatggcacaatctcggctcactgcaatctctgcctcccaggtttcaagtgattctcctgtctcagcctcccgagtagctgggactacaggcatgtgccagcacaccagctaatttttgtattttttctgagagacagagtttcactatgttggccaggctggtcttgaactcctgacctcgtgatctgcccgccttggcctcccaaagtgctgggattacaggtgttaaccatggtacccggccaaggtattcttaaacttctcattcaggccaacgttcctgaatcacttctcaactcaatcactgacatctatgtttatccacgtaatagccttatttgtgccaatgagaatattgttgttggtcagacgcggtggctcacacctgtaatcttagcactttgggaggcccaggtgggtggatcacaaggtcaggagttcaagaccagcctggccaacatggtgaaaccccatctctactaaaaatacaaaaattagctgggtgtggtagtgcgcacctgtaattccagctactcaagaggctgaggcaggagaattgcttaattggaacccaggaggtggaggttgcagtgagctgagatcacaccactgcactccagcctgggctacagagtaagactccctctcaaaaaaaaaaaaaaaaaaaaaaaaaaaaaaagaataatggtgaatgcagcatttcttctaagaatctagaaaaataaataaaaatcaaccaaaggacataccaatggttccattaaaccagaagttgagactgtctcctggttatcttgggctcctcattgccaagtgaacctacaggcaaagaaaggggttaactgtactggccagagtaatcgaccttgtctattaaggagaaattgggttcttatggcccaatgtgggtaaggaggagtatatgtggaaagtatgagatctctgggggtacctcttacaagccttgtgttctgtgattttagaattgcttatgtttcactttttgctaatttataaaacatacagcagtttgttgtacaggataaactcactgaaaacatttgaccagaagtctgataagaaaaacggggagggccatatgcttaagattagtggtgtgtacataagcatttttttaaatttttgtttgttttgagacagggtcttgctctgtggcccagactggagtgcagtcttgcaatcatggctcacagcagcctctgcctcccgggctcaggttatcctcctacctcagcctcctgagtagatgggactacaggcacatgccaccatgcctgcctaattttcagtatttttttttgtagagacaggtttttaccatgttgcacagactggtctcaaactcctgggctcaagagatccacttgcttaggcctcccaaaatgttggaattacaggtgtgagccactacgcccagccatgagtgtttattttatttatgccttacatattctttttttttttttttttttttttagagacagggtcttgctctattgtccaggctggattcaaccttgtgggctcaagtgatcctcctgcctcagcctctggagtagctgggactacggatgcataccaccacattctgctcatgccctatatattcttttgtatgtatgggtgtaaaaacagagataaaaacagagatatggatgccatcaactcactgatgtttgaagttctgagaaagcataaatcagtaaaggagttaactgaaatttaaatctcacaaatgagcaaaaaatatgatttctggtatatgatctatggggttctttgaatactattgcttaagaataaaatactttgcgatttcaataaattgaaaattatggtacaaggcaaggaaggggagctactagctatgagacttttgtaaattatgtaacatctctgaacctctgtttcctcatctgttaaaatagggacaaagtgctacttaggtaagacacttcagaaatggggctctgaaaaaagtcacttttcttctcctaacgaaaggtttctaaacctcagcactccagacatttcaggccaggtaattctttgttgtgcggcgctgtcctgcgcactgtaaggcgtgaagcagtattcccggcctctactcacctgtgccctccaccatctgtagattccaatgacatctcaccccagatgagaggctgaaaatgattcatacattgccaaatgtctcctgggaggcaaaactgttgcagtggagaaccgctgtcctaaccccatgttcatccaataaagggtttgagggactgagaaatgaaacaatagtcccgaaggagtagaatgcagtggccccaactcctagtttcatgaaggcaggaactgtgactcagaggcctggggatgcggagctctgaactgccagctggtaggaaaagtcctaattaatggattgaatcatgaagggagggcaacaaggaacaaatggagagggccagtggccgagccttcggtctcaggatcaaagaggcccacactggtcaccacttacgctgctgggctgactgctaggtagacgtatctgcagataaaccgagacaatgacgcggtgggaaaggccttggggagcgaggaggaggagccgggagaggccagctttggtccggcggccaccgccccaggcgccgcgactcgagcctcaggccccgcccctcgccctcctggtcccgcccccgctctccgagccccgcccctcgccctcctggtcccgcccccgctctccgggccccgcccctcgctctccgggcctgggcgggtggcgccttggcctccgcctccgctcgcctgcgcgcggccctgcgtgagggggcagaggcgaggtggaggcgttggcgctgccacgtctgggccgcggttcccaactgtggcgcgggcggtggaggaggaggtggggctggcgctgaagccggatccggatccggtgctgtgcacactggtgggggagagtccgacgcgcctggctaggagcgccgaccgcagggcctctacgggtgaggagggaccggggccggggcgcgagagcaggaccgtgtgtcctgggggctggggcgggcctgccctcaggtttatctaacaggtgtgtctggtgccccggccaggcccccgggggtgttgtgtggaggagctgggcgttaatcctcgccagctgggtgcacatggtgtggagcgcggttcccaggaagttgaacgcacgcgcgcctggagcagaggttaaggatgatggccagcggtccggccatacgctggtcttggcctggcagggctggaactgggactggggtcggaacttcgctccccagactttggcgtgggaaatgagacagttggtcgcgctctctgcagccatcggttttgaatgggcacgaacgtcccaggccccttctcttctcccattcccgggcgcatcccacggtggtcggagccattgaggcagctgctccgaagaccacctccgcaccgagtaggtcggcgctttccccagggtacagagggacattctttgtctctttttcctaggctcctacccctagaaataccgagtactgtactgtgatttctgttgcgggagctgatgtttatgtaagccaaactaatttaaaattttcatacaaaattgaacgggcgattataggattcgttttgttaggataatccctcatgaacgaatcctagaatggatcttaagaaattaatttaggcaggatttgctaaataggggagagagcgctagctgtatggtatgatgatgtaaagattggggtctgttgaggatggtaatcgagctcaagatgcgaaaacgaggattctagccccaagtcacttacttgctgtgttacctaaggggcaagtcttgggagttccaggtgctccagcttcctcatcggtagact

SEQ ID NO: 6523 - DNA, 6000 bp, Homo sapiens
cggggagccccatggtccagccgcgttgagtcttggtgatggactgcctattggtgcaactctccagctgttcagctgttgctatggcaggtcccacagtggtgcctttgggtgcatgctcagtgtggctggggtggggatggggtggatgggggcaggcacttgtctccctggttgaagaatcagtatcacataattgagagactgattctaggaggattctagtggaaaagatgttcagcaaccattcctcagatgtctcccagttctactgaaatgtgccccagtccaagttgaccacaaatggggaggatgccaaaatgttccactgagtgactgaggtaaggggatggaatttaggtatttcatttacaaagaccgggttaaagtgaactttgttgtctccactagtctatatgttttttttttttatttttttttgagacagaatctcattctgtcgcccaggctggagtgcagtggtgcaatctcagctcactacaacctctgcttcctgggttcaagggattctcctgcctcagcctccggagtagctgggattacaggcgtgcgccaccatgctggcgaatttttgtatctttagtagagatggagttttgccatgttggccaggctgttcttggactcctgacctcaggtaagccacccaccttggcttcccaaagtgctggcatgagctaccgcgcctggccatctatatgattcttttgctaacattgtcccaaaatcttaggtcctccatctcacaaaacacacacacagacatatagacacacacacacatagacacacagagagatctgtatgatggctctgaaagtggctgaacacagatgaggatgaggatgaatatttgaagcttgggttttggtttctaaactattccccatctctttttttttttttttttttttttttgagacagtcttgcttgctctgttgcccaggctggagtgcagtggtgtgatctcagctcactgcaatctccacctcccaggttcaagtgagtctcctgcctcagcctcctgagtagctgggattacaggcacgtgccaccacgcccagctaatttttgtatttttagtacagacagggttccatgttggtcaggctggtctcgaactcctgaccttgtgatctgcccaccttggcctttcaaagtgctgggattataggcgtgagccaccgcgcccggccttttcttttcttttttttttgagacagagtcttgctccgtcgcccaggctggagtgcagtggcacgatctcggctcactgcaacctccacttcctgggttcaagcgattctcctggctcagcctcccgagtagctgggataacaggcgcccaccactaggcctggctaatttttgtatttccagtagagatggggtttcaccatgttggccaggctggtctcaaactcctgacctcaggtgatccatctaccttggcctcccaaagtgctgggattacaggcatgaaccacctcgcctggtctttttttttttctaaagcaatgtaagctactgaatttgaggtcagtccagtatgactacatacactcctttttttttttttttttttttttttttttgagacagagtttcactcttgtcgcccaggttggagtgcaatggcaggatcttggctcactgcaacctttgcttcccgggttcaagcgattctcctgcctcagcctccggagtagctgggattacaggcgtgcgccaccatgcccagctaatttttgcattattagtggagatggggttttaccctgttggccaggctggtctcgaactcctgacctcaggtgatctgaccacctcggcctcccaaagtgctgggattacaggggttagccaccgcgcccagccatttttttttttttctaaagcaatgtaagctactgaatttgaggtcagtccagtatgactacatatgctcaattttttatgagtatgaacatttatttctctggattccttcagcaaacctcattccctttcctgtcttgcctagggaaagccatttctttcaaaatgaagtgaggaatccacgtcagcttgcattttctttcctgttttctcagacagaagcaagcagagagccactaaaggtcccagtgaggaggcctgcagagagctatttaccattacagtgccgatcaatgggaaggcagctgcggtgcccaaagggggtcaggctgggttggatctgcgctcggtactctggtggtcgtgggaggaaaatcacagcaggttgggcctcggttcctagaaaacatccctggccatattcatctgtgggatattcttaccacccgggatgcacaggggaaacattacagggtgttttctgcacctctgctttattgagtgctgggtcaagtgttatgctgtcctttctttttttttcttttttctgacggagtctcgctctgtcacccatgctggagtgcagtggcgtgatctcggcttactgcaagctccgcctcccgggttcacgccattctcctgcctcagcctcccaagtagctgggactacaggcgcccgccaccacgccgggctaattttttgtatttttagtagagacggggtttcaccatgttagccaggatggtctcctgacctcgtgatccgcccgcctcggcctcccaaagtgctgggattacaggcgtgagctaccgcgacggcctgtcctttccatgcattatcttatttcatctttccagcaatcctgtaaggtagtcactctaaatatcctattttgagatgaggaaactgagtcacaggggggttcagtaatgtgctcaagattgcacagctggtgagtggtgacactgggactggaacccaagtgtgccttactccagagcccttggcatgcacctgaaaccccatgtaagcccactgtggagacgcgcacctcgaaataatggaatccactacatcagttcctttagctttctgtgtaatcagagtagctagcaggctcgggatttcgccccccggcttttttttttttttttttttgagacagagttttgctcttgttgcccaggctggagtgcaatggcgcaatctcggctcaccgcaaccttcgcctctcaggttcaagcaattctcctgcctcagcctcccgagtagctgggattacaggcaccggccaccacgcccagctaatttttttatatttttagtagagatggggtttcaccatgttggccaggctggtcttgaacttttcccctcttattataattcagacacttaacctgaaatataccttttcaaatgaagtaaatgggcttaccactttccttgacctactattgaaaaatacattctccatccaatattcagcctgaaaacaggtatgtacatatatacttttcattgcttttttttttttttttttgagacaaggtctccctctgttgcgcaggctggagtgcagtgtcatgatctcggctcactgcagccttcccctaatgggttcaagcaatcctcccacctcagcctctcaagcctgggattacaggcgagccaccgtgcccagctaatttttttttatttttagtagagactgggtttcactacattggccaggctggtctccagctcctgacctcaaagtgatctgcccgcctcagcctcccaaagtactgggattacaggcatgagccaacgcgcctagcctttcattgctttttaaagacctaataggctagactttgctctccctcaatactcgttggtagggataggcaattttctcaactccggagagcattcatttgcctctctccggtgctaacacattcagtggtaggaaactggatcttgaacaagggccattcattctttggtgccactggctataccacagagaaatttaggggtctgaaacaatacattggtcacctgggcacctatcctaagcaccttagagggaaaacggagacttgcccgcacacctctaaaggattttgcacttggagatgttcttatggccatctatcttttcaccctggtggaggccgtgaataggcattttccccatttaaagaaaaaatggggacgggggagggccgtgacacagtcacacaggtaaggggcagccagatggcagggagggggaattccacccacactctcggggactcatggagacgggtgttcgaatccagatcctgctcaaggccttcctacctcgggtgagcccagctgaggtaccagccactggggagcccggccagatcctgcagatgcagggtgccacggcgggcggaattaccggcgccagacttggggtgggatatggggagaagtggtgagcccggaaagcggagcacggtagaagtgggctgggtgggggctcacctcaactcccccattcggagcgtccgcggaaaaacgaaaacgttcccccgccccgggcaggaaggggttgggagggggggctggcgccccgccccagcgtcgcctgctcgatggggtcccgctctcctgcgcgcgctccccgccccctctctccggggcggcggcggcggcgcaggggaaggggcgggcaggggccgccgccggtttctcctcccaccgcctcgcgccagcccagccgagccgagccgagccgagcgggcgccgcgccgggctcccgccgcagccgcgcttcccggcacccagcgagcgagtgggcaggcgggcgggcgaggcagccgcgggggccgggcccggcgtcctcctcgccgcccgcagcgtccccgggcgggcgcgggccgcgatggcagcggcggagcagggctgagcccgctgcccgcccgcagttcccggccccgctggccccagtcatggcgaagcagtacgatgtgctgttccggctgctgctgatcggggactccggggtgggcaagacctgcctgctgtgccgcttcaccgacaacgagttccactcctcgcacatctccaccatcggtaaggggcggtggcccggggcgcccctccctccccgcccgcggcccctttccccgccgcccccgtccccagctggggaggaattgccagcccctccggctggaggcggtggcgccggaggccggagtccgggataaatctcggggtgagcataggttttggcaggtgagggtgtccctgctgcctgccgtccggaccaggggtggggtctcccgcctcttgccgggaagccttccgtcccatcaaaccgagaaaccgggggtgaggggagctggtgtaggcctgggtaccccgagctggggtagcaagaatcgtagccgctggaataacatccccacacccccagggggaggggaagtaaagcttctgctacggaaaagggggtcagggtggagaccggagtcactgaggcgcccttggttctgtggtgacccaaggtggagccggcggggggcgagggggggaagagaggacgtacggaggggccacagggatcgagtttccagggcagagttgggaaggtaagccgcaaggtgggacacctgggggaggacacagatagggtgaggagcccctgcgcctgggaagaggagacatctgttctgagggaggctaaagaggatggaggagtgtcaggaatacctgcccagaccaaggggtcagaaggcaggcaggacccgcctgagggcatctctcatctggcagtgctggagcctgtggttagagggacaagacccggtggcatcccagacagcactatgatggggtcacttattctaggaatgggtccatggcctcccctctgagacagtcagtctcccgcttctaggctgtgaggggccccctccctgagaagtctgagtagagggaatttcatcctcagctgctacccgggtcagccctggagtagcctctgcattgcccaggcccctggaaacacctgctggctggctggtcatccatttggaatgctctcctagaagtccctgctgccatcagg

SEQ ID NO: 6524 - DNA, 6000 bp, Homo sapiens; identical to SEQ ID NO: 1823

SEQ ID NO: 6525 - DNA, 6000 bp, Homo sapiens
ttagcattccctcaatattctagcagccgttgacaaagcctggattaattgccaggagggatgtaaagataatattttttttctcgaaaaagaaaggagttttgggtgttgagtaggcaaaagacaatgagcatgcatattataaaggttttatggcaaaataatttgtgttctttatctttgcattcagtgattgccacttggcataaatgcttgttgagccaagcctgagataatgattgagctaagacttgaaggtgagcaggagctcatgaaataaaaatgtagggaaaatgtatcccaaatatagtatttaataatgtattaatatatgaacaagtgatcgaataggacaaagtatattaaaaaacacagtctttcaaataactcagttcatcaggaatataggattcacaaggggagagaatgacacatgggattagagaggtggatcagggccagattcacaaagtgcctgcatttatacgacaatttttattgagctgctaacctgtgccaggcactatgctcaatgctgagggtatagcatgcaacccctgctctcaggaatcctttgttcatttctcatacctcattttatcctgtgaggagactttgaggagctgtaagcagagctgtagcatagccattttcaggttttaggaagataactctaccataataggctggatagtaggtttgagcaggtgatactgaaggcagggagacaggtaggagacttgcaactgtctgcgtgagagatcatgaggggctgagccaaggcattggcagtgggattggagagggtaagctccagagctcaaactcgttctgaaacttagagctccttttccaggatgcttgacaccctcttcagatgaacagagtgtaactcactgtgggctagacataccattcctgctcccccttcctgagtgcctgtgcccctcagctcttttgctcagacccctcctttccggcttagggtacagttcaagaccacctatagctcaagctctcagaagtctcttaacactcttacttgctgctgtcctacttttggtgactaaccaccagaataggttagagagcagaggttattgttttaggttgctgtggtatctccctgcagttgacagctgcttgagggcagagatgctgttttgttctcccttgaccctcaggccctagaatgggcagaaacagtacatgttcctgatgactgtgccccccaactttgtgagacacaccggaggtactgatggctgaaaaattccatcaccacgcttctgtccagcactgtctgaggaaggcttatctcccttaagcacacttcttgagtcactctctgcttttaaacctcccacagcttctcatttccccttgaactctccttagcttttatggtcaatcaatcccttcactccatattcccccagtagatacctctgctctcatcagacagaggcttgttcagacagaaacacaccttgttaaggtctgcttctgatttttactgtcacttgcggtgatcccctgtccagaggcttccctcacttgtccctctgttggtccagaatcaaggacatccttcacatctcagaaacccacccagtcccatatggttccaactctcagagatctccctacggctaaactgtggcaattagaggactgtcataagacaaaactacttctatgacccccatcttatcagacaattgcattctcccttctacaaatttttgtataatgctgagaaagaagtagctctctgaaatggcaactccaagacttcaatgaaacttttagcatctgttggtcaatcctcctgctgatactgagtcaccactcatttgtggtgattctaaacctcattttatgattcacattctaaaaatggggtgaggtttttaccaagcaactaattccagtatgaacttaacctcacaattattgggttcttctgtgggtttccagctgcttagcacagcacttttcaaggtctgatttcttatggcttattggtgtggctcttccatggcaaatacctaaaatccattttatggatttatggtatggaatatgatggggggttccatgtgatcaatttgttccaccagtcttcattgggaccactcattgtctgtcaccagcccatgtctggtctgggacaagtgaaggaaggatagataaagttttggggctcttttttcgttcatacgttctgaggaatggtcttggtactttggccagaatgcacctatatctataatgaagaggatttagaatctgccttctgggcactgtagctgagcacatgactctacttagcattttgaacaatgactgaaaccagattctgcaaatgacagaaatgcagtggtttcatgaaatctgcattccagtcccaagacttctacgaacaagttacgcaacgttgggcgagtcatttaacaatagcagcagtgctggcgatggctaacattggtttggaatggagcctggggcacagtaagccctctgtaaggtcacctgctgttttcattgtcatcgttacagagggtttattacatccagtccttagtacttggcgtacattatcttgtttaatcctcggaattatggagtgagttttattattctttctgtacaaggttgaactgaagcttaaagaggttgagttatgagtccacgactgtataggactccaagactgtataggactcaaatccgaacaacctaactcctgggcctgtgatcacaatctctattcgtgtgcctgatttccttgggcctcagttttctcataacacctgaagttgttgatctttaaaacctttcagtttaaaatttttaaatattttcctcttaccttcaccttcgtcccctgttctcttccctaccccacttatccatgacttttgctgggttcatcattgcaggattggcaggatgttttccccattgagtgatgacactgcatgtgtcagcatagggacttgtattgtgggtttttttttttttttttttgacgggtgctgtggggctggtttacatgctgctgtcgttgaaagaggaggaatctgactcttcaattttactgccttatcttggcccgcagccattaccacattgagtgacacacatttgacagggcttgagaaagtcgtcaaaggcagaagccagtgggaatcagctctttgtgcttgtggaccctgcactgctctctggtaagatctggtttgggagacctgctctctccaggctgtttgcctatgtctggccttgtggttggcaaggatcctaggagagggacttggagaagaggcttctgggcttcccatcctttatacagcttggggtgtgctggcaaactttcacatggggagtttcccggacatttcattacagttccattgtaattgatatttgtaaagtacttaagttgggtgatagtctatatgtactgtattctgttgtacttctttgcggctgtgacaccagggttagagtgttttggctgcagaagacctgggctcaagggttggatctatcacttagtgtggtgcttcaaacacacctgcttgttatggcttttacttgattattctttgggtgagatcttattatgaagaaaagtcagccactgtgctgagatttgtaaactcttccacttagcctggaggaagcattttaccaaaagggcctggaagcactaaaagtattaggtaagtcacttaatttttctcagcccaaatttctttatccatagaagaattagagtactatgagtcctactcatcaaaatggctactgaatcaagtgaagtatggtatgaaaatgtgtttctgaaaattataaattctatataaacattagttgtttttaggaagcatcatatgccaaaactgttttaaacaccaaaaaagcaaaagctgttcatgtttttaccgattttcccacctagagattatttactgcagatgataacctgtagtaaaatttcctaaacttttcattgtgcagcaattggaagactgtgagttaagttgttctagaaactatctgaatattgtgtatatttagttaataagaactgatattgttcaaggtatatagtagctcttctatggaagcacattaattttagataaattcagattttattaattcattataaatcattattagatcaagagctaggttcaggttgtaaaaagatattaataccatgaacaaaattatgtcaattaagaatctttctgtattcctagaacataattgcagtgtgagcaaaggctagaccattgtaactaatttaaataggcctagattgaaaatgttactctaactcacatttttcactaccacagatgttccctatcctcttactccaaatgaacaagatcacttcatttctatttttcttgattgataaaccatgcttggagataccatctggagattgttgggtttctgccagagatttaaatcaggtttataaagagttacctgcctaaggcaagaaactggactaatttaatagaaaagaacatgcttttattttgccagctagtaagagaaagtgaaagcattttgaaaagttttaatatttgtttagcaatgatagtattatagatgacaatatttctaaaatacaataattagggaaattagagaatctaattgctgaaatttgtgtaattatttgcaagtgtgatatgaaggcttatctagaaaccttgatgctaaagacagacatttcagtataaaaggtgagggcatgacaggaacagagtgaagtaaggcaagttggaaaccaccccaagccttcttgtgggcagcgctaaaagccctagacctatgtggattcagtgtaatgtgatggttatcctttttaattttttgtttgtttgtttgttaaacagatttctgcctggcagattaaccaacggcaagagaggctgatctgtctacattctgagtactgcccttggcaagacacctagaacagaccctggacccaagtctaccgtactaccatacccctactccagcccaccccagacagtattctggggttcacctgaggtcagcagtgtgaagatgaccagtgcctttttagcatgacgactttggaccatgtgattgccacccaccagtcagaatgggtctccttcaatgaagagccaccctttcctgcccactcgcagggtaaggagtgccttcgtttcctaaagtgaagagattgtcaaagaaccatgtctatttgttatggcttctacttgattattctttgggtgggatcttaatatagaaaaaagggtcagtttctcactttctttcttgagatcttagaatcctaagtggaagaatttacacactgaaaaagcatcttgggaaccttagggccctaaaaagaggcttggaaacaccaaaggtagtggctcttttctcccaagaaacaaaaacttaatatttaccaaatactttactctcagcctttttaaaatgtagttattaaaagtagttgttaaaagtgacaggctctggagccagagtgcttgggttcaaatccctgttgcaccagggatgagtgatatgcttttgggtagattatttatttaacctctccatgcatagcttcattatctgtacagtagggataatcagtacctatctcacaggttgctgtgaggcttaagtgaattcatacataaaagtgcttagagcagtgcctggcacgtggaaagagctcagtacggtcatccttgatcataaggaggatgactatattgactttggagaacttgtgctcagggatgaaggtcaaggtaggatccaggagatatttgcagagacatgtgagttggttctgttctactacagctaccagtgccaactgaagtcatcccaccgtcatttataacacctagaaagtgtgagtcgacaggtatgctctccaatatggtggccatgtggttactgagcccctga

SEQ ID NO: 6526 - DNA, 6000 bp, Homo sapiens
ccttgaataagtcactctgccctactggcctcagcctcccgataatagggaaagctcagatgtggatggtccccttcctgaatgggggacccccaaggtgcctggagagggggcagctgcttcccagccccgctgactgttgccacgtgggaatgtgggccgacgttgccagatcttccaaaattttcagtagaagccaaaaatacggattttaaaatgtaaactcccaatttttaaatgttggctcaaatgtttaaaaaaaaaaaaaaaaaaaaacctttgtgcaggccaaatacaacatgctggtggtgggccagatttagctccgggaggccagttcgcagtcaccagcctagcctggcggcaccggggcacagctgggaaaagggaggccctgtatgaagtcacacagagcctagacaagacccagggctcaggtcacaggtgggacagggtcacctctgcagccgaggccaggtgcccaaattccccaggggaaggacattcttggccccatctggggacagccccaagccagggcctgggttcagatcctcaacttgccgggtaacccagggcaagcactcttccctctcccattgatcagataaggccaggaaagcccgcggctcatttgggactgcagcggaggctctggggaaccccaccacgtgcccagcaccagcgaggcccttggggatgcctggggttcacgaggcccaggcggctctccgtccttgtcctacctgtgggtcagcgcatgacaccgatgatcccgctctcctccttgagacagcccccgaaggaccacctccacccttaatgcagactctcctcccacctcccacccaccctttcccagtctccttggccggtcctgctcacctcctgatccccaacagtggcagagtcccgggctctgtcccagcccctgtcgcctcccaccgtggctgccctggcggcctccccagtgctgcggctgtgtcacctctgatctggccatttccaggttcacatctcctggagcctcccctgaactccaagcccatttcccagcccttggtgtctcccctgggatggccaaggggcaccaccagccctgaattccccatgttcccctgctcaacatgaggtcacaatgcttctgtcacctcaggggttctcttccttccatgtctgcttctagactgcctgggaatctgagaatccctcccacctccaccccaggccccgtgggcctggctggatgccctggggtcctgcacttgcccctctccacacagtggtgtgccagagacgcccccattcatccctccaggggctcccatccacctcatggcagaagccaaggtcctgatgagggtgcacgaggccccgcaccccagctgctccttcccactggtgaccgggatgcttcccaactcaccaggcacagccgcagggctgctcctctagcgacctcccaggactcacccgcccctcctctggcggccccttcgggactcacccgccccgtcctccggaagcccctccccccagactcaccagccccctcctccggaagcccctccccccagactcaccagccccctcctccggaagcccctccccccagactcacctgctccctcctccagtggccccttgggattcatctgctactgggctcagctcacttcatccgggcctctgtgttcatcactgcacccctttcctgccccaccctgcctcccatccttctctgtacacatatccccgtcggacatacagggtgggaggggtggtgtactgattcatctcttggggtctgtcttcctgcatgagaatatcagcacagtgagagcagagaatttcatccagtctgaccagtgctgaatcccccagaacagggctctgcacacagtcagtgtttgccaaatgaatgtcacaaggcagggtaccatgtaaaacatcttagaaagctgtccactccaagtgatcagttagaaggctggctctccagaacagccacaccccgtccccaggacagtcccttacacacagccgccttgttgctcccagtgaaggattttccatctttccttcctagatgagtaactgagggtcagagaggttgagagccctgcccaaggtcccacagctgcggagaaggcccaaccccccagggctcatctctgccctccacatgttaggctcatttcctcccctccaggaggggtaagggcaacaagattcagggaaactgaggaagctagagcccagcatgggtgtaaggagtcctggggggccaagcactggggttggggtcggagaggccagccccatgccctgagggagggtggggctggcctgagtcggaggcagagctgggacaggaacccaggcctctgtccttggcatggcactcctcacctggcaggccccctgcagaggtgggctcactctcctcttcacagtgtcagaaatcagccggatttagggggcagtgggcagccgtgcaatggggtcagatggtccggcagaggatttatgtgctccattatgggggccacagcaggactgacccacatctgaagaggggtttcccagggcagagctctgcgaagatacgatgcccggtaccaaggggctctgtgccctcccgcgcaggggcaggcttgaagaagggacgcggatggtgttagaatgacgaggaccctgctgtgagagcaggaaggatgctgcccagggctgaggagcaggtgcctctggctggggattaagacgcactgcattcgttcaggccaacaccacctgctcaccgcagggcttccatgccaggccctggacacagggagatgcagcggcagaatggaggagctctgctgtcgggcctcaccgatgctttagatgggtagtcagggaagggaggccccggccgtgcagagtcagggcagaacattccaggtgcaaggaaccagtgcaaaggccctaagacagggatgggccaggtgagcctggagccagcaaggcagccagtgtggccagtgtgtgcctagcgaggggaggctgctgggcatgggggtcggatgatttggcagggccaggtcagtatttaccaacccctcatggaggcctgacaggtggcacagagtcaccccctccaccttgtctggggaggccctactgtgtgccagtctctgtgcccgggtgccacagggaagatagcaaggtccctggccccaaatctccaagctcttgcctataaactgcaaatgcacagctgatgagacccacccagcaaagctgctgtgacacttcaatggaactgatttctgtgaccgggcccaaggccaccctggggacacagcagcagaggaaagggtggacgggcatgtttctgacccgggcggccctcccatcgctagtaagaaaaggaagtagtaggtgggagggaggcagctgggagctccacaggcctcagcccatgcagggatgggcacgtcatcaggacccagatggccacaggtgggagtgaggagagagcaggggctagtggccaacaggcagggctcctgtgaggggtcagaagataaaggtggctgctgggctggaccaccagaaagaggtagggacttaaggcagacggtggggagaggtgtgttggaggaagaggcagcgggtgtgaatggggctggacagcgcccagaggcggggaaggactgtgccatgaggactgtcccccgagggcacccagtgtgcaccctggggtcccagcctccctaagggagatcccgccccctcacttcacagtgggaaccctggggcaccccacagactcctcatcctcatggcccccacccactggcccaagacccaggcagcgccgcggttctccagcccatcaggcaggcctcggctaacctcaggggacttgagcaagccacttcatgcgctggcctccgtttcctcacccgtagtaagggtctcacgaaaatcaccgagtcttgtggtcaatgaatggctgaatcaaaacttgcacccggggtgctgggcccgtgcaggagcctcatgggagactgtccccgagggcgtagcacctcggccaggggagcttccctgctatcttctccctagccacccataaagatgcctgtgtcactcctgcatggagagcatcaggcacaacccatcttttagtccccccgcccctgccaggtgctgggctggtccagggacacagagctgggacacagagtcctgtcccatctggtgtgggggtaaactcagtgactccccagagttcccacagagggccgcatggaggatacagcctccaagggggagggcagtggttgccccgaaggcaatgggtcagaggaggatttgagctacagcagcatcaaagccaggcttcaggctctagaataggcttgaagggcaggggctgcctgttccctgcctgtctcttgccctgcccagcccccactgctccaccagggcagctcagcaacctcccctgcctttccccccagttcccttctgggggtggggggaattcccatccaggccttttagaagggctgaaacattcaatgtaaataattaatgctagatttttaaaattaaattttaatacattcttattaattttagacaaactccctggcaggtcattcgccgtgagtgattgaggttggcaaccagagacagcctttgggtgggaaaggctcctgagcagtggggtccaggcgcagctgggccccttcagctgcgggatctccagcaagcctcttctctgttggagctttgctcccgcatagggggtccggggcttccatggcagagctgtggtgaggagccgtgggaagcgctatgatgtgtaaggggcggtggacgttattgttatgactaccgtggccattctgctgagggtggcctcccaggaccggaggggggcggagggggttttcctcattagcccctggagagcagagcttgcttcctctgctgtcccctctctgctttgtctgctgtcccctctctgctggagaacttagcccagagctagtgaacgagtgggtgtccgtggatggaggaacacttggatttcttgggtttggtttgatcctggttcaggtctgaccctctgagtggacggctcctcccaccctgcgctggctcagcgcaggccaagcctgctgggtgctgggggtgtcctggtgagaacacagggctcctgcccgggagctcacagccaggaggggaaagggccaggaaagacaggctccagtgccgtaggatccaggcatgcactgtccgtgtttattgagcgcctgctgtatgctgggacctagcatgagaagcgctgtcatggggacccggaaaggtgggcctggggaagagagcggtgtgggggtcgcgctggccggcggcaaagtcttcccggcaaactccttgtcttgcaggaggagggtttatggaggggtccaggcttgtggtcttggacaacttttagagcgtctggggaggggaaccgccatccgggcgccttagggatcccttcccctgaaattccttcccccaccccagccgatccgcagcccgcgggtgcggaagggcagtggagcgcctcgtccagctgcctcccccttccccccagctttcaggtgaggaaactgaggccgggagagcgccggaaggccggcccgagcacccgggaagttggtggccgagcctggccgaggccccggggccgggccttctagcttggcgctgcggccgggctgcgccctcgcccggcggggcggtgggggaggcggcgtggggcccggacccgagcggagcgcgctcccggcggacgcggcggcggcgcccggcgcgaggggccgggatgggcagtcatcagtcttcccaggtctgtcgcgtggtccctgagctcggacccctgtcccccttgagtgccagtcacggcacagaaagacgggcaaagccccggggagcggcctctcccgggtgata

SEQ ID NO: 6527 - DNA, 6000 bp, Homo sapiens; identical to SEQ ID NO: 1819

SEQ ID NO: 6528 - DNA, 6000 bp, Homo sapiens
ctgcagttgttcactgggctggtttaagatctcagacaatttcactgatcaatcaatacaggcagtccaacttacaacgactctacttacaattttttgactttaaaatggtgcaaaagccatatgtattcagcagaaatcatacttcaagtatccatacaaccactctttttcattttcagtattcaataaataaaatcctctaacacaaagcccattttataataaagtgttgaaatatgcaacattttattatacaataggctttgtgttaggtgattttgcccaactataggctaatgtcagtattctgagcacatttaaggtaggttaagctatgatgtttggtagattaggtggtgtgttagtccgtcctcatgctgctgataaagacatacctgagactcgataatttataaagaaaagaggtttaattgactcagttccacatggctggggaggcttcaggaaacttacaatcacgatggaaggggaagcaaacccatctttcttcacatgacagcaggaagagaagtgctgagcaaaaggggaaaagcccctcctgagtagttgggattacaggcgcccgccaccacacctgggtaattttttgtatttttagcagagacagggtttcaccatgttagccaggagggtctcgatctcctgacctcgtgatccacccgccccggtctcccaaaatgctgggattataggcgtgagtcactgcgcccggcctttttttttttttttttttttttaatcgttgttctctcttctcttgctcttgacttttgcccttttcactgtgcttgctttcttattagtcctttccccttctaacatgctcctgctcatctgctgtggttttgaaaatcaggaaagtggcttctcctttaggctattggttcagctgctgcaacagagaccagacaatagtgactttacaaggttattgctctcccgtgagaaaaatgcaaggtggtcaacattgtagggcacttctccaggtcatcttgtgactcaagttcttcctgccttgatgcttgactgtctctagggagttgtcctggtcagcatcatcaaagctgccctcccctccaccccatgtccacatcccagtcttcacaaagaggaaagaggaagtagagaacagccagcttccttttaagtatgtggcccagaaattaaacctattacttccactcatatctcactggctaggacttagttcatacttccacctggcttcgaggggttctgggatatgtggtctatagtaggagagccataaatccaggttttaatcttgggagctctactgcaaaaaggaagagggaaagaaaaggggctcttagcagtctctgccacactggatctattgaaattttgtgtggagtaaataaaggtgggcaccaattgaagacacaaggtgatctgcagaaaaagcccctcccctcccctcctcttccctcacctcccctcccctcctcttccctcccctcctcttccctcccctcctcttccctcccctcctcttccttcccctcccctcctcttccctcccctgccctcccctcccctcctctcctctcctttctgatgtagatctctctatattgcccaggctggtctcaacctcctggcctcgagaaatcctcctgcctcagcctcccaagtagctgggattacaggtgtgagccaccacacttggcttccatcccccttttctgtacctctctctctgtctattttttttttcttttgagacggagtctcgctctgtcgcccaggctggagtgcagtggtgccatctcagctcactgtaagggttactcagagtccttttgtttcttttatattgttctggattatgttcccagaccagacattggaggttaacaacgcggtcatgaagacaataacaggcataatctttcagatttgacaactcaggccaaaggcactcccaccccaatccacaagtgagagcatgataagtgttttcagtgtcacagaccagaagggcctttcttttgaaagcctcagttattcatacccatacacctttactgagaaccttctacaagctgacactcatctaggtggttggttgggacattggggtcatctctttccccaccacacagcccacctggcatctccatgggttctcctccttccatgggttctcctcccttccttcccttccctccctccctccctcccttccttcccttccccttccttccttctttccttccttccttccttcctttctttctttttctttctttctttctttctttctttctttctttctttctttctttctttctttctttctttctttttctttctttctcctctcctctcttcccctcccctcccctccccttccctctcctgccctcccctcccctcctctcctctccgatgtaggtctctctatattgcccaggcttgtctcaacctcctggcctcaagaagtcctcctgcctcagcctcccaggtagctgggattacaggtgtgagctaccacacctggcttccgtccccctttactgtatctttctttttttttcaagacggagtctcactctgtcgcccagctggagtgcagtggtatgatctcagctcactgcaacctccgtctcctgggttcaagtgattctcctgcctcagcctcccaagtagctgggattgcaggtgcccgccaccacccccgactaatttttgtatttttggttgagactgggtttcatcacattggccaggctggtctcgaactcccaacctcaagtcatctgcccgcctcagcctcccaaactgttaggattataggcgtgagccaccacacctggcctctctttacggcatgaccttgatgcttatcaggtttctcctctaggaggtggagtgggttggatatgggcttacaacagcttctgtgatgatgaagcagagaaggaaaagacgaactgcttttgttgagaatttatgctgtcccaccagactgtgaatagcataactacagcaacaacaatgaatatttgcagagcatttattttgtacatggtatttcatttaatcctcacaatcaccctttaagcttatgattattgttttcccccattttccatatgccaaaaaaaaaaaaaagcacagagaggttaagtcccacatttaggtggcccagctgggactgaaatgcaggcagctagcgttcccagcactattcttgtattgatctgatttgtctttgtacccgccagcctttatcctagaagagaataaaggtgtcagagcagaggggtgtgagacctcaactagcccagccctctcagaattacagatgagagggaaaaacaaagagagatcaagtgagctacccaaggttgcacagcatgatagccgctaagcaagggctggaacctagaccctgatgccctgttgccactgcagaatacgtgttcaaaagtcttcccgtcccgtgaatgaaaaagataatgagtgggccggcgcggtggctcacgcctgtaatcccagcactttgggaggctgaggcgggcgaatcacgaggtcaggagatcgagacaattctggctaacgcggtgaaaccccgtctctactaaaaaatacaaaaaaaaaaaattatccgggcgtggtggcgggagcttgtagtcccagctactcgggaggctgaggcaggagaatggcgtgaacctgggaggcggagcttgcagtgagccgagatcacaccactgcactccagcctgggcgagtgagtggataatggatagacttcgacagagtctgtctatgtggctcacccttgggtcttcgtggggtggttgggtcatgagaaccagggggtcaggggaagagggagatgactagagtgcgccagcctgatacggttgtgtggaagggggtgctgtgctgctggttatggggaaatcaacccatgaaagcataaccagcctttgaccccctcctctggcacctcatgaccttgtgttcacagggcttcctctatggcattcttatcatattgttaacagccctaactggtgaaagggagtcactttcagagagcattgggcagtggcttctttcccatcagctattgtactgcaagtgccagataatgtcgatgacataaatgtgcctaggcccctgcctgggagggagaggctgtttactactgccccttgttttgcacactggtctttgggggttgcaaacactggcacctgtcctcggggtcaaaaccagtgtctatagcagagtgggcaggactttgatgaaactctgatacctgcaggattgtggcccaccgcaaaccggaaatgacccagctcactcccttggccctccctggtggggctgtggccaattgtagatcactcctttgctgtagaaggagtctgggtagcagctgggtaccagccactaggctggtgccaggacctggtccttgggcggggcagagggctatctttgtgggagtggagtggcttttcttgcttctggctgatgggactaaggagactgggaaaggcgacatgcctcagggagggcgaggggaggtggcaaaggagctgccaaggcccaatgcatcagggcagctggagcaagctggaaccagggaccggcagccttgtgtgtttgagatagtaatttgcagatggttcctggtagcgacagggtctctgaggcggagcctgggtcttcgcgtaggatctgccagcctgggttccccggcaggtcagagaagctttggggcggggccaaggttggcccctgcttgggaggagccgggatgcctctctcacagtgatgcagagaggaatttgctgacagtcccttgccaggtggggctggcttcgcccagccggcgaggaggaggacccgctggcagtctcctcccaggtggggagcgtggagcctgtcactgcagcctggcggcctgagcgccgagcctggggctggggccgcggtgctgaggacgcaaatgtggtgagcacgcgatgcgggtgcggtgaccggggctggtcgggccgggaagaaggggcgccggatccaggtcccgcacggggagggggcggggaaggattgcttgtttctgtgctttctgagaccttgcattgggagggatgggggtaggggagactgcgccacagtcccttgccacgctggctgtctctagcttgtacccaggaaagggtggcctgagccgcccacccgggagggcgtggctttagtagaccggtcttcactgggttgggggaacggaggtgggtaggaggtttgcttggggggtccccggcctcctgcctgacagccaggtgggagttaccgctcggggctaccctctcccccacccagggattccccggggctctgccgcccactctctgggctgggacgggagggggcagtctgctccgccgttatgggttatgacaacgtcactgctgcgctgctgcctggcgggctgggctcctgggcccccaggggaacaatgccaccctttccccatgtgcttccaaagaaaggctcttgcctccctactcgccctggccttgagagaggaacgttgtgtttggatgaaggccctggggaaactgaggcccaggggtgctgtggcttgaccaaggtcactgagcaggccctacagagctggcctcccaggcactgccttcaccgaatgccctctggaggggcaggggcccttcttcctctctagaccccaggacctccccccaccccagcaccccatttcctcatccctgagaatgcagggagttgcaacttccgcatggggctccagggtatcatgggtgtaagcagcaattagattgtctggggacaggagaaaattgctcatgaaaaacacctaagtgagcagagggggtgtgagcgtgtgctgttcttgtgggttcaaggaaagaatgagagttggctttgaggagaggaaggcccgtgctgatggga

SEQ ID NO: 6529 - DNA, 6000 bp, Homo sapiens
tgcttgggcaacgtctgccgccccctaggggacaacgcagccttcccgcaagggcagcccgggccgcgcacagcgtgggctcgggcgccggtggaggaggcctgaaggcagcctggatctcctagcagtcaccctgcctgtcggaggggcagccggctggctccagtggactctcccaggctctgcctcctgccgtccgcagaagaccccaggtccatcgcctgctggaaaaatcaagaccccgagaggtcacgccaccagcccagggtagcacagccgggagaggcagagccccgggccagaccctaggctgagggctcctcccctcgaacaggcaggaacgatgaggcctggaaggaggctggacagggtacaaacagcttcattcctgttcactgttcttttactacttttttttttttcaatgagacccaggctggagtgcagtggcatgatctcagctcactgcaacctccgcctcctggcttcaagcgattctcatgcctcagcctcctgagtagctgagattacaggcccccgccaccacgcccagctaatttttgtatttttagtagagatggggtttcaccatgttggccagcctggtctcaaactcctgaccttaggtgatccgcccacctcagcctcccaaagtgctgtggttataggcgtgagccaccacccttggcccttttactactttttaaatttttttagatggggtctcactcgccatgttgcccaggctggagtgcagtggctattcacaggcataatcccactactgattggcacaggagttttgccttgctccatttccagcctgggcgggttcacccctccttaagcaacctggtggtctcccactcctgggaggtcactgtatggatgctgactgtagtgtattggacaatcagcacagtgcgctacagtccagaactcccgggctcaagtcgtcctctcaccccagactcctgaatagctgggactacaggcatgcgccaccacacccggctactcctttttatcacggactacgacaaaggccatatactcatcatctttctccttttcttcctttctttttttgccagacaatgttaaagtaaatttcagccatcgtgccatttcaccaacctgtacttctgtttgtatctctaagaaatataggcattttctcacagaactttggtgccattattgcacctaacaagaataataatgattgtttaaagtcatctaatgccactgggtgcggtggctcattcctgtaattccagcactttgggaggctgagatgggtgggatcacttgaggtcaggagtttgagagcagcctagccaacatggtgaaaccccatctctaccaaaaatacaacaaaattagccgggcatggtggcacgtgcctgtaatcccagctactcaggaggcaactcactgcaacatccacctccttggttcaaggagaattgcttgaacccaggagatggaggttgcagtgagccaagattgcaccactgtactccagcctgagcgacagagcgagactccatctaaaacaataaaaattaaaaataaaaaagcaaataaagtgatctaatgccattggctatctccagctgaggacacccaggagggcagggcctccaggtgcacaccttcagggaggacaaggtgctcggtggaaaggatggatggggtgatgggggctggtgagtgacatccttttgaggtccctttgatcattagggcccagcacagtgtgggtgctgagggtgtggactgactgacggcctgtctcagattctgcaacactgtctcacccctttcttgtggggcccctgccatccttccatctgtctttctgtccatgcgttcatcgctctaccccttcatccatccactcgtccctccatctatcacccactcatccatccgtctgtccagccctcctcccatccatccatttgtccacctgcccatctctccctcctccgtttgtcttccatccatccatctgtctgcccagccctcctccatccgtccctccatccctctgtccatccatccatccttccatctgttcactgactcattttctcacatacttatttacgtggtctccccagggtgcccacctattctgggtgccatgggtgtggagacaaacccagcaccaccctgcctgcctgaagcccacagctgagtggggaaatgtttagacctgcacgaagcagcctaaatggtggggtggcctgttttctatttctgcctcagagaagagggtcaagttagggcatgtttgttcaggagacaaagggcaggtaaaacttggctgcgatgactgagaacatgcttgtctcaaatgtcaccttctggggcctccctaacacctcctgcaagtctccctctccccgacaccttatttctctcctggcacttgccgccattgcgggtactctgtattttggctattcatctgttggctggctgtcctcctccctgaacataattatggtccaccagggcaagggctttttttttttgggacacagagtctcactctgtctcccaggctggagtgcagtggcccaatctcggctcactgcaacctcagcctcccgggttcaagcaattctcctgcctcagcctcccaagtagctgagactacaggtgtccaccaccacgcctggctaatttttgtatttttagtagagacggggtttcaccatgttggccaggctggtcttgaactcctgaccttgtgatctgcccgtctcagcctcccaaagtgccaggattatgggcgtgagccaccgtgcccagcccagggcaagggcttttatccgttgtgtttactgatgtgtccccgtgcctaaaactcgacaggcagccttggtttcatgagtagagggcatgggcggggcgggctgcggtccacgggatgatgacgcggctgaggccgtgcagatggacagtggtgaagggagctgaacgtgaatttaagaggttgacacacaggactggggactctggatgtggggtggagagagagaggtgtccagggcaattcctgggcttctggctcaggtgctatgggtgggtggcacttgctgcattggatgctctacaggaaacatggatctgaatggtccctgttctttcagttagacacagtgcttcaaactccctcagcacccaaggtactggcttcttgagtgcagcatcagcaatcaaacccaagtctcagctgtatttgccctgcccagaacaggccagccacctccttccttccagactctatgcttctgttaatgcagcattagcatttagctggccactctcacagggacacgcccggactttgccctgcgtggtcgcagatatgaggcaggtactctcttcatttcatggatgcagaagctgaggcacagagtggtcaaggggctggcccacggtctcagctgtgagtggcagagctgggctttaaaggcaggcagccagcttctaaccagatgctaagcttcatccccttgagggccaggactagcattgggactggccttggatgggccacttcccgccctttgccctctgccgtggcagctggcactgctcatcctgtgtctcccacttgcctataaatagccgggctggcaggggggctgtccctccatcagctctcagcctgctcaaggccagcctgcaggtccagccattagaggacaggaaaacaggtagacaaagagcctcctggccttgccacctgtcccgagggctgcccagatgggctgcctgggcctcatgcatcaacacctgcccctcccctatcctgctggcattccagtctgtggggcactcacttagattctgttgctcagcagctgtgtggccgaggtacctgcacagcctccctgagccttggtgtctcacgtggagatctcacaaggatgcagtgcaggtcacatggggcatgcactgagtccccttgagagccctctggggcctccccaggcgggcctggatatcccagagggtgggttgtatgagagcatctggggatcacatccagccctgccgccctcgtggccttggacaagccccctttctgggcctcaatggccccatctgtgaaatggggagcactaacgctgcgctgtctccctcctggggcggtgaggaggatcctagagcctgagagtgaggggagcttggtgaactgtaaggtggggtgcacgggcaaggaggtccctgtttttacagtgcccagcagacagaagtagcgtcttagtggagaggtttccccttcaggagggccccagccgctggttcagaggctgaatcggcagcctctgtccctggttcatgtgggcagggggacttggtggaggcagccttggccttcgcctctgggtccagggagacacattcccatggagcagagagcagggaaccggggcagcgggaagggtgagagcagatggtgggtgctgttcctgggttcaggcctgtccttgccaccccctccctccctgccaactggagctccttgaggacagggactggctctcatttgcctgggtgtagcatcagcaaagtaagtgttttttgagtgagtaagagagggagctttgcaggtttcccaggcaggggtcctgagcaaatccaggggagtcgggaaagcccaggggacacagtgaaggcctgggcttggacctggagggcgagagctgtcacagccccatctctggaccttcccaggaggtgtttggatgtgatggggcagtgcccctgctctctggtgcctgtcacctcccgtgctctctcctgtgttttcctgacacctgggtcccgagggcactgggacaagggtcccgggggcagggagggagtccagctgtgtgccgcgtggcctcagcaggctctgcttccggtcccctcccctgccgcaggtatttaaggtctgagaggggccagctgggagctgttgaggccaccctggtggcaccaaagccctctcaggcaggcagacccagggcctccccgccacaccttgttcatggattttgtcgctggagccatcggaggtaacagacaggatggtgggctgtgcagacactgctgctcctgggggtagcaggaggaactgaggtccaggaaggtgctgggcagcagggtgggctttgaggagcccctcaccccccaggatctgccaggagcagagagcaggttcctgggaggctaaggctgggtgaggggtgctgcagggcctggggggctgcactggcctgggaggctcagacaggaggctgagggcaggctggggatggggctgtggtctaggcatgggggccgctcgggaggcagagtcagggaggctgggagtccttggtgtggggaggggtgattgagtcactggaagggaaagaagaccccaggagaggatcgagagggtggggagatgggtagggaagatgggcctggtcctgcagcagggactggaaggggcgggcagaggacggtaaggggcctggcgaggtggctccacctgccctgctgggtgtgtgcacctggctaggcctccagagcctgcttctcaggccagactctgctggagaaaccgttctccctcctggggaagggctcctggtgaaagactgattcagggagataaccaggccctgggacacgggctcagctccatcccgtgggctgtgggggctgttctgagtgggcactcctgcccttgctggtcttgtgaaacatcggtgggtggcgtcagtacttctggaaacagcatgggggttgggagagcggcccagctctggccctgggagaaggcagagtacctgccccattaacaggctttttcttttttttttcccttgagatggagtcttgttctgtcgcctaggctgaaatgcactggcgtgatcttggctcactgcaacctctgcctcctgggttcaagtgattctcctgcctcagccgcccaagtag

SEQ ID NO: 6530 - DNA, 6000 bp, Homo sapiens
tgggaaattttctgagttcttgtttcgtgctgttctatgtgaataccataaggagaaaccatatgttattttgtgagctactataggagtgtacattgggtcccaatactagaccagccagactcaggtaggacggagtacagaaataaaagcacaggctctgggaccagggaatctggatccaatctctacttttgattgcgtagatgtgtttttaacctaaggcttatttttctcatctataaaatggaaatagtaatagtccatatctcataaatactgggaggattaaatgtgatgcatgtaagatgctgatcatagttactgacccttagaaagtgttcaatggctgggcaaggtggctcatgcctgtaatcccagctctttgggaggccgaggcaggaggatcacttgagcccatgagtttgaaaccagcctgagcaacacagaactcgtctctacaaaaaaatcttaaaaatagctgagtgtggtggtgcacacaccctgtagtccttgctacttaggaggctgaggtgggagggttgtttgaacccaggaggtcaaggctgcagtgagccaggatcacaccactgaactccagcctgcttgatacagtgagaccctgtctcttaaaaaaataaaaggaaaaaaatagttttcagtaaatgttagctgtgattataatatgatcatcagtatatttagcccttcaaaaatattcattgactgcttgtgtgtcaaacactaggaaagtttaacacttaaacaactagctgtaattggtatattaatattggaagtattaataaagtacactgggaacaggtctacacatcatacaggaggttttatacattgctggagtgcaatggcacaatctcagctcaccgcaacttctgcctcctgggttcaagagattctcctgcctcagcctcctgagtagttgggattacaggcatgcgccaccacgcctggctaattttgtattttttaatagagaaggctttctccatgttggccaggctggtcttgaactcccaacctcaggtaatccacccacctcagcttcccaaagtgctgggattacaggcatgagccactgtgcccggccaggaggagatcttacatttaaggggtcttgaagtttggagaagaaggggaggatattgcaacaaggaaaataacggaagcaaagaaatgcccataaattagaatgagcatggtgtgtttgtggcctggatcactgtagactaatacagatagagctattaagagcaaggacagatgggagaagacacaacatttatgactgcataatcagtataattattgtatttggatatcaccagcccttaacttacggaagaagacaagagctgcaatttaggatttaggtagaagtctggaaagatatgggagatgtaatgttgacttcttgtcttcttttctcttttttcttttactttcttttttttttttttttttttttttttgcgagggtgttgcccaggctggagtacagtggcacaatcgtggcttactgctgctgcctctaatttctggactcaagtgatcctcccacctcagcctcccaaatagctggtactacaggcatgcaccactgtactcagctaatttttgttgttgttgttgttgttgttgttgttttggttgagacagggtttcgctgtgttgtccaggctggtctggaactcctaggctcaagtgatcctcccgcctcagtctcccaaggtgttgggattgcaggtgtgagccaccatgcccagccaattctagcattttttaaaaaactgctgagatgatttctggtgtccttgagaattcttcaaattatctgaatattaatttctagcattgatatttagaacaaggtccttctgactttttttaagatatctttcaggctgggtgcagtggcttacccctgtaatcccagcactttgggaggctgaggcgggtggatcacctgaggttgggagtttgagaccagcctgatcaacatggagaaatcctgtctctactaaaaatacaaaattagccaggcctggtagcgcatgcctgtaatcccagctacgtgggaggctgaggcaggagaattggttgaacctgggaggcagaagttgcagtgagccgagattgtgccattgcactccagcctggtcaacaagagcgaaactccatctcaaaaataaataaataaatcctttcattgccgtatcatctaaaataatgccaatattctcactgattttgggggactgatgttggaagatgactcatggaattaagaggatcagatggttcaaagaatcttgccctatcaaagttgtttacagcctaaaaatatttgataaatgaaggtatgttcaaagccttctcattctccaaagcagtgctgctgagaatatgcatcttttagaaggcagtagatcccaaagaccaacataggatgttttacctagaagacaaattgtacattgggctttaaggactcatgaaaccattgcctgtttcagacgctgaccggaaaggagattgagattgacattgaacctacagacaaggtgatgcatgcccaactcctcttcatgtacttcttgccatgtgtatttgtttgcatatgcttatgaacttggtccttttgctctcatgctgtctgcatagcccttgttctttccgtttccatggtcctacccctaagcagcagcccctgactacttgtctctctaaaggtggagcgaatcaaggagcgtgtggaggagaaagagggaatccccccacaacagcagaggctcatctacagtggcaagcagatgtgagtttggagtgagaatgacagcatggcgatcttatgtgaagatgagaagaggagagggggcacgtactgaggtggatcaggggtgcctcttgtttttggtgcctaagactctttggcaatctggtgaagcctctaagccccttctcagaataagattttttcaggcataaaacaaaatatatagaattaaaggaaaactaattatattgaaatagttattaaaatactaaaacaaatttgtgatatagtaatatatgtacttttttattaatgcataagatctaatggtaggtctaatatgaccataattttgaaatattttcaagatacctataaatgatcatgatagaaaatagttaattgctattgttaacaagttacctatattgctaatactactgtggtttttgggctatgtttaaagttagaagaaatgttaaatttcagttgggggttagtaaaaataaagatgggattttttttctcattcaagttcacagacccccaaagagatccaggaaactcaagaactcctgttctggccgggcgcagtggctcacgcctgtaatcccagcactttgggaggctgaagggggtggatcacctgaggtcaggagttcgagaccagcctggccaacatggtgaaaccccatctttactaaaaatacaaaaattagctgggcgtggtggtgggcgcttgtaatcccagctactcaggaggctgaagcaggagaattgcttgaacccaggaggtggaagttgcagtgagctgagatcgtgccactgtactccagcctagatgacagagcgagactctgtcaaaaacaacaacaacaacaacaacaacaacaacaaaaaactcctaagtcttctttttcttttttttctggcttccttttcctgcaggaatgatgagaagacagcagctgattacaagattttaggtggttcagtccttcacctggtgttggctctgagaggaggaggtggtcttaggcagtgatggaccctccattttacctctttaccctgtcgctcataatgaggcatcatatatcctctcactctctgggacaccatagccactgccccctcccctggatgcccagtaatgtatgtctactggtgggagactgtgaggatcccaggattcagtattcctggcccagagggcccttgctggctactgggtgttagtttgcagtcctgtgtgcttccctctcttatgactgtgtccctggttgtcaataaaatatttcctggcctcctggaatctttcttctgttgcacaagttgactgaaataaaaatggacctaatgctcactcagttatagcaggctgaaggaatcggacagtggaaggaatggtgctcttacggggattatcagactctaggaaaacctacttagtggtgtgttggaaccagttcctagtggctaatgagagccaattattggcacctttttccaactctattaagtgacttcatgttggtagcttgaaattggccatggtaggattatttacagaaactagcaaacactacagatcagttcctccccacaaactggttgttatacatctaccagtgtagtgctgacatggatggtgaaaccttcggagagtgaattctctcttgactgtggctgtactggacatttaggcctggttggagaacgccttcaagggtttggctgacactgtactctatggctggaatattactgaggactttgggttctacactgtcaggaggttgataatgcagaaagattgagtgacaagctgtgatgtatcacttgggtctcaagaagaggcaggtgctagaagaaaaggctttccttcttccctggcttcttagtataatagaatcgggcaaggctgggtggagtggagaagtagggaggatgcccgtggccaatgccttagaaagacttgactgctgtggttgcatgtgtggtcgtgttggtacctcgctgcaatcctcttccccgcccagcatcagatggcactcttgcgccatctccaggctgatgacgccccgagtggcgacgctctagtcgccatttgtctatggcaggcagggtggctgccttagctgccggaggttccgcactctctaaggccccgggtgaagccccacctctgctgcgcgcagcctgcggtgcgggtcatggcgcggctaccgaagctggcagtctttgatttgggtgagggacgggaaggggagaatttcgtaaggtgctctccttttccacatccctaacagcagctcccgaatccctgcatctcccgccccaggctgaaccttccctctccttcctctcgcagattacactctctggcctttctgggtcgacacgcacgtagaccctccgttccataagagcaggtgaggtagggacagggaagactgggggcgagataggacccagccagggctgagcgcactcttgccctctccagtgatggaactgtacgagataggcggggccaagacgtccgactgtacccagaggtgcctgaggtcctaaaacgattgcagagccttggggtgcccggtgcggctgcttcaaggtaagaagagcgactgacaactgacagtgtaatgctgaagggtgcatgcaagagacagtgaaacccctggtctacaaaaataggggcggtgcaagtttccaagtatttacatattttttcccttgaacgctctcctgtgccttttaactattaaaaagtggggccagcaggcgggcgcggtggctcacgtctgtaatcccagcactttgggaggccgaggcgggtggatcacgagatcgggagttcaagaccagcctgatcaacatggtgaaaccccgtctctactaaaaatacaaaaattagcagggcgtggtggcacgcacctgtaatcctagctactcgggaggctgaggcaggagaatcgcttgaacccgggaggcggaggttgcagtgagctgagatggagccactgcacttcagcctgggtgacagagtgagacaatgtctcaaaaaaaaaaaaaaaaaaaaaagtggggccagacacagtgactcacacctgtaatcttagcattttgggaggcctaggtgggaggatcacttgagcccaggaatttgagaccagcctaggcaatagagggagacc

SEQ ID NO: 6531 - DNA, 6000 bp, Homo sapiens
agcacctacccccaagataaataaccccctgagaacccaagattgtccatggtttggcttatactacgagatggagcaagttactacaattccccccaactgtgactcatcactcctgtaacaacagggcatgccagaaatggacgtaaaggagcaaatatgttggggtgtctaatgtgacacgggaaataaaacacagtgagagtgtctttttttttgctatggtttttctcattcgtaagcatggcacaaatttgaactctacctagggtcccaataaaccagtggtttaccagcatgtgacagagagcatgtaaatgcatgaaatacttctaggatcaccattctaagtgctggctaccagattagaatatttgtttgaaggtaggatgagtgcagaattatccatcggggtatgaatagaaaattctagaaattctatatgcattttatttttttgagatagagttttgctcttgtcccccaggctttagtgcggtggtgtgatctaagcttgccgcaacctctacctcccaggttcaagggattctcctgcctcagtctcccaagtagctgggattacaggtacccaccaccacgcccagctaattttttttttttttttttgagacagagtttcgctgttgttgcctagcctagagtgcagtgcgcaatatcggcttactgcaacctccggctcccgggttcaagcaattctcttgcctcagcctccctagtagctgggattacaggaatgcgccactatgcctggctaattttgtatttttagtagagacagagttttgccatgttggtcagggtggtcttgaactcctgatctcaggtaatgtgtccaccttggcctcccaaagtgctgggatcacaggcgtgagccaccgtgcctggccacaggtaatttttctatttttagtagagatgaggttttactatgttggccaggctggtctcgaactcctgaccgcaagtgatccgcctgcttcagcctctcaaagtgctaggattacaggtgtgagccactgcatccggccttctatatgcatattaaatgtgtataaaataagaaatataatgagctcatattataaaatgaagtgagtgagatttgaaaagatccttgttccagttgagatttgagagacaagtcataccttgaaggtgtgctttctgaaacaggagaaactcccccaggattctgtgtaccttcccagaggtggatgagaaagcttagaactataacctctgtcctggaggcctgaagccaactgtttccctctccaggtcattttggagagccagcagtttttccccctcgtgcagctgtggcctcggtactgccttcacttgatctattctatggtgaactaccacagttccctccagctcaggtttccaggaaacctggcctgaaatttcaaaaggtgcagcaaacaaaactgtggatgtaactctgagagccagtgagagaagggacacttaaaccagccagggggatttgaaatgctgaacaattcattagaaggtgctgccatccccactggataacatttacccagcactttgatatttaagaaatgttaagtatcacagcatagaaaaatattatcttctattatctagttatattaaataaatgcttatatctcatatatatatgttttttcacatctctagcactttcaggaggtagactttagtgttactgctctctttctgaaatgcagtaacaaagatagaaacagttgaccaaaattctatagatacataatagtagggcaggattgaaacttggatttttcattcatagtgtacaacctttgtcaccccagctggctgcctactaacttggactggtgccctgaagtggcctctctaactggcaaggggtggtcagtgttccttgtgatgtttcatcacagcgaagagtgtgaagccgctttgcagattgctaatggctcagtgaaacctttgggagttatgttcatctgaatggtattgaccatctgctgagtgcaaggctttgaggagaacgttacgaggaattcagagaagtattatgctcagtctctgacacagcctctatgctgagagagaaaagacataatatttatataaaatcaatgatagttaaaccacagcgagaccaacagtaggcaaataatccagtgggctgtcaagtgctgtgaattcagacagcgagtctttcccagattgtgctgggctgggaaggttcagggaggagcagctactccgggctggatggagaaggaggatttagctaggtgggaaccatagtctttagggaaggaatgggtctaagtgaactgtgcccctgcactggtccacaagtcttttcaggtccattcactggactactgtatctgaagtaaaggggtcaagtgggagagaagggaagtcggagctagatgacttttttcttttttttttttttgagacagagtcttgctgtgtcacccaggccggagtgcagtggcgcgatctcagctcactgcaacctccgcctcccgggttcaagcaattctcctgcctcagcctgccgagtagcggggattacaggcgcccaccatcacgcccagctgattttttgtatttttagtagagatggggtttcaccatgttggccaggctggtctcgaacttctgacctcaggtggtccacctgcctcggcctcccaaagtgctgggattacaggcgtgagccatcatgcccgacctagatgacttcttaaagctgtcctttcttgactgccatcggactatttaatctttgcctaaattatcaaaagcactgtttaatctgaatggctgcataacctcctacaaatgaagccattcagtgatttattagtaggtgaataacactggactctgatttggccctcttaacatgttcattgtattaataggaaagcactttggagctaaggatgtcaaacgtctatataaataaaatctaatcctattataaactctgtcaaacttgcaggcagttggtcctactccacttgcagtctaacctggaaaggtcaaatgacttgttgaaagtcatgcagaaatcccctggtgcttctataataactgaccctgcttcccctgacatttggtggtgtctagcttaagtcacttcatatctccgtaaggatggtgacactaagaatgacattaagatgacactagggctcctgtcatttagataggatttctcctactcatattatgccccatgggggctctcagctgtgaccccaaagggtccttgttaattttaagcttggggtgagatcattgtacacttctctttcaggcttctccctggctttcattgaaagaaggtaccattttagtgctgtgtgtccatgcaaacacaccatctgaatgaaagggcattctcaagcatatttcatgccaaatgccgagaagtagagtgggaccatcagtggctttctatctacctgaactttgaagttagacactagaccattgccagcttgatagtccttccattggctgccctttgaagttagctaactggtttaaaaaaaccaaatgggatactttaaatgaaaacagattttatttgtttgccttagaaacggaaaacatttatcttaagtttttttggtttttgtttctgtttttttttgagacagagtatcattgtgtcacccaggctggagtgcagtggcaggatctcagttcactgcagcctctgcctcctgggttcaagcgattctcatgtctctccttccccagtagctgggactacaggtgtgtgccaccatgcctggctaatttttgtgttttcagtagagacggggtttcgccatgttggcctggctagtctcgaacttctggcctcaagcagcccacctgcctcagcctcccaaagttctgggattacaggcgtgagccaccatgcctggcccatttgtcttaagcttttaaaagagaataatgataatgccatggttaagtggataaggctggggtgatccatatttggtagacgtatccagttatacgttgtttaaatgtcgtctattatgtgaactcagagctgtcaaaaataatactttgtgtttttccccatccttgccaaacataaaatattcatttttttctaaatcattccgtgtccctacatttccctctacttcagactttgaacagttgaagggtggaaaacttttatcattgctgaaattatcaaaaacactatcaatagctatcatgcgttgagttttacgtccactgctgagtggttataccatgttattttacttaatttgcacctcaacgctgtaaggtcaggaggagtagcatctcatctaaggagtagcattacatgaggagtagcatttcatgagacagaggctggagctaagtactttgtcaaaggttgtaatggagctgggctttaaacctacctctcttaatcgcttagatctagaagctatgccctgagtcactgtggtatctggaagcaaaaggaaatgtgctctaaagagttaacaggggctatctgtgcactctggccacaccctgggagatgcctggtaggaggaaaactgcttttgtttttgcacggtcagttcacagtatcagcagggcagtcaaagcacacttttttctctctctctttttttttttcccatctcatccttattctttttgttatgatctctaaaaagttggtgagttagggagtgaggatctatttgagtaaatccagcatgtttctcagtcaccacccatcaacctaattggcataggcggggctgtgctgtctgcaacacagccagctcctccagctgtgccatccatcatactcaggcaccctggagcgcacatgctctgcttccggttgattttaagttcccgattcctgagcaggccttggggaggcagtcccaaggagtcagagttgtttgctgtcgcatatcagactccggtctgggtgacttggctggtcacagcacagtgctcctgggcccaggggctgtgatctcctgtcatttggttgccattttcctgtgaagagggtagagaatatgcacccagtcaggtcaggcactttgcagaggtgggtcctggctataagaaagccagataagagtgcaggttcatttatgcatgtatgtttctactcataggaaaacaactcacgaggcaaaaaagtacatctcgtggatggagcagggcgaagtggttacaagtacagactctggagccagactgcctgggtttgaattgtgcggtttcaggtaagctatttaatctccctgagcctcagtttccttatctctgtaaagggaacctacttcatagggttatgaggattatatgataatttaattaaatgaacagtaaagcactttgacatcaatgtctgagagatgagaagtgttacgtaagtgtttatcaaatagcacataaaaataaagcggtaggtgaacatcatgatttgtaggttacacagtgctgtgttagacgaagcttacgtgactacctcagttaaggtactcacggtgagttatgctcaaacgaaatcttataaaatgtcctagggaaactagccattttaaagaatcatgtgagaaatatgtatgtaaactgcctttttgtaaaatgaacatgagagaaactgtgtcagaggaagcgagaagacaaggttggatgactcgatgtttcgggcgagggggactggaggggtagagtgccatcatcttggatgggaagggttcttgccgcagtcatttcagggaagggagagtcgctggtcaaatctggatgcgttaagtgtgagagtcttgttagatgttgaagtgaagatgctcagtgggcaccaggagaagtcaggtgagaagtcaaggctggaagcatctgtgtggggggtccctagcttatagatggaatctaaagctgtgaaggaatgaaggtatttaacagctggagaagggg

SEQ ID NO: 6532 - DNA, 6000 bp, Homo sapiens
ggattacttgaggtcaggagctcgagaccagcctggccaacatggtgaaaccccatctctactaaatacacaaaaaattatctgggtgtggtggcccatgcctgtagtcccagctacttgggaggctgaggcacaagagaatcacttgaacctggggggcggaggttgcgtaagccgagatcgcattactgcactccagtctgggtgatagagcgagactctgtctcaaataatacataaataaacaaacaaataaataaaatgttcaataattatggtccatcctaaatatctgctttccctcctaaaattagcaattcaataaatttggagggttggaagtgataaaggcagggcctggggtggatggactattaaaaaaaaaaaatttggaggggaaaaacccagttcctaaatgagacatttttctaccccttgattagtgttaaactcaccttccatgcattcattcacagattcgtagtcagcataagttctgccttctggcctcttggtaggctgtaccagcaaaatggtgtgagactgcaggggaaaacatgatttcaatataagtttctatttgagaaattcatagtatgataaaaaaaaatccccatttgtaatgcaataatgattgctagttattaaaatgtaattagagaggccaggcatggcatcccatgcctataatcctcatcctctgggaggctgagagggggaaaatcacttgaggccagaagcttgagaccaacctgggcaacatagcaagaccctgtctctacaaaaaaataaaatttgccgggtgcatgcctgtagtcccagcactttggaagtctaaggcaggaggattccttgagcccaggaggctgagactgcagtgtgccatgatcacaccattgcatcggagagtgaggccctatctcttaaaagaaaaaaaaaagtcattaggatacttttcccacaaaaatattgatgtcttagtctaagtatagtatctagctggattcacaactctgctgtacggtctccctaagtctcccagtcctaccgtacttactgcctacaagtaatcagtataagctaccttgccctccttttccttttctatcttttcttcccaactaaattataaacctgcttaggttttctgtctccagtggtcactttccatctttaatgctcttaagtcactaataaaaactcagatgggctgatgaaaggaaacaaaaggggaaatagtataataatcacaagcatggtttcaacttaagctttttttccaacctcagcgtaagagcaaagtcacattttatccaggggttagacttaacattaaagcagtagataaattagcaatataaacatatcataagaattacccttaaaaatccattaaactattcacctagtagatgacttgccttactgggctttctcataccaaaatcacatattagaatcacacagaaagttaggtcatcacactatgagaaatgtgaaataatgcccatagcagacagacttgtcttccacttcgtgctcactgggaaacatgtttttgttagtgatcagtcactaacaaatcaatctcagtgttttctcaacgtgggctctattaccttttgggttgactgattctttgttacaaatgtcccttggggagcaaaaaatctcatccagctgagaattcactggtctgttgaaaatatgacccatccaattttctgctacatgtgtaaggttaattaaatgcaagtatgatgcaactccactgtaaatccagtcccaaatcaaactattcacctttttccttctcttctgctgtactagtatttttcagccaaaaaccagaaaacaaaaatttcctaacaggaaccctaaactgttttggaataacataatttttttttggagacagttttgttcctgttgcccaggctggagcgcaaaggcgcgatctcagctcaccgcaacctctgctttccgggttcaagcgaatcttctgcttcagcctcccaagtagctgggattacaggcatgcaccaccatgctcggctaattttgtctttttagtagagatggggtttctccatgttggtcagactggtcttgaactcccgacctcaggtgatctgcctgcctcggcctcccaaagtgctgggattacaggcgtgagccaccgcgcctggacaaaatgatcagaatttttaaccatcaaattggaacagaaatagctgaagcccagactttctgaataaacaatggaaaaatagtacatttaacatgacatgcaaaaccaagggttatcatacccttctctccccatcaagaactaaaccactttgactaaaagtttcagagggtttgacataaaaacggaacttggtgacaagagacgaaggattaactctcacctgtaataacctgagcagtcaaagcctttgttaaatcgatttaaaagccacagaaagcatcatattagattatttgttatacagaagtctttgtaagctagctactcaaaaagtttcaacgagtcatttaagaaaaaataattttgtagaaaccacgtgcattcttgcaacagaggttgccctatacactagctatctcaactgctactataataattgtattccaattctaatgcaaattaaaggactaatttgaaagggtaagaatggaaaaagctatacagcatgttgctttttatatctagtcttaaaatgaacaccgggcaaagtttactattttcagtacttactgcccaaagacaaggattaaaaatcactaagaacataacatgatacattttaaaaactgtggtcaagtggttatcatttttaaatggcaatgctttcctgctcaaattctttacagattataccacctctcaagccagttttggtcactttcttcgaattggagcttactgatcatcccggttgggttctaatagagctggtctctgagctgagcctacttttcagcctccagccccaagaggatataaatacagataagtacaggatcgagggctgagggacgcgccacacgcaatacctagaggtctcaaaaacaggaaaaaaaaaaaaaaggcagagcacaggaaaacgaaagctgaaaaaacactgcaaagcaaatacgtcctctcctggcccacatgctgggtatagctggatctgtcagcttcgagaatagttagacaaccctggcccattgttcctacagcaggctagagcatttggagggaaaaataccatatccggcagggcccggtggctcacgcctgtaatcccagcactttgggatgccgaggcgggtggattgcttgaggtcaggagttcgagaccagcctggccaacatggtgaaacgccgtctctgctaaaataaaaaaattagccgagcgaggtggcgggcgcctgtaatcccagctactagggaggctgagacaggagaattgcttcaacccaggaggcagaggttgcaggggtctgagatcccgccactgcactccagcctgggcgatagagtgagactctctatctcaaaaaacaaaacacctcccccacgtctccctctaccgagtaacaatcgggagagagttcatcctcaggcccaaggcacgccggacccgagcgagcaggcgggcgcgcaaccgcagggcggaccggggctccgaggcctagagtcaggcctggcgtccctgcggcgggaagaagggtcaatccaccgactagagtggcggggagcatcacgcggcgctgcatggggctcgtggggaggggaaaacgtatggggctggggtcgctctggaggccggggactcggactcgggtagccgcggaggcctttctcaccatcgcgccaaactctcttcgctacagcagctgccgacaccgccgccgttacacgagcttaactacaacgccgctaacagccaatcctcgcgagaggagccgccggaagtcgtcgaaagtgcaacgcaaaagagccttttggatcatagaggcacagtcacttccggcagctagagcagctactgactctgtttcagccatcttcgataaaggcaaaaaggtaagggaaagtttccaagctttaggaagaattattttttttcaagacgctgtcttccgtactttcgttattaaacatacggctcaagtgatcaccggtatagacagtgacatcagacatctttcattagccctactcaaaaatggcggcaacgtaagtatcctgggccggaggtcggttgtaacccggaagtgcctttgtaaaggagggggtggttagacaatccggaagtggatggaatgaagagatgccacttggcggccatggcagctgtagtatcggcgactccgggtcaaggcccggtcgagtgcagtaccatgggcagcaccgggtatagggcagagacagctttgtgtcaactttgctgctgaacccctaggacccatcgttagagacctgcaggactcctttcctcatcccaggctcggaggagagtttgctgggactggtgggctggtttcctgctctggggggcggatcaccttcggggccgcctcttggagacaggggcgcctagggaacgaacaggttcgcttgagtcacttacccgccgccgcctaagacattgtgccaccctcaatccgacaatcgaagaaatcgatcattcgcacattttccccattgacttttcccatctctgttaacccacgagaatctaatgactggcatctgagaacccagagcctgggaccttagattgctgtaagctttctctggtgctaatatcagcaaaaagggtctgttgccgggtacgttcaagaggaaggtgcctcgtgaacacatctgctggtgggaaggcctaaagaactggaaagcccactctcttggaaccaccacacctgtttaaagaacctaagcaccatttaaagccactggaaatttgttgtctagtggttgtgggtgaataaaggagggcagaatggatgatttcatctccattagcctgctgtctctggctatgttggtgggatgttacgtggccggaatcattcccttggctgttaatttctcagaggtaagaaattctcaattttctgtcagctgtcaggatggctgtgagatagtagttttagttgcaaagggaagctgcttccctagttaaatctcaaagctgaaggtctcattaagaaagactatcttttttaaaagatacatgacacttaataatagaaagaaacctcatattcattagtggaattcttaacctggggtggatagatattccacggaagatcctggagtattctgaatcccctagaattgcttacaaaaatttgaggttctgtgcatttacctggagagaggcaccataacatttcttttgattctcagaggtttcatggaatcaagattccagattgttatcaagaaaataaatggagggctgggcgcggtggctcacgcctgtaatctcagcactttgggaggctgaggtggaaggatcgcttgggcccaggagttctagaccagcctgggcaacgtggcgggactttgtccctacaaatgaggctgaggcaggaggatcgcttgaccccaagtggttgaggctgcagtgagccgtgtttgggccactgcactccagcctggacagcagagtgagatcctgtctccaaaaaagaaaaaaaaagaaatggagaatgttatttttctacatgaactgaaatcaatatgataacttccttttgagaaagtcaaacacacctttctgaggaaagctgttttgttttttggatgtctgtactagaatgaatgtaagaaaaaactaagattgttcttaactcacatttccttttaaagaaggggagccttggaattgatattctgaagttgtttcaaatctatttgcttagcaatgaatttttggttaatacgttttgacattttcgttaatttgattggcaccttgaacagatgttaag

SEQ ID NO: 6533 - DNA, 6000 bp, Homo sapiens
gtaaaaactatacagggtaaatatcttaattccaatgcgtcctcttcatattagcattttcttattcatttaatttgaaaacttcttccctatcaatcagttccaagaatatttgcataaatatgatagcgcttcaatatttaaaatagtataacgtaaccagccatgctagcttcatttgacagatatctaataagtcaaatctgtccatatttaatgtgaggtagacacctgaagcgtgagtaacaagccacatagccgctttgagaagagcagcagctgggcagagattgctgtcaagagtttaaaaaactgacattgattactgaagtgatagagtaatcttttaaagggaacaacatactgctcactgaaagaagagaaggcttttcaggtaaatggaaagggtttttataacacactgttagcaactaagatcaacaaacccttccttaacgggaacttagccattcttggtctcatttttcacgttcctcctcttctcccagctctcacgtccccagatagtaactgtacagttctttctattgaatactttgtactgaacatagcttcagacctgaggtaacatgtgctcttctgactccaagctggaccttcccatgccttataatcctgtctgtagctctgagcaacaaccctccgcattttacccagatgtcaactggcaggcaactggaggaaaatcttagaagcaaactgactcagggctagttgatgggaactgctttccccaacaccctctctaaaggtcattgattcttctgagcatcagtcaattcagtatttggcagtaaaacccatattaataggaacatgtgaaaaatgagataaagaatggctaagttcctgttaagcaagggtttgttgatcttagatgctaagagtgtgttataaaaaccctttccatttacctgaagagccttctcttctttcagtgagcagtatgttgttccctttaacagattactctatcacttcagtaatcagtgtcagttttttaaccttttgacaggaaggtgctgataattctggagacatggagttacttgctgcatctatgggatgtccttttcttaaaattttaattagttgtcttagtccataggtctacttttttaacagaaaaggttgaaattagttttataaagattagcttatgagatatacatatatatacacacacacacacacacacacattttttttttcctttgagatggaatcttgcctgtcacccaggctggagtacaatggcgcaatcttggctcactgcaacctctgcctcccaggttcagacgattctcctgccccagcttccggagtagctgggattacaggcgcccgccaccatgcccggctaatttttgtatttttagtagagacagggtttcaccatgttggccaggctggtctcgaactcctgacctcgtgatccgcccaccttggcctcccaaagtgctgggattacaggcatgagccaccacgcccggctgcttaagagatatttctaggctctatgaggtcaactactgcatcttgattaccactgtatctcaagcacctggcccagagcctggtgcatagatgatgcttgttaaatattagtagaataaataaatttatgtctgaaatttaatatctgcaataatatattgttgattctatctcaagaataatacaagccaaacctgttgaaccagcacttaaagttcgttttaaaaagcaattgtgaaccaggagcagtggcgcatacctgtagtcccagctacttgggaagctgagacaggaggattgcttgagcccaggagttccaggctgtagtgtgttatgattgtgcctgtgaatagccactcaactccagcctgggcaacatagcgagacctcatctctaaagacagatacagtcaatgaatggatggacagaatgatggaactgtggtgaatatagtttaataatagtgtgtggtacatatcaaaattgctaagagtaaatttcagatgttctcaccacaaaatatgataaatatttgagatgacagatgttagttttatttaattagtccacattttattcatgaatcataatgtcactttataccctataaatatatataattataaattgttgatttacaataaattttttaaaaaatcaattgcgtacatcactgatattcttaaacccttatttggaagcttcccatgaataacttaaagttgctgtgttctctagatgtccccagtgtcctagacagcaccagttaagaacagtgagtgttttttaactgggacttcttcctgaccctgaattttacttgacttagtttttcctctttctctcttctaattcacagagcagtaaagaagccctttcagaggtgaacgccacgggagtggccatgcttttctctgccgggacatttctttatgttgccacagtacatgtcctccctgaggtgggcggaatagggcacagccacaagcccgatgccacgggagggagaggcctcagccgcctggaagtggcagccctggttctgggttgcctcatccctctcatcctgtcagtaggacaccagcattaaatgttcaaggtccagccttggtccagggccgtttgccatccagtgagaacagccggcacgtgacagctactcacttcctcagtctcttgtctcaccttgcgcatctctacatgtattcctagagtccagaggggaggtgaggttaaaacctgagtaatggaaaagcttttagagtagaaacacatttacgttgcagttagctatagacatcccattgtgttatcttttaaaaggcccttgacattttgcgttttaatatttctcttaaccctattctcagggaagatggaatttagttttaaggaaaagaggagaacttcatactcacaatgaaatagtgattatgaaaatacagtgttctgtaattaagctatgtctctttcttcttagtttagaggctctgctactttatccattgatttttaacatggttcccaccatgtaagactggtgctttagcatctatgccacatgcgttgatggaaggtcatagcacccactcacttagatgctaaaggtgattctagttaatctgggattagggtcaggaaaatgatagcaagacacattgaaagctctctttatactcaaaagagatatccattgaaaagggatgtctagagggatttaaacagctcctttggcacgtgcctctctgaatccagcctgccattccatcaaatggagcaggagaggtgggaggagcttctaaagaggtgactggtattttgtagcattccttgtcaagttctcctttgcagaatacctgtctccacattcctagagaggagccaagttctagtagtttcagttctaggctttccttcaagaacagtcagatcacaaagtgtctttggaaattaagggatattaaattttaagtgatttttggatggttattgatatctttgtagtagctttttttaaaagactaccaaaatgtatggttgtcctttttttttgttttttttttttttaattatttctcttagcagatcagcaatccctctagggacctaaatactaggtcagctttggcgacactgtgtcttctcacataaccacctgtagcaagatggatcataaatgagaagtgtttgcctattgatttaaagcttattggaatcatgtctcttgtctcttcgtcttttctttgcttttcttctaacttttccctctagcctctcctcgccacaatttgctgcttactgctggtgttaatatttgtgtgggatgaattcttatcaggacaaccacttctcgaactgtaataatgaagataataatatctttattctttatcccccttcaaagaaattacctttgtgtcaaatgccgctttgttgagcccttaaaataccacctcctcatgtgtaaattgacacaatcactaatctggtaatttaaacaattgagatagcaaaagtgtttaacagactaggataatttttttttcatatttgccaaaatttttgtaaaccctgtcttgtcaaataagtgtataatattgtattattaatttatttttactttctataccatttcaaaacacattacactaagggggaaccaagactagtttcttcagggcagtggacgtagtagtttgtaaaaacgttttctatgacgcataagctagcatgcctatgatttatttccttcatgaatttgtcactggatcagcagctgtggaaataaagcttgtgagccctctgctggccacagtgaggaaagtagcacaaataggatacagttgtatgtagtcattggcaacaattgcatacaattttactaccaagagaaggtatagtatggaaagtccaaatgacttccttgattggatgttaacagctgactggtgtgagacttgaggtttcatctagtccttcaaaactatatggttgcctagattctctctggaaactgactttgtcaaataaatagcagattgtagtgtctggtttggtttggacagtagtgctttctatcatattgttgtgtgcaatggtaatttgttctactggccaaagcctctttcagcagtgccttgccatcatgcttaaaagtttggctagtatatcttgctggatggagccttgaactccggcaaggattgaaccatctgacttccaaatttgccttcccctctggacctcactattaacaagcaaacctttcagggccctcttagctctcagaagctatgtatgggctttcccagattttaaagctgctgcctcgagaactactcatttctctcctggtcagcagacagaaatagccatactaatctcatagggctcaaatgcatcttcaggcagcagggaaccaagcagcgtggcacaggccttcttgactggaggaagagcttgctggcatggtgggcagtattccaggagaggccatgtccgtgttcacttcttggcacatttcagttccgttttcctcttgtttaaaactgcctctttagatgtggatgccttaatgctgtaacacatttgaaaacattggcaatacttaagttgctgccatgattacagatggaattattggctaccaaagagacgcaattgatgatgagaagcatgattcttgcttccatataaccaaagttaatcttaattgcaatttgactccgtttccttggtagggatagactttcttcagattccaagtgctctcttaaatggcaaattaagttaaagaatactactgctccattcccctcacttattctccagttaattgcttgtcagttccatttcaagaaagcagtgatgttccaggtttgattcagttttcctgtgcacactattgccaaatttttttttagcaaagattctgcactggaacgtagacagttggaaacagtactacctacctagaggttatgtgttttctctttctccccgctttcacctctttctttcccaattcaaaacagccaagtgagccctgttctggtattttgaatcattagagaaaagaaagggagtggctgttttgagttgtcctttctttgcagaaaggagaaaatgtgattgtgttttttttttaccagcctacttctaagtgtcactgcctggtttttctctttttcaaggattagaactaagaggacacaccagcatcggagtgtattaagcccctgaaacacatggtagctagggactgaacacaggaaccgtatgacagcagcacaaacccccaaaggatgttcctgccttgtgggcccctgagccccttgggagactgagaatcatgaccagattcatccagaactgctgcagtgttaagtgaaaatcctctgtagttgttctgcagaggaaccttccttccattagaaaatttctgctcaatacagaatggtccacatcacccaaagtgcact

SEQ ID NO: 6534 - DNA, 6000 bp, Homo sapiens
gacaaaggaaatgtggtgtatgagaatgcatgcacacacatcccatggaatactactcagctattaaaaaaagaataaaaccatgtctttgcagcaacatggatggaattggaggtcattatctcaagtgaagtaactcagaaagtcaaacatttaatgttctcatttattagtggaggctaaatgatgtgtgcacatggacagacagagtggaataactgacactggagactacaaaaggtgggagaatggtgagggatgaaaaatcactactgcgtacaatgtacaccaggtgatggctacaataaaagcccagacttggttggcgcggtggctcatgcttgtaatcccagaactttgggaggctaaggcaggagaactgcctgaggctagaagtctgagaccaacatgtgcaacacagtgaccccatctctataaaaaaaccaaaaaattagccaggtgtggcggcaggtgcctctagtcccagctatttgggaggctgaggcaggaggactgcttgagcccaggaaactgagactgcaataagccattatcaccactgtaccccagcctgggtgacagagcaagaccccgtgtcttaaggaaaaaaaaaaaaaggcccagactttactactatgccatatatctatataagaagactacacttgtatcccttaaatctattaaaacaacctattaaaaacagacagacacacaagcctatagtgtttgagcttaaccagaatatataagggatacctgtaaaatatttccatactgtaacaaaataacatgtgacaaataagaagagaatatttataaaacaacaagcagctctggaaagtcactcattatatacattagtttaaaaaaaaaaaacacctaatacttgtagcaaggaggatactatatacataattaatgtttaaaatgttcaaccggccaaggcggattacttgaggtcaggagctcgagaccagcctggccaacatggtgaaaccccatctctactaaatacacaaaaaattatctgggtgtggtggcccatgcctgtagtcccagctacttgggaggctgaggcacaagagaatcacttgaacctggggggcggaggttgcgtaagccgagatcgcattactgcactccagtctgggtgatagagcgagactctgtctcaaataatacataaataaacaaacaaataaataaaatgttcaataattatggtccatcctaaatatctgctttccctcctaaaattagcaattcaataaatttggagggttggaagtgataaaggcagggcctggggtggatggactattaaaaaaaaaaaatttggaggggaaaaacccagttcctaaatgagacatttttctaccccttgattagtgttaaactcaccttccatgcattcattcacagattcgtagtcagcataagttctgccttctggcctcttggtaggctgtaccagcaaaatggtgtgagactgcaggggaaaacatgatttcaatataagtttctatttgagaaattcatagtatgataaaaaaaaatccccatttgtaatgcaataatgattgctagttattaaaatgtaattagagaggccaggcatggcatcccatgcctataatcctcatcctctgggaggctgagagggggaaaatcacttgaggccagaagcttgagaccaacctgggcaacatagcaagaccctgtctctacaaaaaaataaaatttgccgggtgcatgcctgtagtcccagcactttggaagtctaaggcaggaggattccttgagcccaggaggctgagactgcagtgtgccatgatcacaccattgcatcggagagtgaggccctatctcttaaaagaaaaaaaaaagtcattaggatacttttcccacaaaaatattgatgtcttagtctaagtatagtatctagctggattcacaactctgctgtacggtctccctaagtctcccagtcctaccgtacttactgcctacaagtaatcagtataagctaccttgccctccttttccttttctatcttttcttcccaactaaattataaacctgcttaggttttctgtctccagtggtcactttccatctttaatgctcttaagtcactaataaaaactcagatgggctgatgaaaggaaacaaaaggggaaatagtataataatcacaagcatggtttcaacttaagctttttttccaacctcagcgtaagagcaaagtcacattttatccaggggttagacttaacattaaagcagtagataaattagcaatataaacatatcataagaattacccttaaaaatccattaaactattcacctagtagatgacttgccttactgggctttctcataccaaaatcacatattagaatcacacagaaagttaggtcatcacactatgagaaatgtgaaataatgcccatagcagacagacttgtcttccacttcgtgctcactgggaaacatgtttttgttagtgatcagtcactaacaaatcaatctcagtgttttctcaacgtgggctctattaccttttgggttgactgattctttgttacaaatgtcccttggggagcaaaaaatctcatccagctgagaattcactggtctgttgaaaatatgacccatccaattttctgctacatgtgtaaggttaattaaatgcaagtatgatgcaactccactgtaaatccagtcccaaatcaaactattcacctttttccttctcttctgctgtactagtatttttcagccaaaaaccagaaaacaaaaatttcctaacaggaaccctaaactgttttggaataacataatttttttttggagacagttttgttcctgttgcccaggctggagcgcaaaggcgcgatctcagctcaccgcaacctctgctttccgggttcaagcgaatcttctgcttcagcctcccaagtagctgggattacaggcatgcaccaccatgctcggctaattttgtctttttagtagagatggggtttctccatgttggtcagactggtcttgaactcccgacctcaggtgatctgcctgcctcggcctcccaaagtgctgggattacaggcgtgagccaccgcgcctggacaaaatgatcagaatttttaaccatcaaattggaacagaaatagctgaagcccagactttctgaataaacaatggaaaaatagtacatttaacatgacatgcaaaaccaagggttatcatacccttctctccccatcaagaactaaaccactttgactaaaagtttcagagggtttgacataaaaacggaacttggtgacaagagacgaaggattaactctcacctgtaataacctgagcagtcaaagcctttgttaaatcgatttaaaagccacagaaagcatcatattagattatttgttatacagaagtctttgtaagctagctactcaaaaagtttcaacgagtcatttaagaaaaaataattttgtagaaaccacgtgcattcttgcaacagaggttgccctatacactagctatctcaactgctactataataattgtattccaattctaatgcaaattaaaggactaatttgaaagggtaagaatggaaaaagctatacagcatgttgctttttatatctagtcttaaaatgaacaccgggcaaagtttactattttcagtacttactgcccaaagacaaggattaaaaatcactaagaacataacatgatacattttaaaaactgtggtcaagtggttatcatttttaaatggcaatgctttcctgctcaaattctttacagattataccacctctcaagccagttttggtcactttcttcgaattggagcttactgatcatcccggttgggttctaatagagctggtctctgagctgagcctacttttcagcctccagccccaagaggatataaatacagataagtacaggatcgagggctgagggacgcgccacacgcaatacctagaggtctcaaaaacaggaaaaaaaaaaaaaaggcagagcacaggaaaacgaaagctgaaaaaacactgcaaagcaaatacgtcctctcctggcccacatgctgggtatagctggatctgtcagcttcgagaatagttagacaaccctggcccattgttcctacagcaggctagagcatttggagggaaaaataccatatccggcagggcccggtggctcacgcctgtaatcccagcactttgggatgccgaggcgggtggattgcttgaggtcaggagttcgagaccagcctggccaacatggtgaaacgccgtctctgctaaaataaaaaaattagccgagcgaggtggcgggcgcctgtaatcccagctactagggaggctgagacaggagaattgcttcaacccaggaggcagaggttgcaggggtctgagatcccgccactgcactccagcctgggcgatagagtgagactctctatctcaaaaaacaaaacacctcccccacgtctccctctaccgagtaacaatcgggagagagttcatcctcaggcccaaggcacgccggacccgagcgagcaggcgggcgcgcaaccgcagggcggaccggggctccgaggcctagagtcaggcctggcgtccctgcggcgggaagaagggtcaatccaccgactagagtggcggggagcatcacgcggcgctgcatggggctcgtggggaggggaaaacgtatggggctggggtcgctctggaggccggggactcggactcgggtagccgcggaggcctttctcaccatcgcgccaaactctcttcgctacagcagctgccgacaccgccgccgttacacgagcttaactacaacgccgctaacagccaatcctcgcgagaggagccgccggaagtcgtcgaaagtgcaacgcaaaagagccttttggatcatagaggcacagtcacttccggcagctagagcagctactgactctgtttcagccatcttcgataaaggcaaaaaggtaagggaaagtttccaagctttaggaagaattattttttttcaagacgctgtcttccgtactttcgttattaaacatacggctcaagtgatcaccggtatagacagtgacatcagacatctttcattagccctactcaaaaatggcggcaacgtaagtatcctgggccggaggtcggttgtaacccggaagtgcctttgtaaaggagggggtggttagacaatccggaagtggatggaatgaagagatgccacttggcggccatggcagctgtagtatcggcgactccgggtcaaggcccggtcgagtgcagtaccatgggcagcaccgggtatagggcagagacagctttgtgtcaactttgctgctgaacccctaggacccatcgttagagacctgcaggactcctttcctcatcccaggctcggaggagagtttgctgggactggtgggctggtttcctgctctggggggcggatcaccttcggggccgcctcttggagacaggggcgcctagggaacgaacaggttcgcttgagtcacttacccgccgccgcctaagacattgtgccaccctcaatccgacaatcgaagaaatcgatcattcgcacattttccccattgacttttcccatctctgttaacccacgagaatctaatgactggcatctgagaacccagagcctgggaccttagattgctgtaagctttctctggtgctaatatcagcaaaaagggtctgttgccgggtacgttcaagaggaaggtgcctcgtgaacacatctgctggtgggaaggcctaaagaactggaaagcccactctcttggaaccaccacacctgtttaaagaacctaagcaccatttaaagccactggaaatttgttgtctagtggttgtgggtgaataaaggagggcagaatggatgatttcatctccattagcctgctgtctctggctatgttggtggga

SEQ ID NO: 6535 - DNA, 6000 bp, Homo sapiens; identical to SEQ ID NO: 700

SEQ ID NO: 6536 - DNA, 6000 bp, Homo sapiens
cggcacaatctcagctcactccaacctccacctcctaggttcaagccattctccagcctcagcctcccaagtagcttagattacaagcatgcaccactatgcctggctaattttttttttttttttttttttttgtatttttagcagagctgggacttcgccatgttggccaggctggtctcaaactcctgacctcaggtgatcccctgcctcggcctcacaaagtgctgggatgacaagcatgagccactgcgcctggccatcctaggagtttgtatcacccactccttcacggtttgtctggagggatctcctaaataaataactcacaaacaaattctcatccgggatctgcttctgggatacctgccctgagttagtggttgagatggaatggagatgatggcaatggtgataaattcaaggaaatgggaggcttgggtcttggctgggttgtgtgtgggatgctgaagtcacttaggagggaaacaggacccagagagaaggctgcaggaaactgggggagcagccaggtctaccactgatggccacggggaagagtaggaagtggaggagccagagggctggggtctcagaggaactgcgggtttgacacaagaatatggggtattggttttccaggacaatgtgaccctgatgttgtgggcgagggagactgaacagcccctaccccagagtcacactgacagcacagtgtcctcagggaaagcccaggtatcaggagaaaaggcgcaggaaggggccctgaagaggctgggggcatgagggagtcttcagatcttcagcaggggcccctgaggcatctttggaatggtttggggtaggggtgaggggaaggttggatcagaggggaggaggctgagagcagaagagagaacaaagctacaccaagtggcctcactggcctcacacttctcagaattggtcccttcagacccggtggtgggtggcttggcagcctggatgtggggtgtggagattggtactactcctggcacacagggggcatgcattggttgaataaacaaatgaatgacacatcaagtttgtagatgccccaccttttcatcattctgaaccattgtcacttccatgtattttatggtctgataaatatggaattaatcgaagtacctctagctatttgttatcaccattattgggtgggacacagcgaacagatttcttaaagctagggaattatgcaataggacatgttacggacttaagccataagatctttttttttttttttttagatagagtctcactctgtcacccaggctaaagtgcagtggtgcaatgtcgactcactgcaacctcctcctcccaattctcctgcctcagcctcctgagtagctggaattacagcgtgcgccaccatgcctggctaatttttgtatttttagtagagacagggttttggcatgttggccaggctggtttggaaaggatctttctaataggccaaaaaatatttttcagttttgctttctactgtggatctgtagatccacagtataactacttatggtctatttgcttgtgattgcagatactgaaggagtttgctgggaagggagaagtgtgtgtggaagaagaggggagggctggagaagtgagatgagccctgagcacacgggacattggaggccagggaaagaaccatggcggtgcttgtggagttttaataggtgcaagctgggaatttcagaaggctcacctggctgctgagtggagcctagggcagggtggggggtggggggagacccctccgggagccagtgaggagagataactgcttttgacaagacacctgggaaagacatctggaaggaatggcgttgacaataagatttaaaacccttggccccagggaaaggggatattttgagaactatgactgcttgtattacttttaatcccaagaggaggataaaggtctttcctgtataaagtgcgctagttaatttaaattgtggaggaaaaaacttagggcaagagacagaatatgatattcaggaagcattttggaaaaagacacaaggaaccccagctgtggctgtgtgcacctttagggccttgatcatggaggcaggataaagaagtccatctcgtcaacatggcggagtcagagtctattgggagaatcacgaggtaggcagctctaaatcccaaaagatggtggtccagtcggatatgcctgggctgctctgaccagctcagcacacacaaggaatagctctggtcctgggcaatttgtgccctgggtcggagggtgagagtttattttatcggaacaataaaggcatcccacctgctaccaggagcaaccaaaaatgctcagaagttctggaacaggagtgctgttgaacagggtttcctggcagcccgagatagaaagtggtaaaaacagcaaaatgctgctatggtatagtactgaagtcatcaggcacacactgagacttcctgtgggtcaggccttgtgaatggtgctggagacagagactgggataagatctaccatctctgatgctgacgcccagcccagttctccccttttcctctctagttttttctttctctgtcatgcatccccctccctttgctgtcccttaaatgttgctcccttgagcatcatcttttactctcttctcattttacatctccctctggaccacttcatccagtcctgtggcttcagtaccacttacatactcatcactcttaaatctagggattcagctagattattcccctgagttctggtcccttatgcctcatgttaactggatagctccacctggatgggctacaggagctgcacacctaactctcctgcattttctgtcttgcagagcatgatactgttataagcttataagagtcatcccagacgcctcctttcttcctttgcatccatcactaggacccgcacattttacttccttaacacgccttgtctctgactcctcctctgctgctgcctgagttgaggcctcataatacattccagtaaactcctacccacaccccccacagacgatctctcacttgctgcatgtctcttacgcactgctgccagagtcagcttgctaaacccaggtctgaccccctggctcttctccctgtgttagccttgatggcttcccacgctcattaataagaccaacaagagccacactctctcctctgcttgtctttgcagctttattttggtgtagccatcttcacaccctctagtcctgacacgcagacctgaggtaatttcccaaatgccccaggctgattcatggctgagtgtctttgtatctgttgcccccccattgctgttccgccttcctctccacctccttctgccctctcgcagacacctaatgccctttccacaccagtgggcaccttgtctttgcattctcgtctcctcttcggtggcactgacactctctcttcatgtctttctgtcccccacacctctgtcaaacacagcatctgcacgctttgttgcatttgcttgcatagaacacgtagttttcttcacctcctaataatgtggacagctcacgttgattgaggacttgctttgaacaaggcattgagcaacatgccgtacattttatgttaaatcttcccaatagtgctactgcttctgtccctttccagggaggaggaaggaggcttggagaagggactgtcttttaggagccctgcccagtgtttcctgtggagggtggggccatcgtggaagacagacctatggtaggggtaagctgggtggctgttgaagtccaaccttccccctgcttcctctaaccctgataaccttgttctctggggcctgtctgctagtggagaggcttctgactttttttttttttttgccatacctttggtttataaatacaagaagagatttggggaaaaatcaggggaaactgtcgagcttacaagtcccgagaaggaagtcactgctcctttaagtctcatgtgaaccccttgttctctccccagcttgtggggtgaaagaaaagccctttagtcttttgggtcctcaaatcacagtttatgcagtttggccccagtcagagggaccccaggaaggcagactcagggtaaattctgcctgtcttccaccagagaggggactcaccaagtgtgactcatgccattcaatagaatttttaaaatctcacaagtattttgtacccctgagtaaaagagaggcttgtagctcttcatgaaggaacaagaaaggcccgaactgagtgtttggagcccagtgaagtaaaatactgccctgtctcttgtctgtccactctagcgcttgtacaaaccatgaagaactctctttggactgtttgctttttgagaatgttaacaccttgactctggatttctgcctatgggaaaaaaccacaatagtgccaggggtgcttccatatgcaggattaactctgcagtcaaagtttctgttgggcaggtgtgtgaacttgataccataaatgctggcccaaagcaaatgggagaatggatgaatgaacaaattcaggaatgaaacaaactgtaaccaggggtctcctagttgtaggttctctgctaaacttcatattgagacacaaaggaagggcatcttataatataatgttgggggatgagcagtcagcttggaggtggggacacgtaaggtgggttttgatgtttgagaaggaattgaccaaaaaaagagtcaagaggtgagaagaatctgggaagcgagacctgtttctctgggacaggtgtgagcgggtctgggtgctgctgggtttggctggggcaaaggttgcttgtgggggcgtggcagtgggtgaggcctgtgagataggcaggcgccaggtcctggaagggagagtcagggagcaaggcatggagcctgcactttactctgaatgttggtggcgccttcagagcattgttagcaagggtccatgtgatcacactgacacctgagagagtgacacaccatgtacatggctggtatatggaggatggatttaagggggacaggactgaaggctgtcgcagtgattcaggtgagagaagatggggttctggactaaggggacaggaaagcacagatgtgagatgaggtggcaggcagttctagctccctcttccccccagtctgccttgttttcctcttctcatggctccatagggtctcagtcatttcatcatagcttgatctcttccatctggaagtgcagcctgaaattttgaagacagcagggagcaatgcttcacccaaagggagagcctcgggtggcgttttgggaccatggcttgctctcttagtgcatacagacttagtgttactgccattcttactgggatcagcttgattgcctttaaggtagggctgtcccatggaaacagggaaaacatgatttggttgtttgggtatctggaaccagaggcagcacagatactgctctaagagctgctgggacaactggaggccggtgtgggtggagcacccgaggtggaatcctgcgctcctcatctttcctgccctcttcctaacaccctccctccccagcggcctgaagtctgcctatgcctatgcaggctgagctgtaacctgggactctttggaagctctgagccatcagtgcaggtggccccggaatgattccagacctagagtaggggtgggaggtcggctgcggggaggggggaggtgagaggaggctgtcctttccctcttgcccgggagtctgcagtcacagttgcactttgcctgggtcagtagcagagtcacgctgctgtgtgaccgtggcactgaggcagctgcatttcaggtttccaagagactctgaacccttggaatgccatttgtttcaggtgacatggaggaatggaggcactcgggttaagtgtctgaagatggattcaaggatgcccctgcttgttagcttgtcataggttgctcagtgtcccctc

SEQ ID NO: 6537 - DNA, 6000 bp, Homo sapiens
gaaattaagcaacacgcttctaaatcatgtgcccccaaaaaaatcagaaaataatatgaataaaatatgaaaatacaacataccaaaatttttaggatgcagctagcaccaggctaacagggaaaggtatagtttaaaaatactaatgagagccaagtgagagggggtcgctggagaagctccaaccagcctgcctactgaggtggagctggagcctggggaagttcacgacccttgcagcagggaggagcccggcccctcctcttctagtgtggaacctgggattcaagctgccggctggaagcgctctagcagggactctggcctagtaagagtccctgcttctcccttttcttccctttcacccaataaagccctgcgttactcaccctacaaaccctctgctaacctaaattttcatggccgtaggacggacaaggaccccatctttagctgaactaaggaaaagtccagcaacactaacattagcaaagaagaaaggtctaaaatcggtgatctaaacatccaccataagaagctagaaaaagaagagtaaactcagaagtagaggaataaaaagaatagagtggaaaccccaagtgcaacatatcccagaaatgcaagattggcttaacattagaaaggcaatcagtgaaatacaacatattagcagaataaaggagaaaactatatgatcatcaccatagatgcagatatggcatttaacaaaattcagtactcattcatgcttcattaaaaacaaaaaactcggccaggcgcggtggctcacgcctgtaatcccagcactttgggacgccgaggcgggtggaccacgaggtcaggagatcgagaccatcctggctgacacggtgaaaccccgtctctactaaaaaacaaaaaattagctgggcatggtggcgggcgcctgtagtcccagctacttgggaggctgaggcaggagaatggcgtgaacccgggaggcggagcttgcggtgagccgagatcgcgccactgcactccggcctgggcgacagagcgagactccgtctcaaaaaaaaaaaaaaaaaaaaaaaacaaaaaaccaaaaacaccagaaaactagaaacaacaataaaaggaaacttccttaatccgatagtttctatgaaaaccccacagctaacattatataaatgatgataaaaggaaagttttctcctaagatcataagacaaggatatctgcttccacttctattgaataatgtactgaggctctagccgttgcagacaagagggggaaaagatgataaagatcaggaagaaaaaagcaaaacttgtagatgacatgattatttacaaagaaactcctaaaggaatcaacaaaacatgtacaactgatgactaaagtagcaaggttgaagaattcaagtatttttgcaacaatcgtgtatttttatggactacagcaaacaattgaaaagtaaaattttgaaattccatttacaataacatcaaaagaatataaaatactttagaatgaatttacaagagatgtgcaaaatctccatatgaaaacttggttaagaaaccctaaataaatagaggaatatacctctttcatgaattgtcaagatgttcttcccaaaatagatccaacacaatcccagaaatcaagatcccacagctttttggaggaaattaagctgattctatgattttttagtggaagtgtaaaagttttataacatccaaagaatcttgaaaaagaagaacaaagttagaggactcaattatagtcccactaaagacctactatagagctataagtatgtaaatcctgtggtattagcataagggtgggcaaataatgaacaaattaaattcctgaaactcaggcatatttatcttttcaacaaatagcattggaataactggaaatccacctggacaaaatgacctttgactcttacctcataccataaggaaacaaacttaaatggatcgtagacccaaatataaaagtgtggggagacagaaaacctatgcaaccttgaaggaggtaatgatttctcaaagggcaccaaacatacagaaaacatatttaagaaaataaataggcaaatcagagttagaaaatatttgcaagatatgtatctgagaaagtactcgtatcctgcatatataaaggatctctataattcagtaacagagaaactaattttttaagtgggcaaaatatttcaacagaaaattcacaagagaaggtacacaagtggccagcaagcgcattagacatcagggaaatgcaaattaaaaccacagtgagatatcgctacatccaccagtatttttagacatcagggaaatgcaaattaaaaccacagtgagatattgctacatccaccagtagttttaaaattaaaatgactgatactgccaaatgttgacaaagatacggagcatccagaactagtgtacactgtcagtacagctgctttgggaaaatgtcgggcagtttctcataaagcaaaatacatacctaccctatgacccagcaattccgctcctaggtctttacgtaagagatatgaaaacatatgtctacatagttgtacaagaatgttcctaacagttttatttatgatgaccaaaattttctaacagttctcctttctatcaataggaggagaatgaataaacaaactatggtatacccaaacaatgaaaaactagcaataaagaggaaggaattactaagacatataacatgggtaaatctcaaaaacataatgttttccaccaaagagtacataccggcatgattccatttatatggagatttagaacaaaaaaacagttctataaaagcgaaagtaatcgatggtagaaaaattctgaacagtggttttctctggaggaatgtgggtagggagttacagggaagggacttagggggaccctgttggtgatgtttggctggtaggttggataggtgatttgcagaggtgtacccatttgtcagaactcacctaatgatacacttaagatttgtgcatttcattgtatgtaaattttatccgaaaaggaaaaaaattctgcaagtaaatattgaaccctacgtagtgatatgcaggcagaagtactggggatgagggcggaagtgtaccaagctctgcaacttactctgaaatgcatccaaacaagatgggttgatggatggacagagggacgggtagatatctaataaatcaagtatagtaacatgttaattgtagaatctaggtggtgggtatacgggtgttcactgtaaaattcaactttttagaatgtttgaaatttttcataataaaatggatttaaaaggtaattgcagtactcaccctgggtgtatacacatgcacccattctcgcgatgcccctaaagctcttgcccctcagaaggctagatgaaagaggggcattggggagtgagtaacagagccgagaggactgctaacagcaccagggtttctgatgaaaatgcactcgccagagctgtgtttctttattcgaaatcacacggttttactcaacagggctcctagcccttctgtctctgctcctggtgcgtaagggcggtgtgtggggctctgcgcctgaaaccgctctctcggaaggtgggaagatgcccacgtatccattcctctccgcgtacagattcgctcccacacgcccgggcgggtgattccggagggccgcgcggggctgtgtgcgcgggcgggggcgggatgtgtctggagggggcagagcgccctctcccggccccggagggcccacgcggaccggctgagcgtcccaccagccggttctgcatccactacccagatctgcgcgccctggtgggagcaccgcagccccgggtcggcccttcgaacgccgagcgtctacccgcggagaccagcgcaggaggcgggcccgcgcgcaaggaggcgggcgacagggtggagtcgccgcagctggcagccgcacggctctacctgttgcagcgtcggagcgcgcccgcctgagaaggcagagcgcggtgcggacctgtgctccgcgcgccggctggcagggcagggccgcggctgccaggaggcccgggaacagtcccgacggagcggcgcggagagggcgctccccggaaggtgagatctgagcgcggcagcggcgccagcgcccgctacaaggcggggtctcggggagggggccccggcggtttgctggagagccttgctactgttctgcatgaggtgggggatgccttctgcgcggaccccgcgtccaggcaaaactctggaacgcactaggcagccaagcccggggggaagagatggaacgctccaaggtcaaggtctcctggccgcggagcccttccagcccccagtgtttggcctcctctccggaagcggggctggctcgcggtgcgcgcttggtccgggcggagcctactagtaggcgcagaggacgcccccgcgcaggatccagagaccaagggcgctctggcatggtcaaggcgagggaggctgcccgggggagaagcccctaacttcctttgctccctgttccaacctccctttctggtctcctctctccagcccgtccgcccaacggatgcgcagcgttggggcccggccggaggtcggagccctcggacgccgcagccctcggacgccgctcagcacagcccctctctccgtgcgcccgccctggaccccctccatccctaagccccggcagccgattcggagactcgggaggccacaggctcagcgcgacaccacgaccacaactaggaggcaccatcgtcgatctacctggggaggcacctacaaagccagcagactgacacccgtgtcctagccgtcggcggcctgcgaagcgatagtcaaaggaaccaggacccaggaccccggcgctctgcttacccgcagacctccggaccgcgccccccccccgccgccccgccccgccccgccccgccccgcgaccgtctctttgcgggaaactcgagttggctcgagcttgccctgaagacgcgccacgccccctcccctatctgagccggacagggagccggggtggaaactgcgcccgcatcccagcgccaagcagacgtgaactctgcgcccgttccccgggaccttcagcgttaaggagaactccgaggagagcagggggagtggaggggaacggcggcgacaaagcggatttgaaactaggagtcaaggaggacgtggggagctggcgccacaggagctaccgaggcggcggccgggggagcctcgcggcctgcgggagagcccggcggtcatgggcgagccggcggtggggcgcccgggagctggctgagcgccggggcccttatttcccgggggtgtgggcgagactccgccgacgcccggtgccgtgggcctgggggctgcccccgggggcccggccatggctggccggggtttcagctggggcccgggccacctgaacgaggacaacgcgcgctttctgctgctggccgcgctcatcgtgctctacctgctgggcggcgccgccgtcttctccgcgctggagctggcgcacgagcgccaggccaagcagcgctgggaggagcgcctggccaacttcagccgcggccacaacctgagccgcgacgagctgcgcggcttcctccgccactacgaggaggccactcgggccggcatccgcgtggacaacgtccgcccgcgctgggacttcaccggcgccttctacttcgtgggcaccgtcgtttccaccataggtaagtgtgctggccggactcgctgacaacctccgggcggcctccacttcctccggggggcaggaccgaccctctcatcctttcattcatccatctgggcgcccagccagactccactgacatgagctgtcgcctgatcaacaggtggtattgcctccccgctgctctaatgtggtccaggcaccggcagcttcagcgtcacctggcagcttgttagaaatgcag

SEQ ID NO: 6538 - DNA, 6000 bp, Homo sapiens
gccatctaggctagcagtggccatctaggctggcagtgtttgactttctcttctacaacattgctggaggtagttttaattgagtgagttctgattagttgagattttactacggtgcattatatagtgaggcaataattgataaaggttttctaaaaatgttgcattctttctacctgaagattatagtcacttacaacgctttggaacatgaagacatcactcttttgaaattcttcttgaaaaacaaggacgcaaatttggaaaaaaatgaaaaagaatagtttttcataaaagataccataagattcttagaaattacagttgtcaactgaactttgattcctgatgaaattctttgcaggtccaagaggatcagcatttcaatgtgtatcagtaacattagatgactattaaaaatatagtactggggccaggtacggtggctcacacctgtaatcttagcacgttgggaggccgaggcaggtggatcatttgaggtcaggagttcgagaccagcctggccaacatggtgaaaccccgtccatactaaaaagtacaaaaattagccaggcgtggtggtgggcacctgtagttccagctactggggaggctgaggcaggagaatcgcttgagcccaggagacggaagttgcagtgagctgagattgcaccactgcactccagcctgggtgacagaggcaagactccatctaaaaaaaaaaaaaacctaaataaaaacatagtattggaatctaaatatagaggcattatataaactggaaatagatcctctttccgtacctcagcattattaattgaccactgaaagagtagagtaggttgagcaacataatgtggtcttatattacactggataaaagttgaagtaattccaagaagactgcatatctgggtaaatacttcaggatggtcacatatttgccatgatttcagggacataacaaaggttttctcacctccctctctactcacctcttccccatacttcttttatttgtttcataatgtctgatggtctaagatttatttttctatactttggcttaaatgttcacctggtgttaaaaatgcaaatacctctgggataggaataacattgtctttgagcatcagttctctcaaagaacacagacaacacactttgatagagagaataatacaagggaatagtaccccagagttggggaggtaacaatgaaaaggaaaaagggtcaagagtgtttcagctgcaattgccagagatcaaaactttgtgtaatcatcttggcattgggaatggtaatttgacttagagattagtgggtccccaacttcagtcagatagctcgggtttgatttctacttccatctctaactagccttgcttatttggataagcagtaacctctctaagctccagtgttctcctcaacaaatatttatatgcccaatacatgtcaggtattattttaaattaaatcacaataatattgcccatcttctaggattgttatgagaaataaatgggataatcttaaaaagtggttgctatgtgcccggtggatagtaagaagaatcttatggaacaagtaatcctaaagatgattcctttaatatgtgaattcctacacagtttacaaagcacttccacatctattgcctccttacagcaaccctgtaggcagaactagccagatatttagtgctccattttacaggtgaggaaactgaataaagcttggcatgattcacttggttggttttgcagtgctccctactgaaaagaacggtgggctaaaatgtgcataagctggccaaatacttgttcttattatgaacccctattttatagatgcagaaactcggtaaggcttagaaagactttgatttttttttctgaaacttgtagtgaaaaagaatgcttttaagaaaagtatgagttggccatattagcctatacatgtcagtaaaggggtaaaaaagggttatttgatatgaagaagaggacattgaacaatttaatctccaatacataacagttacagaaaaagactggtttctcctcatcttcacttaagtactgaaaaatttaaagaagaaagagatttagactggaaataagagaatatttttactccaccgaagtttcttaaattttggaaaagcccatcaacaaagggtttggaatctttcactaaatatatttagaaaccttgaatagtcatatatattggactcttatttagaagtagaagactgaaccagtaatcttgaaatgacctctttgaaatctggtttcatgattcagcaaacatttagctgacttaattgtagaagaggaaagttcttatattacatttgttccaatgatattcaagcaaacaaatattagctttaagagcagcaaaaatgaaatgaatttatttcacacattcccataggaggtggagactctgtctcacacttgatcttcgctaaaaggctgagaagcaatgtgagactgtgtctcacttcctactgaacacaattttttctactctccaggctattccaagcctttcataggctctctgggagaagcatctgtccatatgcccagacagtaggtccctctaaagaattttcaactctgccaagttgaaagaccctgagaataagacttgctcataaatcaataggttattgaaagcacacatgctttctacacgtctttaagtttggttcaaattaaaaccttcctagaacgacatgaaaatcagagctcattcattatggtgtgtgaccttgctgagttcttatttttaaattcagtaaaataccatatgtgcctgtcaacttggtgtatatgtgtgaaaacactcatccattcctgaaacaagaccttttggataaaaaacaaagataacttctttgaataaagcaaagactaaggaggagagtgagtggagctacaactgtcttccattctatggatactggcacagatgccaagtttatagaaaatgttaacttattttaatgatctactatgaccaggaaataattttccccctttgactcaacttatctttagctacgtcaggccattaaacacatcagaaagcaaatgagcttggattctgtgaaaaaaaaaatcaatggcattagaaaaatatgaagacgcttttctagaataaaacacactaaacagaacaagcaaatgcaatctttgattggatcctgcttgtcttagtccgtttttgctggttagtttataaataatggaaatttacttctcatagttctggaggttgggaagtccaaaaccaaggcttgttctctgcttccgagatagcatctccttgctgtgtcctcacatgacagaagggcaataagagacaagctcattcccgcaagcccttttttaaaaggcaccaattcataagtgggaggggagtccttatgacctaatcatctcctaaaggcctcacctcttaagacaattacattggagagtaagttttacatgagttttagagaaacacattcaaactgtggcactggtttttaccaaacaactgtaacttttctgtgtgtttgaaaattttcaaagtaaatagtggaggggaaaagcaaaaatattctagctccatctctttaaaaaattacctgggattatggtttggaagtaatacagagagagaaaaactctaaaacttgttctataagaagaaggactatagctctgtacatttttggtaagatgtttggcacaatgctttataggagcataaaaatattgtcctaagggttaagattttaaatagagaaacttatagggaaagaggatgcagttcctggttatgaatcatgtccatcagcctgacactttaattacaacttctttggagtttatagtatattatcctcattaatccccaattagaggtttgagtcatcaaaataaatctgcaggacttacacacacagagttcattatggagcagcctagcttcacgcttccaggtgtatgacatatgacaccctctgtcctttcacttctgatgtgtctctagttcttccaagccaaaagcagagcccaggattagagcaacatatatttaagggtgtgtttttgcagatgtcagttgggactagaaaacaaatgtaggcatgcttaaacgctgagaccaatgtggaaacttcacgaggtgggggtagggggaagaaaatttttggtggggcacgtttaagttcacgttaatgtataacgctatcaattttactaccactgagtgggtatatgaaggggatgcttgcgtgtctgtgtgtatgtgtgtgtggtaaaggagggtgtgtgtgtggcggggggtattttcacaaaatgacatggaaacctgactgcagttcttttgggaagaggacttggaggtgtcttgggggtggggaaaagatggaagactgggatttcttctggacttcagggaagaaggatgaaaccaaagggaaacaatccaaggcagattaatgaatttagtctaatatttgtgaattcaaagtagattctaatcagcccatctcctccctcttctgtttgcagaactggcactaaagaggattccccaagctgcttcatcactccctgccattcgctgtcccaggaaattctcctgactcgccccggaatccgtgttcgactcttctctggctgagctgttcattgccagccaccctgagactccccacgcggcaggcatcgtctcctccggtctcacagctaccccgggctggagcgtggggagggggtaagggagccagccaactcggggaaacttcgttgccagagatgactggggttttcgggctttcccagccttcccatgccgggccacacggcattcattaaagtggtggggcaactattggtgcgctccagccgggcaggttttgagctgcagagacccgtgcccggtagcagcgctttgccaccgagtgcacccaggacgcagtggccgccagcccgggtctcctgctgggggccggcgagtgcagggagactttgcgccacgatgttttgttttcctgccgcaggaacgctaggcagtctctttccaccagacttaacccgcctgaagcaatagccatggaagttgcggcggcacagagggagacagaaccgcttggagcggcatctttcttggatgttttttctctacacagacttctttctttccttgggtaagtgaagtccagcttgtaaataaccaaagggtagaaccgaaggggatggagggggattgcagtagcccaaagggctaagttttcttgggagggaggtctccctccatccccactccatgcagtccactccaaatacgcagttgaggaggagttgtgtttgatttcagacacgttttgggaaacggtactgggatttatttacctaattttggtggatttttttttgggggggggcgggtaacttgcttttgtctacattctgagaaaggagaatgaaagtggaggtgagagaaagctccagaggttggaggtggggaaaagaaaggagggggcggcatccagtgattaagcagagagatcatcccaagggccaatgactagtgcaagtcttcaaggcagaccaggagcactagacactgatcctgctccctgccctaatagagtctacccccacctccccatccccaaccctccccttataaccatcctgctgttgccattctggggaaggtcatcactactcagggccccaaataacttttaatggggacctgcaacctgtcttgtacacaagtgatgctcaataaatgtttgttgattggccgaatgatgttgcatcctaagggtgcagttcctgccacaggaatttgccttggacagtgaactaattccccaatgcagaccccagaacacaaccataggtcagttcattttgcaaaggaggagggcctggaggcttggaaaatatcgtatttagaccttcattacccaaacgaac

SEQ ID NO: 6539 - DNA, 6000 bp, Homo sapiens
ctctttaaaaaattacctgggattatggtttggaagtaatacagagagagaaaaactctaaaacttgttctataagaagaaggactatagctctgtacatttttggtaagatgtttggcacaatgctttataggagcataaaaatattgtcctaagggttaagattttaaatagagaaacttatagggaaagaggatgcagttcctggttatgaatcatgtccatcagcctgacactttaattacaacttctttggagtttatagtatattatcctcattaatccccaattagaggtttgagtcatcaaaataaatctgcaggacttacacacacagagttcattatggagcagcctagcttcacgcttccaggtgtatgacatatgacaccctctgtcctttcacttctgatgtgtctctagttcttccaagccaaaagcagagcccaggattagagcaacatatatttaagggtgtgtttttgcagatgtcagttgggactagaaaacaaatgtaggcatgcttaaacgctgagaccaatgtggaaacttcacgaggtgggggtagggggaagaaaatttttggtggggcacgtttaagttcacgttaatgtataacgctatcaattttactaccactgagtgggtatatgaaggggatgcttgcgtgtctgtgtgtatgtgtgtgtggtaaaggagggtgtgtgtgtggcggggggtattttcacaaaatgacatggaaacctgactgcagttcttttgggaagaggacttggaggtgtcttgggggtggggaaaagatggaagactgggatttcttctggacttcagggaagaaggatgaaaccaaagggaaacaatccaaggcagattaatgaatttagtctaatatttgtgaattcaaagtagattctaatcagcccatctcctccctcttctgtttgcagaactggcactaaagaggattccccaagctgcttcatcactccctgccattcgctgtcccaggaaattctcctgactcgccccggaatccgtgttcgactcttctctggctgagctgttcattgccagccaccctgagactccccacgcggcaggcatcgtctcctccggtctcacagctaccccgggctggagcgtggggagggggtaagggagccagccaactcggggaaacttcgttgccagagatgactggggttttcgggctttcccagccttcccatgccgggccacacggcattcattaaagtggtggggcaactattggtgcgctccagccgggcaggttttgagctgcagagacccgtgcccggtagcagcgctttgccaccgagtgcacccaggacgcagtggccgccagcccgggtctcctgctgggggccggcgagtgcagggagactttgcgccacgatgttttgttttcctgccgcaggaacgctaggcagtctctttccaccagacttaacccgcctgaagcaatagccatggaagttgcggcggcacagagggagacagaaccgcttggagcggcatctttcttggatgttttttctctacacagacttctttctttccttgggtaagtgaagtccagcttgtaaataaccaaagggtagaaccgaaggggatggagggggattgcagtagcccaaagggctaagttttcttgggagggaggtctccctccatccccactccatgcagtccactccaaatacgcagttgaggaggagttgtgtttgatttcagacacgttttgggaaacggtactgggatttatttacctaattttggtggatttttttttgggggggggcgggtaacttgcttttgtctacattctgagaaaggagaatgaaagtggaggtgagagaaagctccagaggttggaggtggggaaaagaaaggagggggcggcatccagtgattaagcagagagatcatcccaagggccaatgactagtgcaagtcttcaaggcagaccaggagcactagacactgatcctgctccctgccctaatagagtctacccccacctccccatccccaaccctccccttataaccatcctgctgttgccattctggggaaggtcatcactactcagggccccaaataacttttaatggggacctgcaacctgtcttgtacacaagtgatgctcaataaatgtttgttgattggccgaatgatgttgcatcctaagggtgcagttcctgccacaggaatttgccttggacagtgaactaattccccaatgcagaccccagaacacaaccataggtcagttcattttgcaaaggaggagggcctggaggcttggaaaatatcgtatttagaccttcattacccaaacgaacccatgggacaggttcagggtcagattcatgggtcccgggactggatgagctcacaaggttctggcatggagagcatggacctttgtgtcaacaaacttgggtttgaatcctcatatcgtgaccttgggaatgtttctttatctctctgagccttgatcttctcatctgtaaaaggaggccagttacagcttctgcaaaatgatctaacaaagatgaatggagaggaaatatgagatggtgagggggaattcagtaaatgtcaatcttgcctccccgtgctctgaggactcaggagagggtgtctttctctgctgaagcccctctctgactctgatgcatgtaaaaaacattgtattgcagtgactgtgctagagtccagctgtccgtgaacagttaaagagaagagcgcagagggaggttcgaaagcctttcttagaagcatctccctctggacttgagaacagaatttacatacacactggtgtctcggggcatggctgggagaagcagagattccttgtttgtttgatttctatgtcttagccatcctcccagtcctagtagagagaggcaaagtgtggttacagagtccagggaagatggttctgaagcacccgggaacctgcctaaagggctgaagagtcagagtagcaccatcagattggtaccagttttgcctgaacggggtttgcagagaattcagggctccagcctggggtgcctgtgacagcccagtgacaaagcactcacctttcccacagaccacagcggacctctgtaggtcttgctcttggactcagaaaccttgatgtgatagtgacggatggatggtgagaaagatgctgctgacatagggctccccagaagcctcaaggtgccgtagagtagcatgcaacttagagatcagctgctagtgtgggattttaggaccccagctggcaggcataggaatgagctgggcaatttctatgcgtaagtaaaggcaacaacaatctaacaggaccttatggcactagatagtaagccccatgaaggcaagatctctgtcttgttctctgccatatggccagcacatagcacagtgatggcacttggaaggggttcaatatatatgttgaatgaacaacaaattttagtaaccttatctggaagccagagtaggggtttaaactacttcctatccaacactgcagcatgcaattcatgtcttcatttagcaagtatttcttgagcacctactacgtgtaaggctccgttgcgaggcatccgaagcaatttgtcagcatcattcatgttgatactcggagtgacccgttcaagagcacctcagcaccacctggcttttctgaagactgaggccccaccacaaacccctgtggggcttcaagcaggggcagtgagagggcgttagacgaatgctccaggtttagcccctttccgggaacaggtctgggtcccttcgcatctgccctgctggtcccaggatcccggggccgccgcttccgggagctgccgggtcttggcaactccgctttcctccgggggcccccgtgcctctctcaagcctcctttccagccaacgaccagcggccccagtccggctgcaggtagctggggaagggaccaagctgtgccttgggagcgagcttccccgggcggggagagcgcagcagatgcggagcggtcccagaacaaaaggctcatggctggcacgggcctccttggagtgcggcggggacgtgggttcgggactcaggcgagagagccagacgcgggaggaaaaaaaatgaagtgagaaaagagaaggagggagagctcagggtgagagcggtgagaagaggtgacccggaggccgaggtctgcggcggagccgcagcggcccttcctccgcctcctgcagcgccttccaggcaaccaagcgtgtctccggctgcaactccagcaagcgcgccgctgccgcctccacgcccgcccgccggccggccgagccagtaagtagcggcgcgcccaccgctcgttccccgcccctccgcggcttccccgccaccgcccaccgcctcccgccgccccgcgggcaagtccgcgaccgcctcccgctgccccgagccgggtgccgggggctcagcgcgccttcccagctgggagcctcggtccgctgctcgccctgctccctcttgccggggcgcggcgtctggggcgcgccgcggggagggtcgccctcgccgcgcgctgcccgggcgccgcgccacccctacatccaatggctttcggggagcgggaagtggggggcgtcgccgggggcgaggagccgcggccggggtggggcgtgtgcgctcagcgcggccgagcgaggctgacgtgcccgcccaagcgcgcgcccgggagtgtgtgtgcgggtgtgtgtgtgcgggagtgtgtgcgcacacgccttcgggggctggagtgacactgcagtgggcttctccgtagccccagccttcaggctgcgcagcccctaacctgccggcaccgcttttgggaagcagcttggctcttccatctccccaagccttcctctccatcctttcatccacccctcgccgatcttactttttcttttacccacggggccgcggccggccaccccctggccggtgcaaacacccaagccctctccagttctcccccaagctaatattttcccacctgtctttttctggggttcctccacgagccagtccaaggctcccccatcctcggaaattgttttgttggactgctaaaccgaggcgtgtaaagcttgaggactttattattatttgggttcttttcatttcttccccttctgggcaacgaagcaatgaaatttccaatcgagacgccaagaaaacaggtgaactgggatcctaaaggtgggtgtttcctacttttggctgccctcgccctgcctctgtctccggcgtgtgcgcgcttccttgagtggaagcactcttgcttctggcagcgtgtgtcctgaggctgggaaatgcgcctgggaactgcagcgcgggtgggaggagggcggaggcagcgtgggttccgaacccagatagtgcctgtcattaccacataatcattgtccctcctagattgtctccagatctatttagatagaccaagccgactgtttggtttgaaattgcaagtgtcggtatttgcttttgactttgagtgtgcgagtgtgtgtgtgtgtgtgtgtgtgtgtgtgtgtcctttgtttctggtgatctttgtctctctggcagatgggtggggtgcttccccctggacctggagctgcgccgcatgcccgggtgtcctcagtgggaaaggtttcctggcagcaagtggggctcgagttgcagcagccgtccctaggggtgggccgttctcgcagggcatgcagaataatggagcccacagggcctcctgagtcttcgttcaatcttattaccaaacctagcagctagttaggctcaggtcagagtagaagcaggaggaggggtggtttgtgagaagggtggggctggcaaggcataggggaggggcacgaagtgtgcccgcccaagcaatggtgtggtttgcatgcttttacgaatgttggaccaggtttcatccacgcaaaagggagggatta

SEQ ID NO: 6540 - DNA, 6000 bp, Homo sapiens
ccaattcataagtgggaggggagtccttatgacctaatcatctcctaaaggcctcacctcttaagacaattacattggagagtaagttttacatgagttttagagaaacacattcaaactgtggcactggtttttaccaaacaactgtaacttttctgtgtgtttgaaaattttcaaagtaaatagtggaggggaaaagcaaaaatattctagctccatctctttaaaaaattacctgggattatggtttggaagtaatacagagagagaaaaactctaaaacttgttctataagaagaaggactatagctctgtacatttttggtaagatgtttggcacaatgctttataggagcataaaaatattgtcctaagggttaagattttaaatagagaaacttatagggaaagaggatgcagttcctggttatgaatcatgtccatcagcctgacactttaattacaacttctttggagtttatagtatattatcctcattaatccccaattagaggtttgagtcatcaaaataaatctgcaggacttacacacacagagttcattatggagcagcctagcttcacgcttccaggtgtatgacatatgacaccctctgtcctttcacttctgatgtgtctctagttcttccaagccaaaagcagagcccaggattagagcaacatatatttaagggtgtgtttttgcagatgtcagttgggactagaaaacaaatgtaggcatgcttaaacgctgagaccaatgtggaaacttcacgaggtgggggtagggggaagaaaatttttggtggggcacgtttaagttcacgttaatgtataacgctatcaattttactaccactgagtgggtatatgaaggggatgcttgcgtgtctgtgtgtatgtgtgtgtggtaaaggagggtgtgtgtgtggcggggggtattttcacaaaatgacatggaaacctgactgcagttcttttgggaagaggacttggaggtgtcttgggggtggggaaaagatggaagactgggatttcttctggacttcagggaagaaggatgaaaccaaagggaaacaatccaaggcagattaatgaatttagtctaatatttgtgaattcaaagtagattctaatcagcccatctcctccctcttctgtttgcagaactggcactaaagaggattccccaagctgcttcatcactccctgccattcgctgtcccaggaaattctcctgactcgccccggaatccgtgttcgactcttctctggctgagctgttcattgccagccaccctgagactccccacgcggcaggcatcgtctcctccggtctcacagctaccccgggctggagcgtggggagggggtaagggagccagccaactcggggaaacttcgttgccagagatgactggggttttcgggctttcccagccttcccatgccgggccacacggcattcattaaagtggtggggcaactattggtgcgctccagccgggcaggttttgagctgcagagacccgtgcccggtagcagcgctttgccaccgagtgcacccaggacgcagtggccgccagcccgggtctcctgctgggggccggcgagtgcagggagactttgcgccacgatgttttgttttcctgccgcaggaacgctaggcagtctctttccaccagacttaacccgcctgaagcaatagccatggaagttgcggcggcacagagggagacagaaccgcttggagcggcatctttcttggatgttttttctctacacagacttctttctttccttgggtaagtgaagtccagcttgtaaataaccaaagggtagaaccgaaggggatggagggggattgcagtagcccaaagggctaagttttcttgggagggaggtctccctccatccccactccatgcagtccactccaaatacgcagttgaggaggagttgtgtttgatttcagacacgttttgggaaacggtactgggatttatttacctaattttggtggatttttttttgggggggggcgggtaacttgcttttgtctacattctgagaaaggagaatgaaagtggaggtgagagaaagctccagaggttggaggtggggaaaagaaaggagggggcggcatccagtgattaagcagagagatcatcccaagggccaatgactagtgcaagtcttcaaggcagaccaggagcactagacactgatcctgctccctgccctaatagagtctacccccacctccccatccccaaccctccccttataaccatcctgctgttgccattctggggaaggtcatcactactcagggccccaaataacttttaatggggacctgcaacctgtcttgtacacaagtgatgctcaataaatgtttgttgattggccgaatgatgttgcatcctaagggtgcagttcctgccacaggaatttgccttggacagtgaactaattccccaatgcagaccccagaacacaaccataggtcagttcattttgcaaaggaggagggcctggaggcttggaaaatatcgtatttagaccttcattacccaaacgaacccatgggacaggttcagggtcagattcatgggtcccgggactggatgagctcacaaggttctggcatggagagcatggacctttgtgtcaacaaacttgggtttgaatcctcatatcgtgaccttgggaatgtttctttatctctctgagccttgatcttctcatctgtaaaaggaggccagttacagcttctgcaaaatgatctaacaaagatgaatggagaggaaatatgagatggtgagggggaattcagtaaatgtcaatcttgcctccccgtgctctgaggactcaggagagggtgtctttctctgctgaagcccctctctgactctgatgcatgtaaaaaacattgtattgcagtgactgtgctagagtccagctgtccgtgaacagttaaagagaagagcgcagagggaggttcgaaagcctttcttagaagcatctccctctggacttgagaacagaatttacatacacactggtgtctcggggcatggctgggagaagcagagattccttgtttgtttgatttctatgtcttagccatcctcccagtcctagtagagagaggcaaagtgtggttacagagtccagggaagatggttctgaagcacccgggaacctgcctaaagggctgaagagtcagagtagcaccatcagattggtaccagttttgcctgaacggggtttgcagagaattcagggctccagcctggggtgcctgtgacagcccagtgacaaagcactcacctttcccacagaccacagcggacctctgtaggtcttgctcttggactcagaaaccttgatgtgatagtgacggatggatggtgagaaagatgctgctgacatagggctccccagaagcctcaaggtgccgtagagtagcatgcaacttagagatcagctgctagtgtgggattttaggaccccagctggcaggcataggaatgagctgggcaatttctatgcgtaagtaaaggcaacaacaatctaacaggaccttatggcactagatagtaagccccatgaaggcaagatctctgtcttgttctctgccatatggccagcacatagcacagtgatggcacttggaaggggttcaatatatatgttgaatgaacaacaaattttagtaaccttatctggaagccagagtaggggtttaaactacttcctatccaacactgcagcatgcaattcatgtcttcatttagcaagtatttcttgagcacctactacgtgtaaggctccgttgcgaggcatccgaagcaatttgtcagcatcattcatgttgatactcggagtgacccgttcaagagcacctcagcaccacctggcttttctgaagactgaggccccaccacaaacccctgtggggcttcaagcaggggcagtgagagggcgttagacgaatgctccaggtttagcccctttccgggaacaggtctgggtcccttcgcatctgccctgctggtcccaggatcccggggccgccgcttccgggagctgccgggtcttggcaactccgctttcctccgggggcccccgtgcctctctcaagcctcctttccagccaacgaccagcggccccagtccggctgcaggtagctggggaagggaccaagctgtgccttgggagcgagcttccccgggcggggagagcgcagcagatgcggagcggtcccagaacaaaaggctcatggctggcacgggcctccttggagtgcggcggggacgtgggttcgggactcaggcgagagagccagacgcgggaggaaaaaaaatgaagtgagaaaagagaaggagggagagctcagggtgagagcggtgagaagaggtgacccggaggccgaggtctgcggcggagccgcagcggcccttcctccgcctcctgcagcgccttccaggcaaccaagcgtgtctccggctgcaactccagcaagcgcgccgctgccgcctccacgcccgcccgccggccggccgagccagtaagtagcggcgcgcccaccgctcgttccccgcccctccgcggcttccccgccaccgcccaccgcctcccgccgccccgcgggcaagtccgcgaccgcctcccgctgccccgagccgggtgccgggggctcagcgcgccttcccagctgggagcctcggtccgctgctcgccctgctccctcttgccggggcgcggcgtctggggcgcgccgcggggagggtcgccctcgccgcgcgctgcccgggcgccgcgccacccctacatccaatggctttcggggagcgggaagtggggggcgtcgccgggggcgaggagccgcggccggggtggggcgtgtgcgctcagcgcggccgagcgaggctgacgtgcccgcccaagcgcgcgcccgggagtgtgtgtgcgggtgtgtgtgtgcgggagtgtgtgcgcacacgccttcgggggctggagtgacactgcagtgggcttctccgtagccccagccttcaggctgcgcagcccctaacctgccggcaccgcttttgggaagcagcttggctcttccatctccccaagccttcctctccatcctttcatccacccctcgccgatcttactttttcttttacccacggggccgcggccggccaccccctggccggtgcaaacacccaagccctctccagttctcccccaagctaatattttcccacctgtctttttctggggttcctccacgagccagtccaaggctcccccatcctcggaaattgttttgttggactgctaaaccgaggcgtgtaaagcttgaggactttattattatttgggttcttttcatttcttccccttctgggcaacgaagcaatgaaatttccaatcgagacgccaagaaaacaggtgaactgggatcctaaaggtgggtgtttcctacttttggctgccctcgccctgcctctgtctccggcgtgtgcgcgcttccttgagtggaagcactcttgcttctggcagcgtgtgtcctgaggctgggaaatgcgcctgggaactgcagcgcgggtgggaggagggcggaggcagcgtgggttccgaacccagatagtgcctgtcattaccacataatcattgtccctcctagattgtctccagatctatttagatagaccaagccgactgtttggtttgaaattgcaagtgtcggtatttgcttttgactttgagtgtgcgagtgtgtgtgtgtgtgtgtgtgtgtgtgtgtgtcctttgtttctggtgatctttgtctctctggcagatgggtggggtgcttccccctggacctggagctgcgccgcatgcccgggtgtcctcagtgggaaaggtttcctggcagcaagtggggctcgagttgcagcagccgtccctaggggtgggccgttctcgcagggcatgcagaataatggagcc

SEQ ID NO: 6541 - DNA, 6000 bp, Homo sapiens
ataaacctatataagggaatgccaattaaaaacccaggttctgttacagtaagataaatagtcatgaattaaatgaactacatgcaaaaactgagaacagccagacaagtgaagttatttttattctagcaagagaaatgagcatgctaaacaaaagttggatttaaaacaaaagcttttgtaaaaacaaaaatacaagcaactcagctgttcctgggactctgtgtaaatggaacagagtttgcttatctttggggtgttaagagaagatctgcaacaataaacactggttcaaggttaacgtttttggagttttttgaggaggaaatatgccaaggccttacagtgtagcatggttgaagaaacaggacactggaattaagctgccctttgaatccctcatctccccattacaactatgagaactcaggcagcctccattgcactggcttgaatcttagttttgcatcagttctttgagtataattggactgaatgccccccatttgtgtacaaattagatgggacaatgtatataaagtgtttacgcagtgactgtaagtactgattcacagaaggtactcaataaaagttagctattattcaatgagtcattgtaaggaagactaggaacagaaatctttgcttaaaaaagacacactaacaatcattttggtaaacacgttcgtacagataagcaatcatgagaacagagaagttaagcaatttgaccaaggtcacacagttatatcctaaggaactttcagggtagaatctgaacttccttaaggtccggccagcattctttcccctatccaatactattctcctagtatctgagagtttattggcatagactaaatatattctgtgcttagctcttggttttgttggcaaatttttggtgaaagtatcaaaatatatacattggtgtggcagtgtaaatatgactccagcagtatgtatttttaaagagcttcacctttaagtccctttcctacttttagaattttatcccaaggaaaaaaatctgaaagaaaacgttagggggaaagggagacacatagttttttttaaaaagggttatatgcagaaaagatggtcactatcatatactttggaatactgaaaaactggatataacctacatgtccaacaatagttaaatatgatagacctatgaattatggcaccattaaggaacatagaaaatatttatttcaatcttcatctcattccaaaatgaggtaatttgacaactagaataattgtgtgtatatcttaattacaatctattaaaaattaaatatttacatggataaagtctgggagataaaatgaaaaaatgaagtgattttagcagtatttggactagaaatgccttttttcttttcctttgagttcttaataacactgatacaaaaaacaattttagagtgaacttgtttcttattttactggtactaaagagtttacatgatccaagcatcctttaatacatcacaacatatgtaataaaatgagagaaatgagatctgaaccttccttacatagtgaactctgaggaacacgacaatgtatatctatatcagtcttccacctctcggaacttacgagctggtaggggaaatatagtgtatacatggaccttggtacagcttcacctccaagatctttaacaccccatctcataccagcactttttcctcccagctttcacggcacctgccaattaacattattaggactgccaatctaccagtatcttctttttcttttgatccacagggttggtttcattttcttcgcctttcagattaactactaaggcacatctctttagccacccctccacaaggactgcaataccttgaattttttatctttcaaattcatctgccctgaaaaccaccatatgctggtcacactcagtcatttctttctcccagcctgaggtgcgggagcccaatacccagctgcattctgcagagggcatttttatcaccctgccctcttgtttcagaggtgagataactctgcacctgttctctgaaaccagtggctctggctggtggatcagcgtctccagcctgctcctgcctttgcactatcagtaagcttgccacccctcttttcaacctcatctgcactattatctttttccctcaggatacacacttctctgacatctaaaaaagaagcctttcctttaggatacatgctcttctagacagttatcacttgcctttctccttccctttccacacatttctaaaaacaggctttcccctttagaaccccattctctctttttttattttatttttattttttgagacagggtcttgttctgttgtccaggctggagtacagtggcgcaatcataactccctggttaaagctatcctcccacctcagcctcttgagtagctgggacctcaggcacatgccaccacacccagataatttgtttttattttttgtagaaacaagatctcgttatattgcccaggctagtctcaaactgctgggctcaagtgatcctcctgccttggcctcccgaagtgcttgaattataggcatgagccaccatgcccagcaagacctcatctccaaaaaataaaaataaaaataaaaaaagagtgtcttcctatcttgctatctgcttccctttccctgcacctgatggtaacctcattcctgccacacaaaccacccaaagtgttcccacaaaagtcaaaccccataattccttttcatttatctcacttgaaccctcagctgtgtttaactctgctgaccattccttgtcttgaaatattctcttttgactttgaaaatctgtcaccttaattagtggaatgaataaactagtacctttaggccatccaggaataggagaaaaggaggaaaggctctgagctcaagaatggggcttgcccttttaggggtgtggtggtgatctactagaaaaaagacttaagatttaccagataggcttggtgtgatggctcacacctataatcccaacaatttgggaggctgaggcagaaggatctcttgggctcaagagtttgagacaagcctggacaactgagggagacacctctctctcaaaaaaaaaaaaatctacaaaagttgtgaaaactgaattccttcctagagacgagttttgtggactagtgattcaatgaaacgggtgggtggaactcaaccataatgatacaaagaactatttattcttttattgaaaaaaagggtgactggagactggatcacactgtgggaacttgctgagaattttggaacttcctctctttgggtatgataagaagtgagggaattgaaattcaagtcacttgaatttccctcagtcttctataatacctggtttccaacttgcattcatttaacaaactggaatcaatgttccattattaaatcaatattactttttaattttaatgtgacttgtagaatgcaatttgatacttgattacaccctatgattcatagctattattggctattttgattgtttcttactcctaatatgtcccctatcaaactgcaaatgccttgaggtcaaaggtccttttttgtctaattagcataggactgaacacttggaagatgctaacaacattcctctgttaaatttaataaggattttaactttccaagttcaatgggttttgaatgactcctgaatataatatattatgctaggtgtagtgtaatagagaaaacatttgtattacttgcattttacaagctggaggagaagcaagaacacaatacctagggaagatttagatttagtaagaaatcagaacgtcccaatacccccttgtatatgttttaccaacctagatttaaaaaaaaaaaaaaaaaagccagaatcccaggcaacatagggagctaatttgagttctttttataataaatcctataaatccttgtagtttacttccttaggccagacactccagatgtttttgtggatagcagctaggtctcctgggaccttggattgggcctttctctagtcaggcaaataatctgaaaagaaaacgaaatcacatgtagtccagcacattttttcctttcttggtttctccacaccagctaagagttatttaaaggctctgaacctctccagcctttgattctttttaaggatgattttatttttagagaactttccacatttcctagttatacagccagactgggtgatctggccagaaaatcattttcccttaaaaaaaaaaaaaaaaaaaaaaaaaaaaaaagctaaaatttgaacgcaggcgttgaattcgaaacagatttatcataacgtaattccctggacactcccaacttgagactgaaagctgggcgaaagcggtttgtgaagctaacctaaaagacaaaatggtctagagccaccttttccccgcaaataacagaggattaaggatctgaaatcttcaagcctccaggaccacggtgcaagccctcagcaaaaatttctgctggaggccggagcgccttttgatttcgggagactggcccaggaactctagtcacttggaaggcggaagagaaggtggtacctgagccaggtaggagccactcagaggcagcccggggccgccactcacctaggagaggaggtggagtccgatgacctggactgagaggaaacgcgagactgagtctaccaggtgaggtaaaaaacacccacctgctcacctcggaaggggcgggcgaggtgcggctcccggtgacccgcgggggtgcagcgcacctgggcggaggcggaactgggagggtgtgggcactgctcgtagggcctggaactaaactcacctgtgacggaggcagaggaggggcccgggcaaaaacccacctgagctggcgggaaacccgacccgcgagcagtccccgggcttgcgcggcgcggagagggaggcgccccgcggcggggcccccactcggtcagcccgcgcgtcggtccccgcgcggccgccatgacctggagcgccacggcccggggcgcccaccagcccgacaacaccgccttcactcagcagcgcctccccgcctggcagccgctgctgtcggccagcatcgcgctgccgctcttcttctgcgcgggcctggccttcatcggcctgggcctgggcctctactactcctccaacggcatcaaggagctggagtacgactatacaggcgacccgggcaccggtaactgctcggtgtgcgccgcggctggccagggccgggcgctgccgcccccctgctcgtgcgcctggtacttctcgctgcccgagctcttccagggcccagtgtacctctactacgagctgaccaacttctaccagaacaaccggcgctacggcgtgtcccgcgacgacgcgcagctgagcggactccccagcgcgctgcgccaccctgtcaacgagtgcgccccctaccagcgcagcgcggccggcctgcccatcgcgccctgcggcgccatcgccaacagcctcttcaacgactccttctcgctttggcaccagcgccagcccggcgggccctacgtcgaggtgccgctcgaccgctccggcatcgcctggtggaccgactaccacgtcaagttccgcaacccgccgctggtcaacggcagcctggcgttggccttccagggcacggcgcccccgcccaactggcgccggccagtctacgagctcagccccgaccccaacaacaccggcttcatcaatcaggacttcgtggtgtggatgcgcacggcggcgctgcccacgttccgcaaactgtacgcgcgcatccgccagggcaactactcggccgggctgccgcggggcgcctaccgcgtcaacatcacctacaactacccggtgcgcgcgttcggcggccacaagctcctcatcttcagcagcatctcgtggatgggtggcaagaaccccttcctgggcatcgcctacctggtcgtcggctccctct

SEQ ID NO: 6542 - DNA, 6000 bp, Homo sapiens
ccctctccctctctctccctccctccctccctgcctccctctctctctctctctctgtctctctccttcttatcttgctctgtcacccaggctggagtgcagtggtgccatctcggctcactacaacctccgcctcctgggttcaagctaggctccttctgcctcagcctcccaagcagctgggattacaagtgtgcgccaccacgcccagctaatttttgtattttagtagagacgaggtttcaccatgctggccaggctgatctcgaactcctgacctcaagtcatctgccctccttggactcccaaagtgctgggatcacaggcgtgagccactgtgcccagactgtacacttttgcttttggagacagagtctcactctgttgccccagctcccacggctcactgtagcctcaacctcccaggttcaagcgatcctcccacctcagccccccaaatagctgtgactacaggcatgcgccaccatgcccacctaccctttgtgttttttgtagagacgaggtattgctatgttacctaggttggcatcgaactcttgggatcaagcagttctcctgcctggcctcccaaagcgctgggattacaggagtgagccactgtgcctggctgaattgtacactttatttatttatttatttattttgagacagagtcttgctctgttgcccaggctggcgtgcagtggcatgatctcggctcactgcaacctccgtctcctgggttcaagcgattctcttgccttagcctcccaagtagctgggactacaggcgtgggtcatcacgcctggctaatttttgtgtgtgtgtgtgtgtgtgtttttagtagaggtgaggtttcaccgtgttggccaggctggtcttgaactcctgacctcaggtgatcacctgcctcggcctcccaaggtgctgggattacaagtgtgagccactgcgcctggcctgaattgtaccctttaaatggatgaattttatggtatttgaattatatttcaataaatctgttaaagaatcaatggccatgcttgtgtgggtgcacttgttccattgatctgtcggctgaccctctgccaattcagcctgtctcaattgctttagctttatggtgagttaacatccattagtgatggctgggcacggtggctcacacctgtaatcccagcactttgggaggctgaggtgggtggatcacgaggtcaggagatcgagatcatcttggctaacacagtgaaactccgtctctactaaaaatacaaaaaattagccgggcgtggtggcggccgcctgtagtcccagctactcgggaggctgaggcaggagaatggcatgaacccaggaggcagagcttccagtgagccaagatcatgccactgcactccagcctgggctacagagcgagactcagtctcaaaaaaaaaaaaaacccaaaaaaacaaaaacaacaacaacaaaaacatccattcgtgagaaccctccaactttttcccttctttttcagaattattttggcaactagttgcttttcatttctatatacatttcagaacaaggttttctatacctataaaatttccgacaggaattttaattgaaattgcattaaatccgtagtcgttttggagagaattggtatcttaactatatttgttctaattcaggaacacagcatgcctctcacatatttaggccttctttgatttcttttatcagcatttggtagttttcagtatacaaatcctgtaccagtcttgttagattaataccaaacgaataaatttactgggggaccattttaaatagcattgcttttaaaaattttggttttcaattgttcattgctaatatatagaaacaggactgagttctgtgttttcatcctgcaaccttgcaaaactcacttattagtattctgacttttttgttggtaaaattcttgggattttcgacatagacttttatgttatttatggatagggacatctttatttcttcctttctaatctgtatgccttttatttttctggttttattgcatgggttaggactgccagtacactgtggaacaggagtgaatagagtggacatctttaccttgttcctgatcttagggctcagcatttagtccttcattattaagtatcacattagatgcagaggttttttttttttttttttttcttttttggacagggtcttcctctgttgcccacactggagtgcagtggtgcgatcttagttcactgcaacctctgcctcccaagttcaagcgattctcatgcctcagcctcctgagtagctgggattacaggtgtgtgtcactgtaccctgctaatgtgtgtgtgtgtgtgtgtgtgttttaagtagagatggtgtttcgccatgttgcccaggctggcatagaactcctgagctcaggtgatctgcctgccttggcctcccaaagtgctgggattacaggcgtgagccaccacatccggccagattgttttgtattttttgtagagacagggtttcaccatgtttcccaggctggtcttgaactcaagctcaagcaatccgcccactttggcctcccaaaatgctggtattagaggcatgagccacagtgcctggcctaattttttttttaattaaaaataacagatatggaatctctccatgttgcccgggctggtcttgaactcctggcctcccaaaatgttgagattgcaggggtgagccaccatgcctggcctgttgtttttgttgttgctttttgtagattccttttatgagattaagcatgttccctttgctttctagtttgctgagagtgtttatcagggatgagtgttgaattccgtcaaatactttctttgaattgattgagatgatcacatggttttcttcttgagactaatatggtggatcacatcgatttattttcacatgttgaaccagccttgcctttctgggatagcctccatttggttggggtatttgtgtgtgtgtgtttttaatgctgcttgattctatttgctgataattagttgagggtttttgtgtcatgttggcattggcggctgttgattgtcttttctcttgcaggttggatttcctgattcttcacatgcagagtaattttagattgtctcctgcacatttagacattatgttatgagactggtcttatttaaatcccattgagaatgttggcattttgttttatcatgcaatcaacctagttggtttcaggccacaagttcaaataggctcctgtgggtcctgccttccatgtcggttttgttttcaaagcctttgcagtgggactcagatctgtccttcgtatgcactgcccagtggccagtgtgggacgtgggcagtgggctgtccttttgttcagttctcagcctttgggatgtgaatgagggtttagacttgtacatcatgtatggcttgcacaacttcctggggttgctttttttttttttttttttttgagacagagtctcactctgttgcccaggctggagtgcagtggcaagatctcggctcactgcaacctccatctcccggactcaagcaattctcctgcttcagcctcccgagtagctgggattacaggtgtgtgccaccacgcccggctaatttttatatttttagtagagatgggggtttcaccatgttggccaggctggtctcgaactcccgacctcaggtaatccgcccacatcggcctcccaaagtgctggaattacaggtgtgagccaccacgcccagcccatggattgctttctactgcttctccctgcccaccatctctccagcgacaggggaccacatctcctggggctggaaaggaaggctcttctgcctcagcgttttaggtgcttgtaaaccctatgccttggtcatggctttggtgggatacctaggggctggggcatcagagaatggagaagagtaaaaaaacaaccactaccaaaaaaccccatcctcccaaaccctaacatccccccgggcattctcctgcaccctgggagcattaggcgacctttttctttcctccccttgtgccaggactagagaacttctggagctctctgtcctcttctggctttcaggccgtgttgagtccaggcccggggatacgggaagagaatctggaagttcactaccagttgggtggtgcctcaaattctggtctttccaccaaatctggtgtccctttacctctctgaccctcagtctcctcctatgtcagagggaagtcacagcagttctgggaaggagggcaggcaggcagaaggtgccctcgggttcttctctggctcacacgggatggacaggatgtggggggaggggcttagtgccacctcagtgacaaaatgaagcccaagtccccaaaccctagcttgcctcctggacgggctggagaagaaggtgggggccgctcatcattcctttcctctgccctgagaagaaacctgggaaggctgggtttctccccaaagaggacagagggtggcgcggagggccccggcggccaggccagccccgcgcctacatccctgtcagctcctgggccggtgggcgcctgtccggctgagtggggtcgctctagggggcggcagcggagtttcagggcgcggggggcactgggcgggaccctgggattctgggcggtgggtgaggagggtggagacgggactccgcgcctgggggtgcgcgagggcgccccgctccccagagccaccagtcctgcgcgccgccgcgcggtgctgtcgccgtggcaaccggcgctgcggagggggcggggcaccggcacccccgcgctcccaggtccccaggtccggcggggctcgcgggccgaggggcgcggggcggggcctctgggtcgggggcggtgccgcgcgggcgggggaggggcgcggcgggaggagccggcgcggccccggcagtggcggcagaggctgggcgggcgggcccgggagcggcgcagcatctgcgggcggcggggtaggcgcgggcgcgggcgggactggctgggtgcgcggctgcgtccgcggagggggcggcgggcctgggcgaccctgcacctctgggccgtggggactgtggggtggggcgggggccgatgcggcaggggtgaggcctggggccggcggggtgacggggacccggccctgcgtggggaagcctcggggggacaagcagagacgcagcctgctgggagcggcccaagctctgcaccggcccgcggcgggagcacagcagccccctcccgcccctcctcccgggggctccgaggggtggttatggggcgagggtccttgcggggcccgggcagtgaagggcctggaggccccagagtctgtgccaggtctgagccgcggggcgtggggggaggaggggcctcggccggggcccaggagacccaggacaggtgggcctggggccaggtccctacggagaggtggccgggccgggctctggcttgccggggtaggggctccgctaggggctggagtccgtcccttcgccagcgcagagcccctcggcccgcatctgccaagtgactgaggatcgagcgacagcgtagtggggcggaggggctggaggcacggccggaaagggtgagcggcgccgtggctcccccgctatttatttggccccgccacgcgcggagagggaggaaattctcaggctgcggctgcagctaggggaggcccaggtgggcctggaatgggcccagagagggcttcctgggtcagacgtgtagatccagtggacgtgaaaaccgggtgagtgtcccggtgggacccagagcgcggggaggcttggaggcaggggcatgggctgaggaccctcaaggcaccctcctcgcgacctgtcagagctccgaggggtgggggtgtcctgtgtgtggctgtggggatcctgggcggcgggtgctgggtgggggcaggggtgggagtgcagagttcaacgctttcccggat

SEQ ID NO: 6543 - DNA, 6000 bp, Homo sapiens
cgcttttgtcgcccaggttggagtgcaatgacgtgatctcggctcaccgcaacctccacctcccaggttcaagcgattctcctgcctcagcctcccgagtagctgggattacaggcatgcgccaccatacccggctaattttgtatttttagtagagacggagtttctccatgttggtcagactgatctcgaactcccgacctcaggtgatccacccgcctcggcctcccaaagtgctgggattacaggtgtgagttcaccctctctttgaccactgttttgcagtaagttagtgacaaagaaccaacacaccgtggcagggagtggagagaattcgcttctgtcttttgtgcctctggtgcttacagtgctagttaattaaagtttctctgcatcttccactagggggtaccactccataacttttgaaacagaagtctgctggatgcagttcttaataaaaaatgaagtccaggcacaaagaatttttttaaaacttttctgagcgcatgctgtaattttatgaagcaatttaatttgattctttttaaataaaagctgccccatgggcagagtaataggcaacaatcttgagcagtataaacctatataagggaatgccaattaaaaacccaggttctgttacagtaagataaatagtcatgaattaaatgaactacatgcaaaaactgagaacagccagacaagtgaagttatttttattctagcaagagaaatgagcatgctaaacaaaagttggatttaaaacaaaagcttttgtaaaaacaaaaatacaagcaactcagctgttcctgggactctgtgtaaatggaacagagtttgcttatctttggggtgttaagagaagatctgcaacaataaacactggttcaaggttaacgtttttggagttttttgaggaggaaatatgccaaggccttacagtgtagcatggttgaagaaacaggacactggaattaagctgccctttgaatccctcatctccccattacaactatgagaactcaggcagcctccattgcactggcttgaatcttagttttgcatcagttctttgagtataattggactgaatgccccccatttgtgtacaaattagatgggacaatgtatataaagtgtttacgcagtgactgtaagtactgattcacagaaggtactcaataaaagttagctattattcaatgagtcattgtaaggaagactaggaacagaaatctttgcttaaaaaagacacactaacaatcattttggtaaacacgttcgtacagataagcaatcatgagaacagagaagttaagcaatttgaccaaggtcacacagttatatcctaaggaactttcagggtagaatctgaacttccttaaggtccggccagcattctttcccctatccaatactattctcctagtatctgagagtttattggcatagactaaatatattctgtgcttagctcttggttttgttggcaaatttttggtgaaagtatcaaaatatatacattggtgtggcagtgtaaatatgactccagcagtatgtatttttaaagagcttcacctttaagtccctttcctacttttagaattttatcccaaggaaaaaaatctgaaagaaaacgttagggggaaagggagacacatagttttttttaaaaagggttatatgcagaaaagatggtcactatcatatactttggaatactgaaaaactggatataacctacatgtccaacaatagttaaatatgatagacctatgaattatggcaccattaaggaacatagaaaatatttatttcaatcttcatctcattccaaaatgaggtaatttgacaactagaataattgtgtgtatatcttaattacaatctattaaaaattaaatatttacatggataaagtctgggagataaaatgaaaaaatgaagtgattttagcagtatttggactagaaatgccttttttcttttcctttgagttcttaataacactgatacaaaaaacaattttagagtgaacttgtttcttattttactggtactaaagagtttacatgatccaagcatcctttaatacatcacaacatatgtaataaaatgagagaaatgagatctgaaccttccttacatagtgaactctgaggaacacgacaatgtatatctatatcagtcttccacctctcggaacttacgagctggtaggggaaatatagtgtatacatggaccttggtacagcttcacctccaagatctttaacaccccatctcataccagcactttttcctcccagctttcacggcacctgccaattaacattattaggactgccaatctaccagtatcttctttttcttttgatccacagggttggtttcattttcttcgcctttcagattaactactaaggcacatctctttagccacccctccacaaggactgcaataccttgaattttttatctttcaaattcatctgccctgaaaaccaccatatgctggtcacactcagtcatttctttctcccagcctgaggtgcgggagcccaatacccagctgcattctgcagagggcatttttatcaccctgccctcttgtttcagaggtgagataactctgcacctgttctctgaaaccagtggctctggctggtggatcagcgtctccagcctgctcctgcctttgcactatcagtaagcttgccacccctcttttcaacctcatctgcactattatctttttccctcaggatacacacttctctgacatctaaaaaagaagcctttcctttaggatacatgctcttctagacagttatcacttgcctttctccttccctttccacacatttctaaaaacaggctttcccctttagaaccccattctctctttttttattttatttttattttttgagacagggtcttgttctgttgtccaggctggagtacagtggcgcaatcataactccctggttaaagctatcctcccacctcagcctcttgagtagctgggacctcaggcacatgccaccacacccagataatttgtttttattttttgtagaaacaagatctcgttatattgcccaggctagtctcaaactgctgggctcaagtgatcctcctgccttggcctcccgaagtgcttgaattataggcatgagccaccatgcccagcaagacctcatctccaaaaaataaaaataaaaataaaaaaagagtgtcttcctatcttgctatctgcttccctttccctgcacctgatggtaacctcattcctgccacacaaaccacccaaagtgttcccacaaaagtcaaaccccataattccttttcatttatctcacttgaaccctcagctgtgtttaactctgctgaccattccttgtcttgaaatattctcttttgactttgaaaatctgtcaccttaattagtggaatgaataaactagtacctttaggccatccaggaataggagaaaaggaggaaaggctctgagctcaagaatggggcttgcccttttaggggtgtggtggtgatctactagaaaaaagacttaagatttaccagataggcttggtgtgatggctcacacctataatcccaacaatttgggaggctgaggcagaaggatctcttgggctcaagagtttgagacaagcctggacaactgagggagacacctctctctcaaaaaaaaaaaaatctacaaaagttgtgaaaactgaattccttcctagagacgagttttgtggactagtgattcaatgaaacgggtgggtggaactcaaccataatgatacaaagaactatttattcttttattgaaaaaaagggtgactggagactggatcacactgtgggaacttgctgagaattttggaacttcctctctttgggtatgataagaagtgagggaattgaaattcaagtcacttgaatttccctcagtcttctataatacctggtttccaacttgcattcatttaacaaactggaatcaatgttccattattaaatcaatattactttttaattttaatgtgacttgtagaatgcaatttgatacttgattacaccctatgattcatagctattattggctattttgattgtttcttactcctaatatgtcccctatcaaactgcaaatgccttgaggtcaaaggtccttttttgtctaattagcataggactgaacacttggaagatgctaacaacattcctctgttaaatttaataaggattttaactttccaagttcaatgggttttgaatgactcctgaatataatatattatgctaggtgtagtgtaatagagaaaacatttgtattacttgcattttacaagctggaggagaagcaagaacacaatacctagggaagatttagatttagtaagaaatcagaacgtcccaatacccccttgtatatgttttaccaacctagatttaaaaaaaaaaaaaaaaaagccagaatcccaggcaacatagggagctaatttgagttctttttataataaatcctataaatccttgtagtttacttccttaggccagacactccagatgtttttgtggatagcagctaggtctcctgggaccttggattgggcctttctctagtcaggcaaataatctgaaaagaaaacgaaatcacatgtagtccagcacattttttcctttcttggtttctccacaccagctaagagttatttaaaggctctgaacctctccagcctttgattctttttaaggatgattttatttttagagaactttccacatttcctagttatacagccagactgggtgatctggccagaaaatcattttcccttaaaaaaaaaaaaaaaaaaaaaaaaaaaaaaagctaaaatttgaacgcaggcgttgaattcgaaacagatttatcataacgtaattccctggacactcccaacttgagactgaaagctgggcgaaagcggtttgtgaagctaacctaaaagacaaaatggtctagagccaccttttccccgcaaataacagaggattaaggatctgaaatcttcaagcctccaggaccacggtgcaagccctcagcaaaaatttctgctggaggccggagcgccttttgatttcgggagactggcccaggaactctagtcacttggaaggcggaagagaaggtggtacctgagccaggtaggagccactcagaggcagcccggggccgccactcacctaggagaggaggtggagtccgatgacctggactgagaggaaacgcgagactgagtctaccaggtgaggtaaaaaacacccacctgctcacctcggaaggggcgggcgaggtgcggctcccggtgacccgcgggggtgcagcgcacctgggcggaggcggaactgggagggtgtgggcactgctcgtagggcctggaactaaactcacctgtgacggaggcagaggaggggcccgggcaaaaacccacctgagctggcgggaaacccgacccgcgagcagtccccgggcttgcgcggcgcggagagggaggcgccccgcggcggggcccccactcggtcagcccgcgcgtcggtccccgcgcggccgccatgacctggagcgccacggcccggggcgcccaccagcccgacaacaccgccttcactcagcagcgcctccccgcctggcagccgctgctgtcggccagcatcgcgctgccgctcttcttctgcgcgggcctggccttcatcggcctgggcctgggcctctactactcctccaacggcatcaaggagctggagtacgactatacaggcgacccgggcaccggtaactgctcggtgtgcgccgcggctggccagggccgggcgctgccgcccccctgctcgtgcgcctggtacttctcgctgcccgagctcttccagggcccagtgtacctctactacgagctgaccaacttctaccagaacaaccggcgctacggcgtgtcccg

SEQ ID NO: 6544 - DNA, 6000 bp, Homo sapiens
caaaccgccagcccgggcggagggctgggggcgggggcgaagccgagcgcgctgacacacgcgcctggaattcccaggagagccggccgcggcctgtgacctcttctgctcttggccggccccagccagcggggccgaggggaggacaggctccctccacgggggtggggcgcacacccacctcgttcctcctgctggagcccgccctgtccgtgtccctccccctcccaggcagcctgcctggaggtagcagtaccctctgtgctccggacccaggcagatgtgaactcccctcactccacaaccaccagagacagcccggggcagaccctgtccagctcctgccccagggccttgagcacattaccaaatgctctgtgcctgtttccccatctctgcaaagggtgctaacggccatctcagaatggctcgttgagattcaaagtgtcttgtaaatggttgttacaattgcatggaaggtaaactgaggcccagaggccccaacaccacagagccacgtctactcaccagcccccagcccccaccactccccgcacagtgtcctccatcatgctgtgggttttggaggttcagagggcacccagctgggagctcgaggcaggctgagctgtacacagtggtgtgaatgggcgtgcatgtcatgcaaggcagtgtgctgtgtgccctccacgtgtgaaggtgtgtgcctgtgtgtgagtgctggtgtgaacatgtgtgtgtaccctgtgctcatgcaagtgtgcatcgtgtgtatgctggaagcagtgtgtgcgcgcacgcatactctgggcaatccactcctcgggtgtggtgttgtgtaaacagtggaggtctcagatgccagtccctggggacactgggcccccgccccaggtttggctggcccagcttgtcccctcccctgatcagcccttgccaaggagtgctttgccatctgggggctagagggagttgtggtgggttcagcgccctgcaagggcaggcctgtgccctgagagcagatggtccccggcttaccctccaggccaagaagtcccccagctcaggtgacagcagagcccaggaaggagggccagccaggtcagccaaccccagggaaccccccaccccgacggcgctgggcactcaggatgggggactccgcagaagccttaaggactgacagtccagggagctggggtcctgccgtgcagacacactgggggacccaggtctgcagggactcgctgcagaaccaggagtcccagggcacacgagcctccctgcccaggttgctggcaagcccctggggtgagtgggggcccagctgccccgccctgagcaggctcaagcccgcttcccagatcccccctgaacccactgcccgcgaagcagggtaggagatggagcaggggaccacaaactcacaaactgagacctgtcccttcaccctgggcccagagaccaggcagaccacttcccacccagacccagagcccagaggggtctcatgggctggcccaccccaccacatccccgtatggcctccgccctgacagctcccgaaggccagggatgctccctcccctggtgtggggggctgggatgggtgagccagggcccccacccacccctagccttgtcgctcctgccgcaggttcctcagcacctgcccatcacagcctgctgactgacaaggaccccatgctgcaggaggcaagctggggcccaggagggaccgcagccccgggaggctcctcattcattcacatctccaccaaagaagccccacggctgcccagtgccagacctggcctgatgcctggatggctgccactgggatgatcagggtcaagtagtgtgggcctttgagcatcctggagagggcggggaggcctctagaggcacccagggtgcaggtctgaagagggatgggctcagctggccaacacacggacaccttgggcctggcctccacttctcccagcctggctgcccacactccccaccctagcagcgggcagtgtctggcgcaccagtcctgctccccctgctgccatcctccgggggatggtgtccttgggccctaatgggcttcaactgcccatggaagccctgccaaggtcccgacttgcagcctcctggcgggaccaatgtcctctccaggcccttcctgcatggaccagcccccaggggcattgctccaagccagcagcccctctgccctggcctgcagccctcccagcgcctgctccaggcttgacctctccctcaccttctcctccttcagctcctatcacccaagggcacagaaaggcactgtcgcaccaccagggggcgccctgcctcaggggcgggcttaggacacagcagtgctgcttatctgggagcccaggggctggggacagaagaggctaactgacctctggctggtaccttccgggcttcaggacaactcagccaggtggtcactgtgggcccactccccagatgaggaaacaggccagagaggaggatgccaccggccctggctcttgggagtgggaggtctgtgtctccaggattcctccaagccaccaatttgggaaagtcatctgacctctctgggcttccgtttccccacctgtacagtgggggtgggaaggcatcactgctggggctgagcatgggactacaggacagagcttggggccctggctccagcaggctggtctccagcccctgggagcagggacccaccccacccagcacaggtgcctaaaggctgttgtctccgccagcaggtgaccctgcacccatgggtgggggtccacagggccaactcagccctgcacctgccagctgaggacaaactctcctggggagcttttgggctgtggccagaacaagcgaggctgcctttgagcggctgcctttctgctttctgctgtgtgcgtgtgtgagcatatctgtgtgtgccaggggcctgggctcggtgtgacccctagcaggtatgccccagctgtcaacaccctctccctcctgtggtccccactggccccagatggaggccgagtcccccagcccagagcgccccgggggtcgggagtgcccactgctttgagccacagaaacccaggccccaacctcctcaggacccccaggcctcctgggccaccaggatgcaaaccccacctccaggcaaggtggaagcccatttggcagctgaggccctggtgcctgaggccatcaagggaggtcagaagggacaaaggccacggctcggccgagaggagggtgccgtccgctctgctcaggcactgggccgggtgccagcagcaccacgttcccacgctctatggtgccaatcttggcaccccagccctgccccacccttgccttgcagggaccagggcaccgggaatgtggctgtggattccgccccctggggccacggattcctgtctcagtgggcgggggtggaggacggctttccaccctttgatccttgccagttccagggagcgaggccacgcccaggccctgccagccaggccacaggggaggccaggaggcaggcccaggcgagacagagctgactccctcagctcaggaaccccagctcccagggcctgggcctgctccccaggtgccccagaagctcctgcctcacctcttgccagctgggcacggggcctggtgcccagactaatcgggcagagaccagcactgggcaatggcccagtccccaccttcagcctgtgatggccacagcaaccccttccctcacctccccagtctgccacagggcacagagtcccagcccctctccgccagcctggcctcacatgctcaccctcctgccctagcaccccccattcggcagccacaactgccccacccagagactcctgggcgcctggtgctgttcaggacactggcctgctcagcatcaagacagatcccagaatgtcctgggcttctgaccacaaaggagccagcataggctaaagcctggcacgcggctcagaaccctcaaccctatgtgcttgtttcctgctcccccagcctctggagccggctgacagctaccccctcagtacaccttcatgcgtccccgacccctgttcaagcaccactgagcaccccaaccagtggacaaggggacaaggggtcccacaggaaacaggaccaccctctgagcctgggggaggggagagcaatctcaaaatcccacgtgggaggggcccagggccaggagtccagataaaggaggggcccaaggaaggatctcgcccgggctcctgagaggcaggaggatggctccactctgccagccgtcctgatctgctaagtggaaattacagtcattagcgtcccctcccagaggcccgtggtgccctgtgggcctggaacttgccccaccccctctgccacatatggcccagggagaaggcgctaaaggtgagcgccggctgcagggcggaggactctggcctctgcggggccgagccacggagccacctggcttgcggggatccctgggacccagccttgttctactgcccacttgacgcggcgggcaccctccttcctggtgggtccttactcccaaccctggcctggccatgggattgccagggtctggtggggggggggtccctttccaatggggcgccttcctatgcagacagaggagaggggagtggtcaggctgggtcctcaaggtgcccagacaggggtgcgaggaggcaagtgctcaccggagcagccaggaacgctccctggaggagggggcccggaagctccctggctgcaagagtggattcctgagcaaaagctccgcgggtggagaaagagagtatggcgggggccacgggggtccgagtcccgacacgcggctgcgcactcgctcccctgcaccgcgggcggggctggggccggaaacgcgcgcggcggcctcggattcctgcgcggtgggacaagcccgcgcctgcgcgccgcccggacagggcacgtcgcccgcgaggggggtggcgggcccaggaggaggggaccccgacagcccctcaccgcctgccggggcgggccgccacgctggacgggggcagcgcggggcggggtcggggggcggcagaaggcgcctttgtgcgtcgcgtccccgagcgtgtcgcggcgggcccggcaccggccccgctccagcgcccgcccccggcccgcgccccgggccccgcgcgcatacctggcgaggccacgaggggattctgcgggccgagccccgcctgggctgcgccgccgcaggcgggagaggctgaggattcttttgggaagcccctccgccggctgtaaccccagggccgtgccaccctcctgatcaccgcaagcatggaccccccagcacgctgcgggtgggacaggcagggcccctgtggggtggcttgactggcctggagttggggacgaagtccccgggcttggtcccccgagggcttggttgggcgtcccggggtaggtggctgccgcggcgatgtgggcggcttgcgtgtggccgatcggggtcgctgctgagccccggagagcggagggtccaggctaggctgggggagcgagaggcgagggcggagccgcggaggtgtgggcggctttcgtggtccgagaggccccaggttcccggcagggcggggaaggctggggcggggccagagccggagccgcgaagccgcgatggagagggcctggagggtgcgccaggagccggcgtcagggcctgcctccatctcctccaacccccaccccatttattcctgtaacaaatccctaccgggagctggcacagcagctgtgcgctggggacacacgagatgctcaccctccctgccctccaggagcttggactcagctgaggtctgcaggggccagcaggagcagggccgagggccctggtgggaaggtcgtggcccactagggaaggctgggcccggggggtcaggtggagggcaggctgagctgcgagctgtgtct

SEQ ID NO: 6545 - DNA, 6000 bp, Homo sapiens
tcattttcctcactttccttctgcctgggggacttttcttcacatttttcataatgtaagatgattggtaattaatgatttcatcaattgcctgtgtcttgtttttgcctttattttttgtgaataattgttttcattgaatctacaactctaggttgacttgtattgtttgctcatttttgttattttcctttcagttatttaaagatattttcctactgtccaccatgcattttttctgatgagaggtaatctatcattctaatttctttctctctgtgtcttgtgtatttttttttctgattgcttttaaaatttcctctttaatgccagttttaagcaattcaataaagatgtactttgttttagtttatgtcatattttattgagctcatggatctgagagtttacagttttaataaaatatgcaaaaatatccattatttcttgtggcattttctgcccacaccctattttctgggaatccaattgcacatgccttaggctacttgctttgcatgctttgtctcacagttcactgaacctctgtttattttttttcattcttctttttttctaggttacagtctgtatagtttatgatgctatattttcagaattactaatatttttatctggaatatttcatatggaataaattttataatttttatttttcatgtactttaatatgatattttctctctcaggatatgattttggtcttttaaatatatttatttattgacttagcacggtcaaactttctgcagctttttggcaacacagaataaagttattttaactgctttaatgtctttatgtactaattatgtcatctatactatttctggattaattaccattacttttttttttctttttggtcttactcttaagttgtggtatgtgggaccagagaaatatctgctcgagaaaactttggcttactgctgacgccaaactgtggtgtttattctacctgatgcctcattaattaagagggtttccaactggctgctgggacgagcaactttttcaagctactaagctctggagttttttcattcttctacctcctgccttgggtattttttttttttttttttttttggcatatatgctccagtaagttttcaattaatattaagagggagaaaaattttcaaatctgtgaaagattctctctgtgcagttttctccttctattactctctgcattaagtttttttttcctccttggcctcttcatactctcagcaatgtcttttcaactcaggaatattcctggactctgcctagtaaactggaggccaagaacggagcaatcatactgctctctttgcttgctgtctgtcagcaaccattgttctttgtctgatgttaaatattttggatactgttgctttatatatacttttattttacaattttttccaacagaagtgtaaatcagttttctgttactgcatcttgtcaagaaaaataatataaagttacattttaaaacaaattactcattaagtaactaaaaccttttttacgacatatatgcaatttatttcatcaggaagatgttaatgaatataaaatgactttcattgatgtgccttgtttgatttttatacataaactgtgtagaatatcatatcttcaacaatttttaaatgaaagataatcttgaataacagtatatcacaaactttacacttaactatcccaaggaggattgatgcattattgctggctctgaactgtaaagatcaagctacaaaaatggtgagaaggctcttggtgctgaggatagccacgtgaggacagtcagcaaagaaaaaaggaacactaagttttaggtagttagttatggaagaaataagaaaaagaatgcacaccatttcccattgtctctagctgctcatggaataaaattttagatgtcatgttttggtctggagtttaatctggaatctaaaacaaattataattaagtccattaggggttggaaactactcttttgcctcattactcagtgttctaaagctgatatgtagatttcatcaatgcatccaactcatgctgacaggagtctattgttccagctttcttaaacaatttagcaggctgttatcactcataacataacattgaaaaatcacccacttatcgatagtcccattaggtctaccacatgaagtcatgtattctcacagaatggacatatacaatgggaggtaatagcaagtaaataatagaatggtttctgaaatcaagagaatggttgtttggcacccttgtgattctgaagctgttatgtatttttagcttatttatttgtaataggacataagataaaatattttgtggcaaagtttcatagtcataatagaaatagtaaatggttgaatttttcatttcctgctttaaatacccaaattagaactttgcataagtcctaataaaaatacaatcaattatttgttatttgtgttaaggtgctatgtaattcatgcaatgcataataaaaattagtgaatagtccaaacgttatttaaattaaatattggcataaatacaggtgtctctgattttttagaatagatgctatggcatatacattaaattgttatagcaaatttatggttaaaagaaagtttcttctgtaacttctctgattttcctgaccaataatgctatctgttgggcatgaggagcactataatctatactctgaagataccttttacttgctttgggccatttatcacgtaaaatagaacagactggcttatattttgcttgaaaatgtatcatgtactttgcaagtgtaaaggataatgtatgctcatctggaagttattttacatcaataagtttatgaattttttttcaaagctgaaaatattttgacattatagtttaagtacaaatgtgttgtgtacacacacatattgtattgtaaatatgtgtatttggtattaaaaagtttgccttcccaaatgtgcttttccttaaattatatttactttatccaatataaatcatatgatttggtggagtgaagtgtatctaaaattttgatctcaaaaaggaaagcaatttagatgatgtgaaaggaagttacttgtaagaactagtgagagcattttaagccgaatatttagggaaaaattcatagtgcagtgtgctgaagagtgaacagaagataagaaatttgaaactgaatgaaatgttacttttccagcaacttgattatgcatataaaggagctgtaaattatatactaaaagtagaaagaaacacttattataaaaatattttaataaaataatacataaatattccagaaaacttaataacaaaacttatacaacacttgaattgtcatcatagtttcacctacaatccacactcttccttttctttcctaatctattacaaattaattttgaaaacaatattttacattagcagaaaacttgaaataatactgatacagtattgtatgattttaacctgttaatcagttgttattatgttgttatatttgcttctatatttatatagaaatagaatatataatatcaggtagtatatatcatacacctcatataatatatgtaataatattaaaacatctaatgcattatataattatgcaatggtacatatgctatgtatatgttgatatatttacattcacatagcacatttgctttctgtggtatgtttgtgtctgtgtttatgtgtgtgtgtgtgtgtgtgtgtgtgcgctaaatcattggaaagtaaactgcagatgtcatgactgttaacctatttcagcaggtctttcttataatattagcattctctttcatcgccaacattaatttaaaagttcagggaatttaacatcaacacaatacttctacctaataaatagtaaatattcaaattcatcattcattctaatgatactctaacactttattttcctgcttccaaatcccaaacttaattcaaaattgcattcagttgtaacttttcactctcacttaatctagagctgttcttcattctttcttcatctttcaagacattagtattttttaagaattgagtccaatttcatcaatttggttttgatcaattgcttctttataaagaaattcagataatgcattctgagcaggaatctgacctaagtgattgatatattgcatttctcagtgtgtcacacaaagaagcacgggatgtcagtttgccccattattgacgatattaacttcaatcacgtggtatgagatttacttcaataaagcccaaatgactttatagaaaagattttgttaaacgtttgcgattaatacataatcgacttagaaagattttcaaaccatgttaataatttgttcttcagtaaactaagacaaaatgatttcagcatccttacaacaaccttgcctaaatcaagtagcattatgattacaaaacagtgcaaaaatttgattataaataatcactttcttttctgaccactctatatctacctacacatcatgtacctattatccatgtatgtatgtatatatatatatatatctacattccttcatatctaccaacctaattatatttttatacagaactggatgtataattacagttttttcaaaaatctaccactatacatcattattcactatattcttttagttattcaaagtgttcctttttcaccataggcacatcttcaagctgacttttatgtctttttaaaatgcattcaacatgtttgaataattccatactttgtgtcacaagatatgttaccaactcatatattttccatgtcccagccttgggatcagttatttctccaaggatgctaatttctattagtagagaaagacagatacttttttaaatctactgaaatgcttttctccttccataacagtgcatctctctgtaaaaatctcaaaggttcttttttcactgacccggtgaggtgggtggggcgagccccgaggggctctcataccaaaatgacaggatcaaattcacacataacaatattaactttaaatgtaaatggactaaatgctccaattaaaagacacagactggcaaattggataaagagtcaagacccatcactgtgctgtattcaggaaacccatctcacgggcagagacacacataggctcaaaataaaaggatggaggaagatctaccaagcaaatggaaaacaaaaaaaggcaggggttgcaatcctagtctctgataaaacagactttaaaccaacaaacatcaaaagagacaaagaaggccattacatactggcaaagggatcagttcaacaagaagagctaactatcctaaatatatatgcatccaatacaggagcacccagattcataaagcaagtcctgagtgacctacaaagagacttagactcccacacaataataatgggagacgttaacacctcactgtcaacattagacagaacaacgagacagaaagttaacaaggatacccaggaattgaactcagctctgtaccaagcagacctaatagacatctacagaactctccaccccaaatcaatagaatatacatttttttcagcaccgcaccacacctattccaaaattgaccacatagttggaagtaaagctctcctcagcaaatgtaaaagaacagaaattataacaaactgtctctcagaccacagtgcaatcaaactagaactcaggattaagaaactcactcaaaaccgctcaactacatggaaattgaacaacgtgctcctgaatgactactgggtacataacgaaatgaaagcagaaataaagatgttctttgaaaccaacgagaacaaagacacaacataccagaatctctgggacacattcaaaccagtgtgtagagggaaatttacagcactaaatgcccacaagagaaagcaggaaagatccaaaactgacaccctaacatcacaattaaaagaacta

SEQ ID NO: 6546 - DNA, 6000 bp, Homo sapiens
ctgcaacccacagaagtctaccctaattgatgtgtagaggtagagaaaagtatacttctactccatccctttctccacgtgcatttatggattcctctatgtgattacagtatggctacctttcttcgtttgtattttgtaactctagaataaaaataatttcgtttggctttgtgcttcacttacctgcatagtctctcacaaaactgtgtgcctatggaggacaaaaatagagtgtcttcacaaaatttacattccccatggcctttgggtgaatacttttattttagtagatgcacaaacgtattttaattgaattaaagaataaaggaagaaaacatagtgaaggaaaagagcagatatgaaaaagaacgctttagaaaaagtttatttttgctcataattacaaaaaatctactttttctaggcaactaaaataagaaataaaaatatctggactatagcatttgcttttcatcttatatcaggaatgtaatagctatttaaaattctgtgtattactaagggattagtaacgtttgcctcagcctaaggcatcagcatattctagcataatattatttcttaggtaatgtcttatgtcacaatcaccattgcctaattcaaatagaatggtagtttaactttgttttcagaacaaacgtgatggaaataccaagattcttttcagcttggaatattttcttttttttagtaggaaaaatactgaattgggataaaaagagggactaggtaaatctaactttgtaatttaccgctttagtgcaggagatactaaggaggtatcatactgaacgtaactttttaaatgaacctcccttctttcatttagttttctgtataaaatgtaggtcatggagaattttgcatgaatcaagcaactctctcaataattcattaactttttataacatccccatcatttatttaaaaactgttgccaaaattcattgggaaagttaattggattcatgtctccaatttctacctattttcagttggttatcagtgctagaaaggaaaattgagaggtgactcctaagagtctataaatgacatgaatatttacggttaccttcctgtaactcaccaaagtatagactgacacagttacatttgtctccggagtaaaaaggacccaacatttaaagctccatctcctacaaattctccttcaaagatgcatggctcatgtgattatgatggctaaagagtcccaagatctgcagttggtaaaatggagaccttacagagctgctaatatagcttcagtaagagtctgaaggcctgagaactaggagagttgatggtataagtttcggttggagcaaacaggctcaagatccaaaaaaagacagtgttacagttaaagtctgaaggctggagaagactaatgcaagttgaagtacttaggcagaaagagttccctcttactcagccctctgctctcctcagatcttcaatggattgcacaaggcccacccacattagggatagcaatctgctttacttagtctatccattcaaatgttaatctcatcaagaagcaccctcacatacacacccagaataatgtttgatgaaatgtctgggcaacttaagttaacacataaattaaccagcacaggggcccactgcccaacccctaaaaaagaaaagaaaatctgaagactaggctaaataactatagcaaccaaaattgtatcaactctattaaataaaaagtcatcagttgtgaggacgattaatataaataaacctgttattagttgtgaggatgattaatacaaataaacttgttatttataacatttatgtaaattctatactgtcaaagagaaatctgaccagatatttttgttaaaaattctagaaagactcaaccaatatcagggtagacactataatgtgctttgactatacatgagatattactaattagctgaagcaagtgataccagattactaggtaataagagacagcttactagcatccaggggacttttacagccataagcagatggaggtgtttttaatgtacattgaatgaaattgacagataaaatgtttacctattccctcttgttcttgtttcttctttactactgcacttgctttcctaaatattttctccagtaaaccctacatactctttgttaatgtttccctttatatttttaaaattaaaaacagcaactaaattaaatgaaatttactttaagcagaagacaatataatgtatgctgtagtttttttcaaactctaatataggcaatatttctgagaagcaaatctagaaactaaatattttataattatataacactaaaattatttataacaatatattgtatttgtttcttaaaacgttaaatatatatgtgaaatatgtggtatcactcatctcctttgcattaagtccagaaatgtcctagttgatgtctccagttagtaatactttagtccatatccattgatcaactttcatcatatttctattcccattcattcactaaataattcatccatttattcaacaaacatttactgaacaccaagtacaatttattaggcaaagtgataattcctgaaaataaacacagaaattgaagactgtctatactcaatgagtactcactacagttttcaagtaattgtaacacagtatatcaatcactctgttatattctaattaattgaattatttgtataaatttaaggggtacaagtgtaatttgttaaatagatatattgtatggtggtgaagtctgggcttttagtataaccatctgagagatattttttaaattcaatgtaatcacagataggagattacattgaatttttcaatgtaatcttcttcaagagcctggagaagattatacagttttcacagagatagtgataattgatttaactatttaaggagttcggagcatccctgttgtcttctagcatctattgaaaaagaaaaaaatacatcatacatgcatagtggtgaagagtaaggcttgttcagactataagagatatttatccaggaggatacataactgagggactgtggaagttaaactgcactaattagattggttattgcagtgagtgttcagccgatagcatatgtaaaaaacagttgtggtggtggtaaatatgtattataccattattattagtattaccattactgctggataataattatagcaatggtaatagctataaatatcactttaatagacacctccttgttatatactgtactactttatattattattgatagcaataaaattgttagttttatatattaataaaatacagctacttctagatttataatgggattatatcccaataaacccacagttaattgaaaatatcactaattcaaaccatggtcagctgagactctcaagaatgccctagagcagctaataagtaaccccaaatagaagccttaaatccatcaagttatgaccaccacatcctaccacatccttcctgagaaagacatccaatggtaagaaatactttcctaggactgagggcagaagaaaagaagaattaaattggtacaatttttctcttttctcttttgatccataatgtctaaattaataggtctattttcctttttagattttgatatataaagaatggacaattttgtcaagacatctaaataggttggggaaatgcatagttgtcttaaaataattaaaatggtcttgaatctattctgcaatagcatttataagcgaactaatatttctaagtctcagtttcctcatgtgagaaatgggaatgaaactgtatatacttcatggagtcattgtgaagattaaatgctataaacaattttttttttggaaaaaggtcaactagttaatattttctactatgtgagctgtatagcctcagccacagtgactcaatgctgctgttgtagcatgaaagcagctacagacaacatgcaaagaaatggaggtggccatgttttacttacagaaacaaatgacagagcagatgtacactgcaagccatagtttgccgatccctgctaacatgcatgaaagatgattactatagggcttcaaacatggtacaacaccatgttgtattcatgttattactattgttggatcttaactttataaatttctttagtttcaataataataattaggaataatttaaagttcattctttcttcaacaaatatttaaagagcacctctcctatttcagtcactatgctaggctatttacataatactgtatgtcctctggagtggtatattgagtgtagtccacaaaagtgggactcccagatgagagaggagagtggagaaggataggaaataaatttgaagggacagaaggatgacaatggcagacatacattattaattaaaattaagattaatatttaacattttatttgaataataggatgctcattttctaaagcagaaactgaggccaaaagaagttaagtgctgtacagaaagtcacacaactagcaagtacaaaaactattatttaaaccaagggctatcagaaaatagagtgcatatcctttttcttccgccattaggccaagatctcagaaatgaactcaagaatctcggtactgcatataattctgactaagaggattaaactagagaaatcactagaattatctgagaaccattgaggaggcagaaaaagatagaaccagttaactaaacgtctcagaaagtctgagtctgtacgtccacttcctaaaatgatcccaaattacttgaactgccagaaattttatttttttaattaattgttaaaaattttcaacaacctgggaaactaagtataaaaatagttttaaaatgtacaaatagtatgataaattttaaaatactttttcaaaacatggatgagagaaacaattgaaagagagagggaatgaagcagcaagattacaaaacaagtagagaacatccaagcagacagtttcactgaggggaatcttcccaatctggcttagcacctgagactcaattggccccaagagcatcaaaaccaggagataaagcttggagctactgtaactacaaaaagcatataaataaagtctataacttcaaaattagtaaaggtaaaaaacgtattaaggtaaataaaatcaaaacaccattaaaatagaagaaattaagaaagtaacaaaaaagaaaaaaatgtattgtagaccacacagaacaaataaacacaaattaagacaatggtacctattcttttcatgtactcatggaacatttattaaattggccacaatcaggacactgacgtgcaatgaaatactttaaaagttaataataacaatatgactaaaaatactcaatgcatttataaatacatattttttaaaactcacaattctaagtaatctataggttaaataagaaattataatttaaattagaaaatacagagaataaaatctaatgaaattatacctaataaaacctgagatacaacagtagtggagcttagaagtaaaagtatataaattgtaattggaattataaacacatatattcaaactatcaatacatctgggtctcttttttccccaaaaaaagaatgttctaaacttatattagggaagtataaggctgactgcccaattaccagtgttttggggacaaaagggaaaaggcaggtagaaatttgttcactctatttgacttccacttaactccgtgttttgagttgggtatccccacccctaccccccagccagccaatcacatacacacatgcatctgtttttactgtccacattctggtctgttatctaggttcatttataatacacacataaataaattcatccatatatatctcctcatgtatatgtctatgtgtattgctaggcctatgagaagaatttctggatcgtagaacattgtcatattcacactttagtaggta

SEQ ID NO: 6547 - DNA, 6000 bp, Homo sapiens; identical to SEQ ID NO: 685

SEQ ID NO: 6548 - DNA, 6000 bp, Homo sapiens
tgaatcttgattaatactgaaaaaatatttatcgagcttttaaaaatatggtacagattgcatatgaagacataacattatacttattattcttcagaaacaagtaaaattataattaaaaactgatgcaagataaaatatccctagtgaccattttcagtttagcttaatgctagaagtgatggtccttacatataatagaaggatttttgaaaagtcatgagtgcagtaaggaagacaaaaagattgcttactggattgatgcttttaaaaatgttttgtatgatagccaaaattcaaagtgttctttcagattgtgaggcagttttgagtgaaatcattttgttgttatatggcacatgtatcaatatgccttccagaactattacatatgaaaagtaagccaaatacattacttcttttcacgaagaattctcaagcatcttgtagaagaggaaatggtggtgtgtgcctcatggagcaggtgtacctattggaatgtatatctggaatattcaatgcggtgtaagctgtcagggctgtctggttattaatgaagtcaatgcatgtttcattatattcataaagccttgctgttaaaaaaaaatctaatgcctagaaatgttttgaaaataaaataattaccagctaaatcttcaaaacgtattccatacagtttgaattttaaaaaatttttaagtgttttattatttcatttcatttttgtagacacagggtctcactatgttgcccaagctgatctcaaactcctggcctcaagctaaaattttttaaatgcccctctcagatggaaatttttaacatgctatgtattaatttaatttggaatgatatcaataagtggaaaaatatattatattcatttcctgaatataattaggaagatcaattattaaaaaagatgacaattatccctaatacagagatataatacaataacgtttacagtccccaaagaaatgactatacaaattcaaaaactggcagagaaattcatgtctttgccctaaatgaaattaactttccctacctttccctcttttattcttgctctataatctcctcctatcatcaccaactactatagttttaactaccatctatatgtttataatttccaaatctgtatctctatctacctcagaactctccagcaagatccatacttctatcaagtatcgcctaatgaatatctacagctgaattcctcatagacacctcaaactcaacacatctaaatcatctttccacgttccccctaaacctgctctccacccagaactcacaatcttcacagttttccaagtcagaaatctggaagtcatcctacatcccttctacccctcattagatactctgtctttagccttcttctctctaatctctttcaaatcttaagtgttatcccagccaaacattttttaatgagtccccaccacctttatcccctatggcctacaaaggctttcaaactattaagcataaaatattaatgacctggaccttgagtagaagaggcaaaatcccccttaggagaagagggaaacagaaagtcaacttcattcagtgcaaagatatgaatgatgtttgcaaccacatcccactacttcatcttattttatattcctggagtactcaactggaaggcactgtgttaggtatgtggcatacattatgtcattattttacctagccgccaagaagagacaccgcatatccactaccaatctttattaatttcaaaactcctttcataccctattttagatcactgtcccaaccatgactaggctctcatgatctacatctgacactaattatctggttagtcttaaaatagaagaaaagaaaaagaaaacaacaataacagcaaaaggcagtgaagacactgatttgaatggatgacagaaagtacagatattctttatcaccatctgttctgagataatagacgtaaaggctttttataataatattgtcaataacttccatcactagtaactattcgccaaaattctctttaacagtacagttacaatacaaaataccgtttaacaaaattattacctggcaataagcatagtttccgagagctttatgagcttcatcaataactaaacactttatttcagcagcgggacaagctcctctagaaaggtcatttaccatgacctgaggtgtaagaaaaagcactctcttactgcaccatatttccttcctggtggaagcttgtgtagaccctgaaaataaaagtgacattctacattctaaacttcagactgttatctataaaatataaatagtctggctttttcagaatgcaaacatgctttggtaacattaagagaaaaacaatttgacaattcatcggaatgctacattttaaagttctggtgtggtccaaatatcaaagctggcacttatctaggactacaaccaaattgtctttagaaaattcctacaaaatggcatatttgaagagaggcaaattcttcaactgagaaatctttttcaggaagaatgccaggaaatatcatgttcagttacccatggggtatacgcacataatagcttcaaaatactatgacaagctgcagatattctctgaagattgaataaagcaaccctattcatcagttttgggcttgctgcaagtagagaatgttttaagagggagggcgtaagatgcacatgttgtagcttgggaactattccacatgggtcaggaattcccagctcttacttcaaaattagtccagtctaagatacctgtcatttcggccatgtgggattgcgggatacccatcacctggtagcaagcctcgatctgctgtgtcaccaagggtttcgttggggccatgaagaccacctttcctgaagggaaccagcggtagaaattgtacatgaccacggcggcaataaaggtctttcccagtccggtaggcagacacaccagcgtattgcaaaacagagcagcccgggaaatgtgcagctggtagtcccgcactgggcaattggtagggtaaatccacagggcgcccgcggaggtgcagaacccgccattctctagacacaactgccgctcagcctcgtacgccgcgacaagcaacacatcatcgtccgactccagctgagcctccgctgctgctggcaaaggcgccttggagctgccagggctctgaggtcgctcagttccggagctgcaacccggagtcccagatgatcgggagatacttgagccccacgtctgaaaaagcgttctttgccgtccgctcattaggccgacaaccaccgaaggcttctgtcagatatccgtagcagcagcagctcaaccgctacggttccgatccccatcggtttccttcgcacaaaactctggaacgagaaggcgggactaaggccagtttatccagttgaaaatgccgctactgagtttccgttgggaatgattggctggcttcccggaaaccttcacagccctgccggagactcatgcgcattattaaggcgttactctaaatatggtccccggtgcggttccggtgttttgttttaacaaactctaaatttaagttccgtttccaatgattagatggctgggcgtcattgctaacgtgataaatcacttaaaatgttataatagagatttattgtaaaatattacatacccggggacaatggaatagccaccagtttgggaacttaatgttattgagcgtctaacgtgcctcattccttgtacttttaaatcagaatataaagtgaaaagcaaaaatgtgtagatggaataatttgtcttatatctctatctgggctgagaaaacaaaatgccaagtctctttttcaccgcgctgggagtggcaacccattattttaatattttcattgtttaaagggaagtgaacgtggtctggtccagctattcgtcagaatttttttttttaatgctccttgcaaagcagagctaactcataggcaacatgcccagagtcagcctacatttttttaagtaaggagtcctgatgttcaactattaaatctttattataggtaagagcattataataaacgtcggtgtgcaattattccactctaacgaagatttctgtctcaaataattcctgacttctctctaaacctgactttgagtaacctctgtaaatttgtttcctcgtgtactgagaaaaaaatatacatcacagagttacgagcattaataatgtcattctcatcagcaagtggcatcctgagtgcggcttctttataaattgttttatttgttaaagtttctgaacttcgttttggacaaactttctcgtatttgtatggggggaaggggatgggcagtttgtatttaagtttcggttgtgtgatctttaaaagggaaatggtgggatatgggttttcggatcgacaaggactgaagcacttcaggtgtgactttttaggctagaactagataaaacgagataaggagcctgaatgctgttttcttttaacaggttatagactggactttaaaggcatagctgccttaaatgtgggtaatggttgataaatgtcgctaccatcagaggtcgcttcacaaggtgtctaattcagaatcgaagatctctagcggtcttctactcagtcgactgcagagacgaccgcggtaggtttttcaacccggactcaacaaagaagccctcatagcacagccttgacgtcactcaaagacaggccccaatcccgactgctagagcagaggcccgcccctcgacctccgtgagtggccccgccccgccctagggggcggggcgatgccgaactgcggcgggctggctcagtaaagcggaggcagcgggggaagatggcggcggccgttccacagcgggcgtggaccgtggagcagctgcgcagtgagcagctgcccaagaaggacattatcaagtttctgcaggaacacggttcagattcggtaccagaggcgtaggggcggccgggctggtgcggctgagggacgcctcacccccctggagatgcccatacattccgtattcctctgtgcccccgccctcgtcttcccgcggccggtggcctggaaggccggagaggcccagcttgtgctttggtgcctcgctcccgcctctcgggcgttctctactggggcaggggagcagctttatttcttggggcacacaggctgcaattgtagagttagaacctcattgggatccttgagtgggggtggaggccagaaaaataggaacccgaggatattgggggctagggcggagaggccgaggaatagtggtgtggatgagactcctgggagcggggcgccggctactagggaaatgggaagggatgtgaagatttctgtgggaacggtgtatccaacttgcttttctcaacagtttactaaatactgaacattaatgcgtgtgatttttaaaaaatccgtaggttgtggtttaagttttgatttaacatatcgaccctttaaatgaccttttcacctttatactttaagggagctacatgcacatttctcttgtgcagtggtctgtcattgttataaacagactaagaaatttatttgaaatgctttatactgtaggctctccatttgtcagcatagtctccatcttaaccatccgtctatagtcaagttatttttgttacacttgtttttcctttggaaaataagttcattcatgcacctgttaaattgctgaaatagttgtgcacgcagcattctcttacaagcggcagcctgcttgtgttttctatacaatttttaaaattctaaacttttcatttagaaaaactgtttctgggtttttttgtttgtttgtttgagacggagtctctctctgttgcccaggctggagtgcagtggcgcgatctcggctcactgcaacctccgcctcccgggttcaaacgattctcctgcctctgcctctcgagtagctaggactacaggcgcgtgccacc

SEQ ID NO: 6549 - DNA, 6000 bp, Homo sapiens
tttgagagaaaaataagtcaaattcttccaagtagaaaaaaaaaaaagttcccaacaacagccagactttttctttgtaaggcaacatcagttggtttcttgtagacatgatcttttccaggttttaggtgttatgtcttttaaaaattgaactcttttttttttttttatcaaccagcctcttaaaatgatctgcaaagagtgggaaattagattttcgattaaaaccttatcccatctcgaaggattactttatattgattcttaaatatggctacaattgatggactctaattaaaaatccaaaggaaaagtctgtcgtgcccatataaaagaagcttttcatatacgggaaataaagcttgtaaaaggttacaaataaaagattagagatttatccaaactagtttaaagcttcactgtggttttcttttcttcttttttcctttcttacaaaaccattcctgggtcttttttttccccagttttaaatgaagtttgcaaacaggcaagatattggactgtaatggttgttttatatcagctctgtaagctcaaggctgctgcctgcagtagaattgatttcaaggaaacttcaggaccaggagatgaaaattatgtaaactgacagctaccacccttcatcaatccatccacattcccgtccacacccttctaacacacacacacacacacacacacacacacactctgcctcacacttctctctgtctcacatccacacatgcccttcctatccctcaccctaaccttgctctgcacacacccttggtccccacactctcagggacagaggcacagctcccggctcacactccgctcataaatgtctcacagcaccacatctcgcacttgtcacacaatcttaatccgtttcattccggaacaacatggtcctcttttcctctttttcgcatttggagtttgcctccctactcttttatcgagacagcccaatcctatctttgaagttgtttctttctcccttaccctcttttttgaggcaaccgcaatgcagggagtgagagacccaagcttaatttataagtgatctgttgccttattttttcccctaaattttgtctgcatttccagtcttaaatccttgttaaaaaaattaaggttaatctcctcaaagtttataataaagatatatctaaaaacctaatgaaaaaatgacttctttctaggtattatggtgcttctaaggcaaaatgtagtccctcactgtccagtgaattgctgaaaagattggaaattaatgttcatatttctgaattcagtgttaaggaagtctaactggctcctttcccccaaaaggctatgttctcacggaatatgggttttgttcttcttttttaattagcctggaagaatcccgggatgtcttctctcccctccccctcccccactccccccaccaaagttaataaacttggaggaaagtttggaatattttaaactggcctggcttgtgcggtggagaaattgagcctagttagtgccacacatgaatcttgatttcaaaatatgcatattagacatattctagaaactgcacacaagctctgacaaataatttgattcccttcgtattggctttcttaatttagcttctgaatgcttatatctcatatgcgtagcaaaataattgtacaagtggcaattaaaaaccatccactttttaatgaaaattatttaaaaacacaaagcatgctaccataagtcagattcatagaaaaaaaatgttaacgacacaggacacagaaaaaaagttaaacacagaaatacaatgaacagatactaggtaaattggaagttcaagaacttactgaaaatcaagagttagacttttcatccaaagagtctttttctcccaccaagcatctaaggttttcagtaaaagagcccagcccccttcccccaaagccagtggcttttgtcctgacctagaatagggtttgtggggactgtacctgagccgggcagtctgcaatttccaaattgacaagaagagactggaagataaagagcatgttcttacaggtgaagagcaattttgcaacttttcaaggcgacacccaggagaaagcttgcctgctaccaactgctgcagagtctgggcagaattcctctagaaagaaaaagaaagtctttcaccccccccccccttccttgtctgcctctctctgtctctagttctctttctcctctctgtctctctctctcagatccaatcttttaagagcttcagcacattgctaagctaaagggaaattctctttgataaagcggtgtttccagcttctgggttttaaaacctaaatctatattcaaatctggctgaaggtgtgttctgggatttatgaaagcctcttaaaggggtaaatttaccaaaccgtgacaaaatcatcacaatcttactttagacatctgaagtggatgagaattttaaagagacccttgtttatttaacactgtccatttccaactcgtagtttattggccctgtatttctgcgaagttattagactagagggcaaaggagaagcgggagctgtctgctgccggccgctggaagggcaaaaccctctcacgccccaccatgcataaatctgcccctgtcgaatagaacagggggatttttagggagattcagctgcccccgccatctgggaggacatcgcaaacctctacatcgggcttgaaaggttaccctggacactggaccctacggcagatggatctcccagtccaaaatggtttacttggtttagctcacaagcgcatgttctgatcattctccatcccaccccatgcccactgtccccaaggccttcctccggccttcccctctgccagattcacaacgtccatttttctttttcggctcttttatgctttaaacatcattgtgatcaaactgggggaaacgttgtcttttctaggggtaggaaggagactctgcttcaggtgatcgaggtggatttgcctttccttcatcgaaagcatcatgactctgaccaagcgcacccaaccagtgcctccgacagccagcgccacgagggtcataacgcccggggcatttgttaccccctcctcaccaccatccccattaaaggcttcgggggcggccgccaggtgtttcagtacagtgggggtggggtgagaaaaaaggtcggtactcaccctcccccccgcccgggcccctagaaactcttgactcctgggaacgcgacagccagcgggtctccggactggagctgctgcagagggccgggaaggagctgggcgggctccgggcccctcgggggctcgaggggccgccagggcccaaagctctagggacacctgtgacaggggccgctgccgcggagtccccagccccaggccgagcccgagccggagcccggctgccgagagcttgctgcctcgtgcgcactcccgtaattcgttaattgctgtaaatcccaaggacggccacatttgagtacacatacagtataagaaccgacaacaaagcgacgaattaattaccaacttcattaacataggtccccaaattaaaggcagcgagctgtttctttgggcccactggccgtggtggtgatggtagttggtggtgggtgggtggcggggggtggggtatttaggaagagattttatttttcttttcctgcactgggtgttgtgaagcaagagctgtcttctgctcccacccccacccagcttattcacacacactcaccagttccactagccaccccccaccccacactccgcccagtctgtttttgcttttctagggactcggatccgtttgaaacctgtccggtccctgctttctatgccaggcaaaaaagttgggctgggggtcgcactctccggctcgggcccccaggtcccatcacttcccagcctctgggctcgcagcccggggctcgggcggcgccagcccaggtagctccaggcctcgcagtgtcggtcgtttggtggcgtttgttctaacacagaaactgtttccaacgggggcctccctcgttcgctctcttccacgatatcttgtcgacctcacactcgcatcctcgaggcccgatgtggtcccagctacttctcctaaatgggccctgagattagattccggggttcgtgttccctgcagtctgtcgtgggcttctcaattccaaaaaaccccaggaacctaccagaagccggggtctctcactcggggatcatttatttatatgtgtaaggatatttataagggcgtagggaatagagaagacactgagttttagaaaatagtttgttcttggacttgtgtatctttctctctctgttttccctacatgcccacatcgcactcccaggcctccctcctttaccctttctggccgtcagcgtgctctggccctgtctgagacggcatagtggtgtttttgagtttcagtctgacttgctttctgcctgtcatccacacacttattgctggggttgaatgtgataacccagtcactccctaacccgccattctccagcatttacttaaatatttttatcttccatcttacattgcatgggtttcctttcttcccttccctaaaaacaacaacaacaaaaaaaaaaaaaaaaaaaagagaggaaaggaaatttcggagtaaaggaagcaggggaaaagagggtaagagaagaactccctgtccatcattttaattatacaattagttcacatgctccggcccataatgtatattttaagcaaagcccagtgtctttaaagaacattctggtaatgtcggaggcctggatttgttgcctgctcgtccccccgtgcagcagcggcctgttttcctccccctgttgtgtgtttttattattttccctctggcttagatgtgtcaatcattctctccctgccattggttggagagtttgcgtcaaaaagttgccagagaggcgctttctcagcaaatctccctgagagcgggaccggcctcagctccaacacagcctccactgtgattaaaaataaaaattgctagagcagccctcactcgccacatctactttgtatgtattgcagaggggcccacgcgtgtttagaactctagccgccttcctcattttcgttctttaaaaaaaattttttttggttgtgtttgacttttcatggaagggtgaagactgcaaggtttctaactcaatactcttgatttcttttaggatagctggctatttggaatttaaaggatatttgactttttctaacctcccatgaggctgtaaggtaagtgtccgtctgtcttgtctatatccatatctacgtgtccccgtgtctgtcggccatcaccccagtacctccaatagaccgaccgatgcccctctgcgaacgtggagttctgtaggcggatgtattttttctcttacaaattttgaggtgtaataacgatcgttgcaaaaagaaaaatgtgatctagagatgagagcggtagtgggagagaggcagagagcgtgctcctgggggtcgtcgcttctgcaaaacgtcgtcgaaacgctgcgaatgtaatctggggtgttttggaaggttttgtttgtggttttgtttttatgtcaacgccgttctgggcttctcccgcgatctttgcgttttggcccccagatttggttggggtcgtttggatggatcccagggacctttttagagtccgagacaaaaagatgcagatgtaactagatggatggattgaaacaacaataataaaaagccaggcgcctccttgggcccgcgcgccggaagctcggttcgcttgcgggtcggcctgggccgggggccgccgctcgagcccctgtcggcccctgttgaacgtgagcggaaaccggagcggataaccgaggaggctgggagcgctggcttctcgtccgccccggcgctcactgctcgctctctttggcctcctctccctcagcctagcacagctc

SEQ ID NO: 6550 - DNA, 6000 bp, Homo sapiens
aatcactttccaaatggccacagccatgattcccaaactgtgtgccaaggcacactggtgcactgtaaggatctcagcatgccatggaatgttttgattttatttatatatttattgagatggagtcttgctgtgtcacccaggctggagtgcagtgacgtaatctcggctcactgcaacctccgtctcccaggttcaagcaattctcctgtctcagcctcctgagtagctgggactacaggggcctgccaccacgcccggctaatttttgtatttttagtggagacggggtttcaccttgttggtcaggctggtctcgaactcctgacctccggtgatccacccacttcagcctcccaaagtgttgtgattataggcataagccaccgtgcccagcctaaatattttgattttaaagggaagcactgtaatatttgacatctgtcaggaaggtacatggatactagcttcaacattacatcacccttcattctttttgatgacatacctttgtgatagaaactgcccaaggcttctcaggatttataaatttgttgccgagtgaacttcagtagttagtggtatcgctaccaaagaagctgtgctgcaaacttggggaaggaggctctttccccagattctaggatccctggctgcaatgtaagaaacttgcttatccttcctctcaataatatcaccagcctagcaaaagaggaaaagtgagggacaccttgaccagagcctccacttgcagcccagcctgctcaagctgtaagaaccaccttcttattcagaatttccccagagccacggcccaagggtcatctgcctgctgcagccttagcacacaggagcctgggcatgaaacaggcagaccctctcctccttccaggacacccttctctcaggaaatggaggccctaccagctcctacagccaagctctccatgaaggccaaggtgttaaggtgggccagtttctgaaagagccactttctgagcatattaaagaaaaatctcttgtaaaaacaaagagggcttagtgttaatgctcctttatgaattgtgttagtaggaactgattgttcaatcatggggcagtgcaaaacgttagctgtgttaactctgagcaaacaggggagatccttcaaggacctggaacactgtttcctagaaaagcttttaatcatgtgtccaaatcactgccacactcttctttaatgataagaattggatttagatttaaggctttagataaatgattctcaaccttcaagatgctatgaaatgacctaattaaggaattattttttcctaggcctatccagagattccagttcagtttgtggtatgaggctgaagtatggatatttttttcaaagctccttaagtatataaattgataaaattactttggaagactggcagtgtacgagttttctgttgctgctgtaacaaattatcataaactttgtggctaaaacagtacaaatttattatcttacagttctagaggtcccattgggctaaaattaaagtgtcaacagggtgtgttccttctggaaaggggaaaatccatttgtttgccttttccaacttctagaggttacccacattcttgcctcattgcctccttcctccatctttaaaactagtaggaattgatcaggcccatccagtctttctcacagctactgttctctggttctttatctgattctacaatttctctgattctccttctcttgcctccctcttctctatttttaagggtgcttgtgattaagttgggcccacctggacaatccagaatgctctccctattttaaggccacctcttggcaaactctgtaaacttaattctcttttgccatgtaacctaatatactcataggttccagggattaggacaaggatattttgggggacccattattttgcttgctgtagttagcatctactaaaattgaatacatgcatgccttatgaagacgtagtcccacttctacatacatgttagaagcaaatttttcagtgccacaaaataaaagaaaatagcactcgaatataaattttctcagcaaggcaaatttactctttcaggagggtgcccctcgtaggtctggttgccacgagaggacgcacaaacaaaggaaagcagggggttttattatctctaatgcagcttgtccctgttactgcgtcttgcctccattggctggagttggaccacacgatctaagctgaacctggttggctaacttgaaaagtgcaggaatgcggttttcaagtgggaaggtgggaagatcaatttttctgggaaagctgttacagcagggagggggtgatttcttggctgtcttgcctgagcacagcaggatgggaggggctgatagattggcaggcaagattactgtagacaaagaacagagaaataagacttcaggacagacagtacaaggaagtaaagacctcttggagaagaataccttgtttgtaacaaagtgaaactctttgaagaggaactgtctaaactacttgtttttaacatatataacagaaatgtgtacatattcttttttaaatttttaaattttattatttttttggagacagagtttcgctcttgttgcccaggctggagtgtaatggcacgatcttggcttactgcaacctctgccccctgggttcaagtgattctcctgcctcagcctccagagtagctggtattacaggcatgcgccaccacacctggcttattttttgtatttttagtagagacagggtttctccatgctggtccggctgatttctcgaactcccgaactcaggtgatctgcccgcctcagcctcccaaagtgctgggattacagacgtgagctacctcgcctggccagaaatgtgtgcatattctatacaaagacatttacaatattactaacggtggcattgttcattattgccggaaactggaaactacccaaatgaacaatggtggcttaagtatggcaatcagatccattagttaagcattcgatctcatttggggttggacagggagaggtcaactggagtgctgaatttttctgaggccaaactagaaagtaactctaggagctgggcgtggtggctcatgcctgttaatcccagcactttgggaggccaaggcgggcagatcacctgaggtcgggagttggagaccagcctgaccaacatggagaaaccccgtctctactaaaaatacaaaattagccaggcgtggtggcgcatgcctgtaaatctcagcaacctgggaagctgaggcaggagaatcgcttgaacctgggaggcggaggttgccgtgagccgagatcgtgctattgcactccagctgggcaacaagagtgaaactctgtctcaaaacaacaacaacaacaacaaaacaacaacaacaactactactctaggaccaggactgggagatggcaaataggggagagcatggagttccactaataaaatggtaatacactaacagtggagaaagcaatgggcttgtaaggagaacttggttcttgttgaacatccgtcactaatcagtcttgcaacccttgatcaagtcttgtcacctcactaaactcgaattttctttatctcaaaactagaaagaaatcgtggcctggatttctgaattatggggtttcaggcagccacaagtaggctggcagaaatgttttctggtcaaataaaggagtctgttgccccagaacaggagccaggggcacagccaacagtaaaattctgcttggggccccattcctcagctgcaaggtacttgtcttcaggtgtggcaggctgagatctgcctccttgttcccggcctatcccgctgggcccctcccctgcaagtgttcgcttccatacagagggaccattagggcctgtacatcgtacttcaggtcccctcctgtggtccaacattccctaggggcaagtgcaactgtttatgcggagaccacttttccgtgcagcccaactgaaggtgcacgttccaccgcaacctggtgcttacaacagctcgggaggccgcgctaccgcgcctgcgcccctctgaatatggaagcgcgcgcgaggtccttaagggaaaaggaagtaagggcggggacggagggagacgacttcaacgtagggagttgctgctgctacactgccggccggagaggacaaggaaaacgtggaggaagtcggtgatgactggctgaaggggatgattggcgggtgaaaagagccgggccagaaagcacctttgcatgtggctagaaacccgcctgaagaggggctgaaacccacgccggaacccgcccgattcgagccaatcagggagaggagccgggtgggggggcggacggggcggcctcgcggggggtggacggggcggtctgcggggagggggggcggtctgcggggagggggacggggcggcctcgcgggagggaggacagtttcgcgggttcgggcggcgagtctcccggatgctcctcagctctggggacgcggtgcagaagtgtgagggcgcccggcttccaggcagtaatgggcgggtccctgcgcgggagcgtggcgggcgctggactctacagcagatgtggaactggagagcttggcgcgccttccgactttgtcacacacctgcgccgccagactggggtcgggcccctccgcgttctgctctggagtgcctgggtctgggcccagcaccgcgcttttagaatctcctcagctgaatctgacgctcagcagtgggtgaagcgcagccccctgtttcaggccctgccgagctggaaggagtgtcagagctggagcgcgcgtggccccctctgtgttggggtcaccccggggttgccagggctcagggagggtcgtagtctggattttgtcacccgcacgtccccaccccccagcaggtctggggttggagaatccacgcgggcttcataagctagatgccagttaactgtcgagaggggacgctccctcctcgtaggcgtccacactggagaaggaataagatgggcgattgcctgggaagcctgacagggcggcggcagctgggatgctggagaggactggccccttgagttactgagtccgatgaatgtgcttgctctgctggaggaaccgcgctcaggttacagtcatcccaatatggttctgaaggtgcgtggttcaggtcacttaggacttgaccagataccgggtttcttttacaagccgtttctgacggtggcctgtttcaactactggcagagctcatgtaaaacagacttttaaaaaaatttggggggcttttagtatttttttcttattcctatattctgaggatattttatagtagtcccacatatggaattagataatctcttttttgtttgattaacagttttatcaagtataatgtacataccataacgttcacccattttaatggattcaatgatttttagcatatttacagagtggtgcaaccatcagcataatagaattaaggaatcgtgattttttttttctggtaattgcttttacagttctcaaagtttgcacaagcggatattttagaggtacagtgtaatataagagcttctgaaaatgtccacttaagttgttttatacctgagcaagtgaaattaagaagggaattgaagcaaatattcctggtaagttgtagggagtgaaacttttgtgtcttgtaataccaagtagatattgaccatttcaactggtttttatgctgaggaaatgcataaaccccattttacagatgatgaaatcgactttgaaggataagttgcctacagctgcatacctgtgcctgggctaggccccaaacccagatgctttatctctcaatttgttacccttgctacctcaacagcttggttttcaaccatggtactgatgagtgtgaacagtacaagccattcatttactgagcaaataattattgagtgccactctgtgccaa

SEQ ID NO: 6551 - DNA, 6000 bp, Homo sapiens
gaaaatttatagccttacatgcttacttaagaaatgaatagaaggctgggaatggtggctcatgcctgtaattctagcactttggaaggccaaagtgggggcagatcacttgaggtcaggagttcgaaaccagcctggccaacatggtgaaaccccatttctactaaaaatacaaaaaaaatggccaggcacggtggtgggtgcctgtaatccagctacctgggaggctgaggtagcagaattgcttgaaccccggaggcggagcttgcagtgagccaagattgcaccactgcactgcactccagcctgggtaacagagggagactccgtctcaaaaaaaaaaaaaaaaaaaaaaaaaagaatagaagctgaagattaattgattaatgttcatctcagtaaattagaaaaagaacaacagaataaaaaggaattagaataaaaatatgaacaaaaaaatgaacagaaataagtgaaacaaaaaatacaatagaatgaattaatcaagataaaagttcattctttaaaaatacaatcaaattggataaatctttggtgacattcatcatgaaaaaaagaagaaggaaatataattaaaaagggagatgtgggtttagacatagcccagattaaaaggacaatacgagaatacattgagctactttattactgataaggtcccagaattactactttcttccctgcatttttcttcaggaaactgtctaatcctctatccacagatccttaagagtaaagcaagaactaccagcagatttccaagatactgccacagccacctcccttttggggtttgctgggattgttacttcagatacagcaatttgactttgagcccctacctgctgtattgagttggcagtcaaggatcttccttgggatgcttctctttgctctcctccagaattaaccaagcatctcaggggcatactcaccccaaaaaatgtgggggttattaaatattttctaatgccatactggaatatgattatctagtttgcctttgttattgctttttgatgccttgatggagtcttgcttaaagttagtgctgtgtaatctcatgggcccttgacaactatcctgcaatgagaggaaaatccacaaaggttctttgagggaagataattctgtttggactaagcttatttgtactctatgtttaggattctagggttaaagctttatgattagattttttttgtttatgattacagccacttcctaaggtgaacagctgctttcagaattactgccacaggtcaggttttggcatttgccttaaggggttgtgtagcttttcttgtaacccttaaatcacaaaaaaattggtaccatacctctccctagaccactggggccaatctcagagtttccaaggtaacttttcagagataattcctcagtatttctaaggcaattttctgctttgtataatgaagtagctggacttttcttcactaaataagaaggaaaaacaccccacacatttgtcatttgctaaaatactttcctgataggacaccaaacaaaatataaccatgttgtttttatttagaatattagtataaataaagttgtgcgtttggcatcattctaacatcaggagagattttaagaattttcttataacttcccataaatcaatttccattaacaatttcatatttcatttattattgaattaatgaagtttattatttatctgagggccatcatatcatccattcatttatacatgaatttgttcattcaacaaatatttgttgaacagctactatatcaaaaacaccctgccagagactaagtaagtaacaccaggcaaacacagacatgaccatgtcctcacagagtttacagtctagagaatttttttttagaaaagagtctgaattcaggccaggcaattatagaggtattcctataaggaagggcacacatttctataggtacagagtgggatgacatgacgtgtaaatttagaatattggagagaatgttagagaaagaaaaacgtagtaacgaggatcatggtgtcaggtatttaaagggagcgtgtgtgaaggaaagctgtttttctagatggtgatcttatggaggaagatgagtaccacacattatcaattatccatgagcatcatttcatctttaaccaatcagaaatcattcccacttccatactgaagatcttgttttttctcttttacttgcattctcacatattaaattatctaagtttccaaatcctaaagcctcaaaaggtcatactgtatatagtggaggcaggtacacattttaatatatcctacagaaaatagattacaccagtattactgattttatggaggagacagtacatagcaattttgtgtgcatgtgtgtatttttaacataataaaatcttatttcttgctttggatccagtttaggtcagcaaggtggctcagcacctgtggtcagtcattcagagaccccagccccccaactccccatcaccaccactttcaatccatgaccttaggtttctctggcatctagctggtgaatacagagagagaaagtgaagatggaaccagtgtttttcactgtcttggcctggaggtaacacttatcacttccattcacagtcccttgatgagaactggctatgtagctccatccaggtgcaagggtggtggaaaatatagcttagctgtatacccaagtagataataagtttggtgaaaagctagctcatctgcctcagtccgtctcctcatttaaaaatgggagtaatagcttctgcctcataaaattgttttgagggaacaactagatagttcgtcaaagtgcttagcacagtgcctcgtccatagtaagtggctcaataagcacaacaaatacttttgacatccataaacaaatttccagtcagaacctttgtggcattctactcattcaaatcttttaatagcttcctatgttctttgaataaaaaataaattattgaccaggctctctatcatctggcccctgccttcattcccagtctcttttcccatcattcatccttcactcatacaacccggcttacactggcctttctgtggttctcagaccaacccctttcccactgtagggtccatggtcccctctgtctgatatgcttgtgccccagctcttcacatgagtgatttgctttcatcttccaggtctcatctcaggtatcacttcctcagagaggcctgtcctgactgtcctacccaaagtggcttcctccctatcttgtcttctcttgtttttgttaccacactttttaatttatatttctttattaactgaaacaattaatataaaagaaatagagatgggatctcgctatcttgaccaggctggtctccagctcctgggctcaagcaatcctcccatcttggcctcccaaagtgctgggattacaggcgtgagccaccttgccctgtcttcctcaagttatctttctaaaatggaagcttgatcacatttctcccattgcctacaaaataaaggttgagcttccaggtcttatttaccatgcataccatatgttttattatctacagatctgcattctgtcactattcttcctaatctccttctagcctaatcaaaacacaaggaaacaaaaaactagaaaaacaaaacaaaaagctttatggatcacactttttattggacacgatactcttcctttttgcaatgtcctcccactaggctcccaaccaggccctcctgaaaaattctctctcaaaactttactctgtgcatgcacatacttctgttgggacacctattttatacataccatctcaggcagaaaattcccaaactgaaatgtacaggcaacgtacttttattctacggagttaacaaatttttaattccttgtctatgaggttgaaaatcccaattaaatttctggtcttcccctcttgctcctgggttgtggttaaattcttggggagtcttcacagtacctaagttttggagaagatgtaggcacccgccctcatccctccttcagattttggcatcctcttcctagtatctgtgtgttgtttgcatatttctgtatcgttttgcttttacagagccacactgaagcttgagaatctgaggctttctgtagcttccccgtacacagaatcattccctctttggagccttgctacctactccagactacttggaatgcagacatttgctcattactctgggacccaggggtattccctttctcttaatcttattaatatttcacttcagaagcatttcctgtgttgtgaaatttttctcagaggcttctttaattggtttagatttttaatggatttagtcacataaaagccaatgactcccaaattcttaagtcctgtcccatcccaatacctgaggcagggagaaaaatataaatgaccatcgttcctaaatctgatagctcagtggatacacccggggagcttttaaaattaagagacactcccaagcacaactctacagcatcagaatttgttttcttgacgatcacagacgatcaaggcagaattcttccatcagtggtgggcgtggggcgggactccactcggtctttctgtcctctaagtcttctaatttttttcccagtaatccgccctcccgttctccttctttggcccatccctcttctagtctttccctgctcccctgcaccaatctttctgcgtcccgtcccctcccattcccctaccccaccccaccccaccccaccccacgtttcccgcctcccgcgcctctcccgctttccgccccctcgcgtctcctcccctcccacccgcacctccaccccctgcctctctcctgcccgccccgccccctcttccgctctacgtccctcctcacccatgcgcactctcttcaacccgctgcttccggcggcctaggcttacgtttactttgcgccggaaagagaacctgtaaacgctctcggaattatggcggcggtggatatccgaggtatactgtattgctatattttgtctcttgattgtctgtggaccagtttgggatgttatagctcgcggtttcaaggtttaggttcctttgtgtgaagtctcaagcttttttgagtggtttttgtggacaacccaaggctgtgatctagcgaaacgttgacgagtttttttttttttctgagttcttggagcgtctcttggaagcgtcggagagaaggggttggaagaagctctgggttttgagctttcagagctggagttttgttctacacacgtatctctgcaacaacattagggctattctattggagtgaaggaatggcgtttaggcagagaagggaatggggtaataagccaacttgatttgattcatctcttgggacttggcatggtggctgcctaattctttagaccgcgccacacgggtccctgagcatgaatcccagatattttctttttttttgagtcgataatactttacatcgaacgtccagcaattattatgggcaggggtcgtatttttttcacagctgaactgcagaagtactcaaatattgaatcagtcagtgaataaatgtatggagatgtcaccccttaactgctgcttgatcttggggagcatgtagagttgtttttgtgtatatagtacttgatttttaaagggagatgtttgagatgcctttttttaatattaactggattggggtctaacacatttattacaaatattctcatttatacttatctggcgatctgcagcacttctggatcatgattttacatacgtgtctttcattatttatttcatcacttgctgatggttagaatgctgttagaatgcttgggctatgtcaacatgttgccttgctacagaataaaaaagagaaatatttagtttataaaatgttttacttataattcagattgttaggatcatggcaaagactctaaaataagagtgtgtttggtgtgt

SEQ ID NO: 6552 - DNA, 6000 bp, Homo sapiens; identical to SEQ ID NO: 1825

SEQ ID NO: 6553 - DNA, 6000 bp, Homo sapiens
gaccaatttaagtcacattctttaggggtaggagtggtggagatttttgttttgttttgttgttatttttcagtatcccaggtgatcccgatgttcagccaaggttgagaactcatccatactagcgccaactccttggactccatcctattcttccaggctagcagcttatcctggcttcattgccttctcacccagcttaggccccagggtcattcactttaaccaggttgttgcccaaccgctcatctcccacccagaggggatatgtaagttgctagagaaagacacttcactatcctgattcaggctttctaactccactggagccctgtgctaatcagcgtttatacaagctgcctggatagatctatttctcatagtggctgttccaacctgtttccactctcctcagatccctaacccatgccctcccctccctcctatcactcagcacagtgcttaagtctgtggaagaaactcttcctacatgtgtgcacatttaagtgatcatatggcgtgcttctgctttactaagtttactaagttttgcaactcttctgcaattttaaaattatttgaaaataagattaaaagccaaaaaaccgaaaaactccctggatccctccagctaggatctttgttctctattttcctttggagaaaaatatgtccccacacatggttactacttcctcaccttccatttgccttgccaaaactgctctggatattgtcatcagtggtacccaagttgacaaattcagtggatctttctagacctcatgttatatgacatcttagggtatctgatacagctgaccattcccttcttctggaaatactttggcttccaagatacaaaactctccaggttttccttttctacctctagctccaccttcttattccaacttttcttttctttttttttttttttttttttgagacagagtctgactgtgtcacccaggctggagtgcagtgatgcgatctcagctcactgcaacctctgcctcctgggttccagtgattttcctgcctcagcctcccgagtagcttggattataggcatgcaccaccatgcccagctaatttttgtatttttagtagagatagggtttcaccttgttgaccaggctggtcttgaattcaagcgatctgcccatctcagcgtcccaaagtgctgagattacaggcatgatccaccgcacccaggcttctccctaggtaatctcattcgtacctctggcctcaaatgtcatctatgtgccagtgattcctaagcttacatccctatgctagacctctcttcagagctctagactcatatatccacatagctacttaattttggccctggatgtctcaaaattaaactcttgatgttctctctcatatgtgctcttcctttaatttgtccctttcattattaaatggtactgccatcctcttccagccactagctgctcacgctagaaacactggtgtcatttcagatatttccatttttctcactaaccaagtctaatccttcaagttcaaaatataaacatagaaatgttccatttctctccatctctactgcacccactctcatcttttgcccagattacagtgatagcctcctaactggtctccttgtatcccattttgccttctccagcgcagtctccaaacactaacttcagtgaccttctgaaaatactaccacgattatatcattcctgtgtttaaattccttctactgcttcccacttcacacaggataaagtccaaaaatattaataagagcaaccacatacttcctgaccgggcctctgcccacctcctgaacctcatcccttgcttactgcattaaggctccactgcctttctcaatctctcaaccgaataggctctttgcctgcctcaggacatcttcctaaaattttgatccctccatattacacatatgaagtagtataaggctagattatgctttggtagcaaataatcccatctaactagcttatgcctaaaacggtgtatgtattgctcacatcacagtctgacataggtcaggtggctccttaaagaattaagtggaaactcaggggttcagagtcctcccagtctgtggcatacccacattaaaaatgtggcctttgttacagcagttgaaagagaagagtgtgagtgattatgcaaggagttttctggtcaggcctgaaaatgttatatatcataccaataggatctgcccataccccattggccagatcatagtcatatgaccctaacctaactgcaaaggaggtaagaaaaaaaaaaaaaaagtcttcctgtgtgtctaggaagaggaaatgagattggtgaacatcaggctactttttgccacatcctggttaaaacctactcatttttaaagtctcagcttaaataatacttacttacaaaggtcttccagctcctccaacttaaattaggcatccctgatacattctattgtagcaccctgtaattttcctttacagcatgatcacaatggaaagtttatatttctttatgtgattaatatttatatctgttgctagactgtaggctctataggagcaaggactgcatctgttttgctcccactgtgtctctagcacctattacagtacttggtatataactggtataaaagttttcgagtgaacaaatgaacagttgcacacagtcattgcctggctccaaatagcacatgacttttgcaggagaaagacaagtaagtaggcagtcatggtttagtgtgatgataaatgttccaggcaggtaagcccagggagctgtgaaagcaacctgaaggaacttgcaaggcttctgtgttttgtctttcacagcagtcgaatccaggagtctgcaaactatggcctgtaggccaaatctggctcattgcctgttttttaactgcccttgagctaaggattgtttatatatatatatatatatatatatatatatatatatatatatatatatatatttttttttttttagacagagtctcgctctgttgcccaggctgaagtgcaatggtgtgatctcggcttactgcaacctccgcctgccagattcaagcaattctcctgcctcagcttcctgagtagctgggattacaggcgcccaccaccatgcctggctaattttttgtatttttagtagattcagggttttgccatgttggccaggctggtcttgaactcctgacctcaggtgatccatctgcctcagcctcccacagtgctgggcttacaggtgtgaaccactgcgcctgacctgtttttatatttttaagtgattcaaaaataattaaaagaagaatatattacgatacatgaaaactatgtgaaattcaaatttcaatgtccataaaaaatattctattggaacacagctacttcttttatttattgtctatgactgcttttgcgctacaatggcagagctgagtagttgtgaaaaaggtcatacagcttgcaaatcctaaaatatttactatctggcccttaatagaaaaaagtgtgctgactcctgatccaatccatgcttagtttaaaagatcacatctatctgaattacgtccaactgtacatctttaagtttctgctttttcccattctcgtgtctgctactagaaatcaggttccctttagttctatccttgcagcaggattcctgccctgctatctctctcctcttttcagttcatcactgtgtactaaaaaaaatctgcactcttcagcacagcatccctagttccccattatcttaccacacctcaccttgtcagctgtatctcttacatcatactttcatctaaccttatcaatcacttaacccacccttgccttctctgctgtaggccaatgctcacagttactctctctgtgtggaatgtctattgctggtatttctctcttatccatcctttacgttggttatctcaaatgcctccttgccctaaaagctttccccagttcctcgtctgggaataattattgccatccgtgcgagattctctaacgctttgtacgactgctttatttcaaattctgctttatagttcttttgtgtacacacacagattgtttctcacgttctattgaaagctgcttaggggaggaattgtattctattttgttaatctctgcatcctttcggcgcctagtaagagtcttgtacgaaacagaaatgtctctccttcgtaaaattcctcatcgggagctgggactgtgaatttttgtaacgtttaagaactatctgttatttaagaacaaacactctgcttaacttgtttagggttcactagagcgagtaagacctttttagggcacgccgtctcgctggttgtcacacacgcatggatcgctgccgggacccttaggtttgtctgcaaacacgtgggtgataagcgctaccctccaggcccctcctctgtccacggtgattggcggaccaaacgttccaatcatccctccccgcctctttcggcagtagccaatcagagaccccgagcgcctcctgactactagacactgtttactaacagatcgaagctggggaataaggggtgtgaccgttctggggaggtcagggaagggaaggtcttgactgcgagtgcgcaccagaggaaatgggcggggcagagctttgggtctcaccaatcggagtggcggcgctcctccctctcctgcctccccgccaagcaacaacaattcgaggagcgaggcggggaggctcgtgaaacgtcacagcgtactgcccaatgggaaccggcgttggcagacgcgcgcgccctgtgtccaatcagcgaaggcggctcgaatggctcccttaccttgctggctgtgggcggagcggcctgaggaggcggcggtggagcagggggcggtttggttgcgcggtactagcggtgcccgccgaagggggaggaggcgaggagcgagccgtgcggccagagcgggaaagagactcgtctttgcgtccgagttctggagccgccgcaccccgactcctggggccgcggcagcggctgcgaggggacgggcgtccgctgtctcctgggttcccctcgtagcgacccgcgggatcggaaaaaaaggagaagatggaggaggagggtggcagcagcggcggcgccgcggggaccagcgcggacggcggcgacggaggagagcagctcctcactgtcaagcacgagctgcggactggtgagcgaccccgccctctgccggccgggcccggcgcgggggcgcgcctgagggcacgcgggtgcccgcgcggggctgggggcgcggggccgcagccgtgggcgcggaggggcgggcctggggcggggcgtcgcggtcggggcgcgtgccccgggggtcccgggaggtgggggcgcgccttgggggaggcggccgaaagttttccccagcccgggaatgagcggcgggcaccaggcatcggggccagcgcagccgccgaccgctgcccgtggcacgcacctccgaggatgtcgctgctcccccttcccgcacaggtgacacacgtgtgtctgcgtcctgtcagggcgaaaggtgcgcctgcctccgcgtggggcgagcggcgctttgttttggagagtgtctccctcctccgcccctctggtccccgcgatggggggtcccggtggggctctgtggagccatcccctaaggtgctggggtcctgtaggagataaacgggaggtttcgcctcgggcttttaccgagtccagtctagagacaggaacaggaatcgccggctccagggattgagtgcctttattctcacttatcatgaaatactatacttggccttgaatttccttcagaggtccctggagatgatggctttagaaatttaaagctccaggtaaaaggaactaacgagcaggcttcagcgcttacgttctaatgtttgagatcactagcgttgtcctaagctttataactaattaaatgtattcgt

SEQ ID NO: 6554 - DNA, 6000 bp, Homo sapiens
tccagtcctctggcaggctagacaggaaatccaccaggctgctaatcttctcttgtctactccagattcccaactatatgaagacaccctagctggacgatcagttcttattaagaacctgacccctcaaactctacaacctcgatggactggaccctacttagtcatctatagtaccccaactgccgtccgcctgcaggatcctccccactgggttcaccgttccagaataaagctgtgcccatcggacaaccagcctaatctctcttcttcctcctggaagtcacaagtactccccactacttcccttaaagtcactctcatttctgaagaacagtaataacccttatgagcctaatacatcccttcattctattagctctattcatccttaccctactttttgcaacagggctttacacagtcaccccccctacttggactgaaccccaaaaacttgtcatccctactatcttctgtttactcatactcccattcactattctcaactactcataaatgccctaatcttgtttacattgcctgtttacactgtttctctaagccatcacagctggtatctcctggtgctatccccaaaccgccactcttaactccctcttagagtggatagatgatatttgctggcagggcaacctccaatattttcactctgatgaagttctattctttacttttatactcactcttattctcattcccattcttatgccaccctctacctctccccagctatctccaccacactatcaatcttactctctcctagccgtttctaatccctccttagcgaataattgctggctttgcatttccctttcttcctgcacctacacagctgcccccgccttatatacagactgggcaacatctcctgtctccctacacctccaaatttcctttaacagccctcatctttaccctcctgaagaacttcttcactttctagacaggtccagcaaggcctccccagacatttcacatcagcaagctgccgccctcctccacacttacttaaaaaacctttctccttatatcaactctactccccccacatttggatccctcacaacacaaactacttttcctgtggctgctcctttatgtatctctcagcaaagacccactggaattcccctgggtaacctttcaccttcttgatgttcattcactcttcatctccaaagcccaactacacacatcactgaaacaactggagccttccagctccgtattacagataagccttttatcaatacaggcaaacttaaaaacattagaagtaattattgcttaggaagacaccctgtatttcactccatccttggctaccttccccttgctcgtcagaccctcctcccaggccttcttgttatacccagccccgtaaataacagtgaaaggttgctcatagacactcgacgttttctcatacaccatgaaaattgaacctctccctctacacagttaccccatcagtccccattacaacctctgacggctgccgccctagctggatccctaggagtctgggtacaagacacccctttcagcactccttctcatctttttactttgcatttccagttttgcctggcacaagctctcttcttcctctgtggatcctctacctacatgtgtctacctgctaactggacaggcacatgcacactcattttccttaatcccaaaattcaatttgcaaatgggaccaaagagcttcctgttcctctcatgacaccgacatgacaaaaaagggttattccactaattcccttgcttgtcggtttaggactttctgcctcctctattgctctcggtactggaatagaaggcatttcaacctctgtcacaaccttccatagcctctctaatgacttctccactagcatcacagacatatcttaaactttatcagtacttcaggcccaagttgactctctggctgcagttgtcctccaaaactgccaaggccttgacttactcactgctgaaaaaggaaggcgctgtgtgtatgtgtgtgtgtatatatatatatatatatatatatatatattttttttttttttttttttttttttttttgagacggagtcttgctctgtcacccaggcagtggcgcatctcggctcactgctcactgcaagctccacctcctgggttcatgccattctcctgcctcagcctcccaagtagctgggactataggcgcctgccaccacgcccggctaattttttgtatttttttagtacagacagggtttcaccatgttagccaggatggtctcgatctcctgacctcatgatccgcctgcctcggcctcccaaagtgctggggttataggcgtgggccactgcgcccggccgggctctgtatatttttaaatgaagagtgttctttttacctaaatcaatctggcctggtgtatgacaatataaaaaaactcaaggacagagtccaaaaacttgccaaccaagcaagtaattatgctgaacccccttgggcactctctaatcggatgtcctgggtcctcccaattcttagtcctttaatacctgtttttctccttctcttatttggaccttgtgtcttccgtttggtttctcagttcatccaaaaccatatccaggccatcaccaatcattctatatgacaaatgctccttctaacaaccccacagtatcactccttaccacaaaatcttccttcagcttaatctctcccactctaggttcccacaccacccctaataccgctcgaagcagccctgaggaacatcgcccattatctctccatactaccccccaaaattttcaccactccaacacttcaacactattttgttttatttttcttattaatataagaagacaggaatgtctggcctctgagccaaggcctgcatgtatacatccagatggcctgaaggaactgaagaatcacaaaagaagtgaaaatggctgattcctgccttaactgatgacattaccctgtgaaattccttctcctggctcagaagctcccccaccaagcaccttgtgacccccccgcccctgcctgccagagaacaaccccctttgactgtagttttccactacccacccaaatcctataaaactgccccacccctaacaccctttgctgactctcttttgggactcagcccacctgcacccaggtgaaataaacagctttattgctcacacaaagcctgtttggaggtctcttcacacggatgcccgtgacaagtgcctgccaccacatcccactaatttttgtatttttagtagagatggggtttcaccatgttggccaggctggtcttgaacgcctgacctcaggtgatccacctgcctcggccttccaaagtgctgagattacaggcgtaagcccctgcacccggccctgttttttttttttttttttttttttacatcccggagtcacactggatatctgaatgtgcttaaaataaaattcacatctcattctggaagtgtttattaaatgctgtccctgcattcatgtgaacatcacagcccagcggttagatgtgcagactccaacgcctgactgcctgggtctgtcacttactagctgtatgaccttggatgggttacttaacatttctgggcactggtttctcattagtaaaatgaagaatgggcgcctgtagtcccagctacttgggagcctgaggcaggagaatcgctttaacccgggagacgaggttgcagtgagcctaggtcccgccattgcactccagcctgggccacagagcgaggctccatctcaaaaaataaaatttaaaaaaaaaaaattcagctttcacggagaattactactgcctggtgccatcagatcccaaatactggaggcattcccaatgttctgttcacaaactgtgcaatctgtgatagcccctcttgtgaatataatcaaagtgaaagatgccagtatacttattgctatgcttaaaagaactgcagatctatcatatccttttgaaaccaaaaaatgtggaagtctccctggctagatgctgtgtgtccacgtatcctgcaccaattgcttgaaagtcacatgacaacctttcttcctttagggaaggaagcaagcaaggtaggactctgtgtgttacagccagtgtgggtaactaaggactgagggaggtgtgggcacttgcatagctagtgccgccaataccataggagcgttgacactaaacggcacttctctattaagttgccctgctgtcttctaacgagtcattttgaaaaacggttgtccgtttttcaactacttgggtgagggcagcttcatgaaaaaagctcatcgtatgttaaagaaggtagggtttcaattgtgagctataaagccaccagaggagatttctcctatagaaggaaggtgtgtttcctgcttggacacctgaatttgcaacccatcctttcttttttcctttttccttttttttttttgcaacccatccgttctatctttgtagcctcagctcctaccatagtgcctgtcacggagcagctaatcgacacagtgacgcgtgtaagttatttgaagccacttcctgcgcagtggaacgtccccgccaagtctcccggcactgctgggtgtagtcccaattaaaacactaggtttcaacaacacaaggagggtccgcagggtccccggactacccaccaagggtcggctctgctttgaaacgcagctgcaggaggccgaggagcgccgcgatgccccagttatccaggccattccttccccggccgaagctggccgcctgcatgcacctaaccttgcgctaggcactggctgcggttaatccagcccgcgctcggtcctccgcgatcccagcctcccttgcgccaaggacacgtccggcggcttcgcggggcctgtctacgccaccgcggcgcttttctatgatccgctgccgctttccgagcgagtgtcatggcggccggcgtcgagttggcaggagtaacccacggaactgaggaaagtcattagagctgagaaagaagtggcccaatctggacggtgggaattcgtgggaatgagcagaaggccctccgtaggtgactgtgtcactagaggcgggcccctggtaaaattccaggccaggcctctgcgtttctaggcagaacctggagtcggccttgcctgagaacccagctttgtgttatcgtatcctgtctcgcgaaggcaggcgttcaaggatatttggtcggatcgcccggcggcgctaaacgttttcttttttccgagcggaccgggtcgttctctaaactcgccgcgatgtcgtcctggcttgggggcctcggctccggattgggccagtctctgggtcaagtcgggggcagcctggcttccctcactggccagatatcaaactttacaaaggatatgctgatggagggcacggaggaagtggaaggtaacagctggagcgagggaagggagggcttttctaagaccctgggaacgtccgtttggtccctacttccatcagtcaggagacgcggacaggtcgcaaaggaatgctgctcctcccttttttcttcacacacctcctcttgcctcttctcaacagattttctatgatgaaagaccactgggggccaggggaagagtcctggttctcctctctttaaatattctggatatctcaaagtacagtagagtgaaactgctcctacgttaagtcgagtttattttcgtttggttgatccacgcccaccactttgccctcagtttgggggctgatctcattcttaacatcttcctgtattctgacccagtttaaagaattgtatatctgttttctatttttgtaacagttgaaataactcataatttaaacacttggtgagttttgctcttttctgtcttgagtatgttatgaaacacggccatgtttttctatttaattattttttacttttccttattgtgatgat

SEQ ID NO: 6555 - DNA, 6000 bp, Homo sapiens
agagggaaacttagatatatgcaaaggaataaagagcaccagaaatactaaacatgtcggcaaataaaaagaacacttttagtgaactaaagtctgatttttcccttatttgcttactttactttctgtgatctgagggagaaaaaggacccagcccatgtggcttcacattgggaaaaagtggcacccactgtttcctaagatttagagctagaaggggctggaaagagctgatcctgtccctgaatttttagaaccaaattcctgtatcacagttgaaatgattgtcaaaagtaagaacataatgtttgttcactgggggaaaagtctgttggggatacccaaaggaatacgggaatttgaagatgtgaattctatttttggaaagcttaatgcaacagagtctgatataatggcaagtgacagctgcttctggggctaagtccccacgactacccctttcttctggaaaatatatctagactaaagtttatgactaaatttagggcctatgtgttctgatttttccccagataataaggctatgagatcgactgaattgaattgagttacagaaattagattttcatgcccttcctcattgttattgttgtttatacagcttacatattttctagagcaggaaccttcttaacttcaagatcctcagggactcaaagttcatgatgggagctcagcaaatgtactaggatagacagataaatggtatttgtgtacatcaaacttgatctaacgaccactttaccaagaacatgagacccaacagaaaaataagactttaaaccaattttttaaaggataagtttcaaaaaaatgaaataaaatggggtatattttaaattttaagactggtaacaaagatagtatgaattattttttcatttggcctggcgcagtggctcatccctgtagtcccaacactttgggaggacgagttgggtagatcgcttgagtccaggagttcaacaccagcctgggcaatggagtgaatccccttctctacaaaaaatatacaaaaaaaattagccgggcatggtagcatacacctgtagtcccagctacttggaaggctgaggtgggaggagcccttgagcctgggaggatgaggctgcagtgtggtaggcaacagagtgagactctgtttcaaaaaataaattaataataataataaacactttaaaattatttcttaaattcccatatagcagtaaaaatgtacagcaagcacagcacaaatgacaggagtaaaatagatgtaactttatgcaactgcagaatcacttgttttgtcaaccagcatggaaactgtcagaactgtcaatcaacaaagcaagggcgatagaaaatgtgtcactttcaaacggtatacaataatagaaataatgacaacacatcattatatcagagggaggagaaaagtgatatcaggatatttctttctcaaggcctctcattgaggggtaattatgggctggttgtgtctgtcacatagcctctccaaacaggctctgtaactttaagttcagatatcaatgtcttcctctcatcttttcagatatttttacatcccaggataattactggattatctgttgtggtggagtctggacctttttaaacatctaccaacaaagtttatagatttaaagcaaaaattcagcttttggaaaaatgagattaaaaatagtttactagtaatgtaactgagcattataatttgaattctaaagaggacttattgagactagtagaaggccgggagcagtggctcacacctgtaatcccagcactttgggaggctgaggcgggtgaatcacctgaggtcaggaattcaagaccagcctggccaacacagtgaaaccccgtctctacttaaaatacaaaaattagctgggcacagtggcaggtgcctgtaatcccagctactcgggaggctgaggcaggagaatggcgtgaacctgggaggcggagcttgcagtgagccgagatagcgccactgcagtccggcctgggcgaaagagcgagagtctgtctcaaaaaaaaaacaaaacaaaacaaaaaaaaaccccaaaaatgtcctatttaaattaacaatattggtctccagtctttgcaaccaaagaacacttactgatatctccactgctagcatactgtgtgacatatggttgatgattgataataaataaataaagtgtttataaaatggtattgggcaactaatttttttgtttttgtttttttgtttagatggagactcgctctgtcgcccaggctggagtgcagtggtgtgatctcggctcactgcaagctccgcccccctggttcacgccattctcctgcctcagcctcccaagtagctgggactacaggtacccgccaccatgcccggctaattttttatatttttagtagagacggggtttcaccatgttagccaggatggtctcgatctcctgatcttgtgatccgcccgcctcggcctcccaaactgctgggattacaggcgtgagctactgcgcccaagctgcgcaactaatttttgacaaaagcacaaaagcaacccagtggaaaaagtacaggcttttcaaaaaaaaaattgctgcgatgactgggtatccatacatcaaatatgaacttggatacatgcctcaaactatataagaaagttaactacaatgcatcatacatctaaatgtacagcttgaacacataaaacttttataagaaaacataggaaaatttctttgtgagcttggggtaggcaaaaatttcttagaaacaacactagaaatgtaatccataaaataataaataaattaaactttattaaaagttaaaacttctcttcaaaatacactgctaagagaatgagggccaggtgtggtggctcacgcctgtaatcccagcactttgggaggccgaggtgggcagatcacctgaggccaggagtttgagaccagcctggccaacatggtgaaactctgcctctactaaaaatacaaaaattagctaggcatggtggtgcacgtctataatcccagctactcggaaagctgagataccagaaactcttgatcctgggaggcggaagttgcaataagccgagatcattcactgcactccagcctgggtaacagatcaggattctgaaaaaaaaaaaaaaaaaaaaaaaaaaaaaaggcagagttggggggcggtaggtaagcagaaacttaagtgtgatgggcatactcatttgatcacagtgatggtttaaggggttatacatatgtcaaaactgataaaaattatacactttaagtatgctctatatattctatgccaattatacttcagtaaatatatctaaaaaaaccctacaactcagatgtcagattttgaagacggtggaaaagatgcagaatggaaatttcagttaaaggcctcagtgatgtttgtgagttatccaagtattcaaggaatccatgcttcctccatctagctgagactcggcagagtttaatgagcaatctcaatactattctccagaaatggtgtcatccaccatactatggctgttttcaggaagagaatgacctaatcagtataaaatgaactccatgtcttgtgagagatttataattaaacacataatccacatttacaaacatttttaaagggcttttctacctgtaggagaggattaatattgagagtgaactttttgcaagttttccaacacactagtttatctctaagagcctcagtttcctcatctataaaataccataagaaataagaaaaaacaggaaactaaaaagagcaggctttgccagagctattaattattcttttttgggcagagccaaaactcaagaaatggaagtctctcttccatttctagacttttttagagagatccatgaggaagttcccctccatagctttggccgaccatcacaccggtcaagaaggcatccagcctctcccaggctcagcctgtgacggaaaaccacactgatttactaggatagccttgagctctctcattagccctcacgtgttctgaacgttagagctaactttccagaccctcattatttgttgaaaggctggatggggaaaatctcaaccagatctccatgcctacttgcaaggagaggtagtttttgcagggtggcctgtgttctccagatgcagagccatacagggccttgcttctttacgggagatacaaaaactcggccctaataaacagaaatagtggttgagcccacaaactagcattaagttgtcctaactgtaatttccagctccgtcacttgctgtgtgggaccttattatctccaaaacccaattttttcaacttcacaatggaattaaaacaatctaatttttcaaaatggggttaacttccactgtaagttacagtatattggccaataattaacttgaacactaaagctggcatttaacagatcaattcaactgttttctaagtaaatacttaaacgcttaaaaaaccgtaatttactgagaaaacaaagctttctttctaggttaagaatttgagaaaacaagacccagaagcaaactaaaatcaagtcctaaaatggtacaaacctcaaaaagccaatcaggtttgccaataaagctccgcctccgtgcaaactctgcccacttccggcttccccacccaccttctaccagtggaaccccgcccctctctgcgaggtcccgccccccacacctgatcctggttcccattgggcgaatctggatgctgtatacacagccgacacacgcacattaggctggggcgtcttcgcgcctgcgcagctgcgctgtcaggcggctgaaaacgggggggttggggggaggggggcggaggtcgtgccgaatcttcctccgtaataagaagcgacgtgtcccactgtcctggctccgtgggtccagtgagattgggcctgggcgctggagctgctgtggctcccgccgcggcggctgccatggaggccatgccagagcccagaactcacgccgggggaggccgagacagccggcggtactcatagatgaggcagcggcggcggcggcggcggcggcagcccgggctctccatgagcaggcggcggcggcgacgggtgcggcggcaccggcagttttcggtccccagggaggtacgaggagtttgcttcctggtggacggagactggccggtgtgggaacgccttccgcggcccggccctccagcctatttgtccgcagttctgagcactcggcggggcactgcccgggcagaggcgggggcgcccagccgactcgcgggcccctaactcggggacccgcccgcctcggtgccaggcctcccgggcgcggctgcccagggccagggtgggcgtggccggaacgtgggggctccccgggggcgcacgcctagcgtccgccttgtccctgtcccgaagtcccgcgctgctgggagcggtagcgcgtggctgtacaggcgtattttaggcgctgatttgagaggggacttttagaatccctgagtccttagggagtctggcgttcaatgccttgggcatgtggtggggtcctcacggctagcttggggtaccaatttcctcccttggaagtcaccacgaaagaaagatgttttgtcaaagaaatagaggtcaggagagttttccaggtttattcaaattggagggcccgtagagcctggagaataaagccagcggaatacatcctccagtccttctaattacagttcctagctaaacagctaagacaattttaagtaaagctcttcacagctatctttccatcatttttccccacccctcatttttattgcaatttactttggaacaaatcaccaaattcatgatgaaactagtatcctctagttcttccaaaccttccctcctcccgttttttccagagaaagactaaagtttcatgccacatatgtcattatagtttaattctcttaga

SEQ ID NO: 6556 - DNA, 6000 bp, Homo sapiens
atgcaactgtttgccagtttgtgaaattaaatctttttttttttttttttgagacagtctcactttgtcgccgctggagtgcaatggcgcgatctcggctcactgcaacctccacctcccgggttcaagcgattctcctgcctcagcctcctcagtagttgggattacaggcgcgtaccaccacgcccgggaaatttttgtatttttaagtagagacggggttttgccatgttggccagcctggtctcgaacttccggactcaagtgatctgcccatctcagcatcccaaagtgctgggattacaggcatgagccaccacgcctggcctgaaattaaaatttttaaataattggagaaatggtcccaataaagcagagtaagagcaaaatccacctaatacaattggttaaagaagccacttgtgtaatcctagcattttgagaagccaaggcgggtgcactgcctgagctcaggagttcaagaccagcctggccaacacggcaaaacccatctctacaaaaaatataaaaattagcctgtagtcctagcaacttgagaggctgaggaaggaggatcacttgaacccaggaagtcatggctgcagtgatctgagatcgtgccactgcactccagcctgcgtgatagagtaaaaccgtgtctcaaaaaaaaaaaaagccacttgtctctgaaacacttttaaattttgctttgaaatcaaatcctttcattgtattagtaccacagtatgtggctctaggtatttgcacacatggaactctgcaccttccatctgtaaagatgaccggtagaaatggcagagctaagggacaaaagtctgaggctggtggagacttaatcaccttaatcagtgattacgacggtggggaatgcaactcacttccagacattctagaatctttggaatccacagtgctctgcaggaggaagcaggagcctcttgaaaaacttaccaccaaacttcatggaatcaccctggccttcttcaacaaaaacctctttaacagcactaaaacacagctaaaaggtaaccttttcatgtaggatggtttatttggtagtgtttggttgtgcaccagagaggatggaaggagttgtttcatagcctttcaaacaagaccagcattgtcaaacatttgctgtttcttctgctattcccctattcccttctgccctcaaaagatgtttaaaattttcagggccatgatgttgccccattttgctaccacgcttcttttttcttgatcttttgtttcaatgtctgctttctttcccctgtgtgctcactgaagcctgattgtggggtcaagctataattagtttatatatgaagtttaattcactgtggcttttttggcattagactcaaatgggctttgatgtctggctggggctttgatcccagaccctcgaatggtggtcatctctccagctcaaaggattgccctttactcttttcctcctattcggagacagcttttcccaattacatcatttgtgtttgtttggccataaaagctgcaaggcatcattttgttgctttgcttgatggcaaaatgtgcaactgatgccccttactttgcttggctgcaatagaatgttcaccgctggacaaggcatttgtagaatgatgctcagactttggtgggggtgctgttaggagctgttctgcctaaggacaaagcatcagactgtgtgatatgagggacatgttctggctctgcccaggaaagatcttcaagcataagttaacaccactgtaatatattcagccaagactctttttcatgctggcaactttatcttactctccagatcatccaggcagcaggtccaccccatcgttagtggtacactttctgagtgtcaattaacagtttttctgagcagacaggcgtgtccagggaaagcaaaagaaccaactagggctgaacaacattagaaaggagataatgaaatagcactagtggaggaagaagtaccagcacctgctttaaaaagaaagggaaagaaaaatcaaaacagtagggggaagtgagattccgttggcaacagaagggagcagtaggcgatcactttcaactgcttccggaatacctgcaacaaaaacaaagaatcaaagaggaaagaaaatccaggcaactagactggaggggagaaaatttggctgctagcttaaaaagagaataggggcaacccagcctgtctcacttaatctgatgacattgggagttttcctggaaaaacaattacagcattgagctccttgcttctaacttcatttgacagcctgagtttgttttaattggcatgtgaatgaacagcattatttattaatgtgtaatggatactttggaaagcataaccttttttcctattcgtgaccattttattggcggaaccatctgaatatattagttttaatatttaaacttgctgagaacactttttcatggagatatacaagctgttacggcaaatggcttgctttggactaatgagccagctcaaagtggcatttggtgaggaggggggttgggagggtggggaggtttggagacatagcgagcttgtctgcctgacttaagatttattagtagtgtgtaaaaatgtgtttcagctttttttccccctcaactatacaaatatagttgtcgatgtgtgacataacacaggccacaataatagactccacccagtcagaggaatctaattcagagctggaaagcaagaagcttgtttagaaatgagcagaatgaaacaatgacagaggacatgggtgagtggcatttggcaagcaggataagtcactatcctttcgtgccttactaaaattagggaggaaaattagttcctatattataaagtagtgtttggcaacagcaggcataaagaatagataacctgaagagaatcgattttgtatgcttatgaacacctgaccataattccatttttagagctaatatacaaccttgttaattatgaatcaagtttgtagttctttcatgtctgtgggaggcagcaatggggaggaaagtgaaaggtggcaagggagttcttttgtttttgttttttggtaaatgtcaacttaattctatttgtagtagagattaaatgggtactattaagtttaaaagtatgctaatgaaaaaacaatttacaaccaatctacattctcgagtctctctctagcaattgtcaggtgaatgcttgcaaggtaatgtgctgaatacagcgatactaagagggtattaaaacagtccctgccttcaggaagctttcataatgtagatggagagaagagatacacataaacacctacgtagatagatatgcgtgtgcacacccagataaataaccatacaggtagcatgggatcagaatcagatatttatatagttaactggagctcaaaggttggaagggtggttagaccacacagagaggggaggaaagaagaggaattcctagcacgggtaagcagatgggcaaaagtgcaagtgtctgaaataatgatataggatgcactctttcacacaacactttgcctgaacttcagcaattgtgacttgctggattgaatttccgaggttcttggatgtactgcttttaaagatatatgtggtacttttccacagataagccagctagtggaattttcagacccctatcccaccggaaatttcagtgggataggggtctggagtagtgtgttccaagcagagatgaccaatacatgatacttcaagagggaagacttataaatccctctggagaaaagctacaactcatatcacctttactatctatgtgctagccacgttgtaagtgcacagcccccacaatatatagcatatgctgcatactattataattcttcaacagcaggttcccatagcagctgctcccttttacagtggggggaacgtacacagagaagggagtaagttgcccgcacagctatttaggggtgaaactgggatacaaatccagacagtctgatttctgagtcagagctcttattgtaaacgcagactaagtaataataaaagctcaaacaaaaaccaaagcgcgcacgcgcgcgcactcaaatcgtaggcttgtaaaagaattgatgcaacctctcgctatacaacgacatcctcctgcctaattttaaatgccgtccatcgtaagaccgacgttaaaaaattaaaacgacaacaaaacttaagttttagaacactgcattgtgctctgtattgcttgcctttacaaagtggagttaaggaaccaaccccacagtgtctgtgaatacacttgcaataccttgcttgggaagtgaaagaaacctaactcggtgtgagtggaaatgaggagtggccgtgtggggaaagggttaagactgtgctgcaacttggtcgagtttcagaaagttctccggagagcccaactgccgcgtcccgtcgcggcccctgcctgcgcggccgactgtaacaggatgctggggctccaggcgctcgccccgagctttgggcgacgagaaagagccaatgaggagcgagggcaaaatcgggtgcagtaaacccgaaaagggggcgaggaggcccgcgaagagagcgggggaggaggcggggaggggcgaggaggggcggggagggccgagcgaggaggaggcggctctgggggccgggcggcgcgcctgacagaggaggggaagcctgggggcgcaagcgtcgcagccgaggggccggcgcggggaggcgggcgccaggcgggggtttgcagggccgccgcgcgtgacgtagcgccgggcagggcgttatcagctgccgggccgcggcgagggacgcgcggcgacagcggacggcgctgcccgggccgggacagcagcagccggcggtcgcgcgcaggactcgagggcttctagccaccgtccccgccagcgccgcgccccgccacagggcggcatgagcccacccgcggccgcagccctagcgccctgctcctccgcctgggcggcccggctgcggtgacggctctcgctgcccgactgggggccatgaagccgagtccggccgggacggcgaaggagctggagcctccggcgccggcccgaggcgagcagcgcacggcggagcccgaggggcgctggcgggagaagggcgaggcagacaccgagcggcagcgcacccgggagcggcaggaggccacgctggccgggctggcggagctggagtacctgcgccagcgccaagagctgctggtcaggggcgccctgcgcggcgccgggggtgcgggagccgctgcgccccgcgctggggagctactgggggaggcggcgcagcgcagtcgcctggaggagaagttcttggaggagaacatcttgctgctaagaaagcaattggtaggtcgtgcccgaaggtggagcacggctgttcctgcccaggggctggaggtcgggcaggtggcctggggcgggcgcgaggttgactctggctggggagatgctcgctgttatgggacgcccccgaccgccccatacctccctgatccccttcctgagtgcccgcggcgtgtgggctgccgacgcccacgcgtttctggcgtgtgcccgctttgtgtctggcgacctcgcgcggattgcgggaagggggtggccgctcttccctcctcctctgccttcgggattcttggagtcgcctagttctaacgttcggtctccttagttagatgagtatatgccctctccccagcggtttgcaaactcccacttaaaataccattttatttggaggttttcttgactttatctcctcccgccgagaggggccaaaagccaaggagggggtttgtggcgtgcttaactgtccagggccgagttttacgattacactggagcgcctgtagggagccgtgcctctccgagagctctccccagcatgccagctttcacccaggctggtgcttaatttcaaatagaagccctttgtataagg

SEQ ID NO: 6557 - DNA, 6000 bp, Homo sapiens
gatgctcaggcccaccaaaaccggccttcaacaatgggagaacaagttgaaggtgaaagccagtatgttaaggacggcagaagaaaaaaatggaactacctgcctctggaaaatttgctgtgtgatataatagactcttaccctttaagctaccgtcacttgaccctcccattgctggaagacaaaagcaacttagagctattgttggatgtgtgtgcacgtgaaggggagatggtcgccccgggaagtagcagactccttgtggagaaaaccagggcaaagaaagagcacaatatgtacttggcctctcaggtgtggtgggaggagagcaagccagtggagaagggatactgggccagatggttctaccgcttggctttagatgacaccattaacctgaacatcctggcagctgaaccggaactagagtgttgaagtaggtgggtgggtggatggtgcagggcaggacctgtgtggggctctgcaaaacagtgagtctgtaactgggtgctgagtacagatagtcatccatcaatcactgtactcactgtgtgcccccttcctaaccaaagagggggttcgtaaataatacaataattaaatggaaagaaagtcagtgaccctaagcgatttgcggactggctgtttgacttagccctggtcgtctagaaaacagagacctggggcgagcattaagttactggtacttcatttgggagatgcaagcccagggaatggaggtggtggcaaaagggaagtaaggggaggggagatgccaggcagtgagacatgatgatgtgtgctgtgctggccaccactgcatccagcctcagaggcttagcaggttgcatgcattttctggaaagcttataaagaaaaaaaaaattgactgggcacagtagtggctcatgcctgtaatcccagtattttgggaggccaaggtggtaggatcactcgagcacaggagttcaagactaccctgggcaacatagtgagaccctgtctctacaaaaaattttaaaaaattagctggatgtggtggcacacacctgtagtcccagctctccaggaggctgaggcaggaggattgtttgagcctgggaagtcaaggctgcagtgagccatgatcgtgctactgcactccagcctgggtgacagggggcgatcctgtctcaaaaaaaaaaaaaaaaatcacgccacgaagcagtacacagagtgggagaaagagggagaaatttggggagctgccctcctgaacttctgggtgccatcatctggcttctcagcaagccagatcttaggcactgggagtagaggtgagatttcacctgagagggaagctgactaagagagacaaaataagaaggcagtccagggaacccgagccaacagcttgtgtgtggtacagggtcagcacctaagtgtttgcccttccatgggcagggacaacccatccctccttgtcccatgtttctccccctccttgtggtgctcagacaccctgcagaaggcctttgtccccctccacctttcttcaagtcctttccacaacacccttccagtttgctttttttttttttttttttttgagacggagtctcgctctgtcacccagcctggagtgcagtggtgctatctcagctcactgaagtcccctcctcctgggttcaagtgattctcctgcttcagcctcctcagtagctgggactgcaggtgcgtgacaccatgcccggctaatttttccttttttttttttttttttttgtatttttagtagagacggggtttcaccgtgttaaccaggatcgtctcaatctcctgaccttgtgatctgccctcctcagcctcccaaagtgctgggattacaggcatgagccactgagcccggccccagtatgctttcaaagcaagtgcctcagaggtgagtgtaaaacgccctctgtggcttcaggaagggagagtaaagaggaattattactgctccctgctctgctgggcttggtagaattaccccaaagcagtgtttatcatgccatgaagctggatgcccatgtttaatgtgctatcggttctgaccccaggtgtctctctgcatcactgctctccaaccagcgatcctacagtctgtggctcagctgagggtcactgctgacaagtgtattactggtgtttatccatattaaatcttgtagtggtgactgccttttacccatttttctaaactctctgattcctctgtagtttcccttgctgctttgtcttgtccttcttggaaaggcaaaccctcccaagtcaggaattctattgaagcttggtgttcccagttgtttatgaagaataaagatgttatggatggccatgctatgaagctcgagccttcatgtagaattgtactgacccattcataattacatcattcagagtggtggagagttcaccaatgggactgttttaattacagtatacatctgtgaaggtaatggtcagccagcacttttctcgtgtaaaaacacagttaaaagctgtcatcttggctggtcgtggtggctcacgcctgtaatcccagcactctgggaggccgaggtgggtggatcacctgaggtaaggagtttgagaccagcctgaccaacatggtgaagtcccgtctctactaaaaatacaaaaattagctgggtgcggtggtgcgtccctgtaatcccagctactcaggaggctgaggcaggagaatcgcttgaaccagggagtcagaggttgcagtgagctgagatggtgccactgcactccagcctggcaacatctcaaaaaaaagaaaaaaaaaaaagctgtcatcttaaccatgttttctataggtctacactttagaaaacactgatctttgattttttcttttctttgaggttttttttttttgagacaagatctagctctgtcacctaggctggagtgcagtggcatgatcttggctcactgcaacctttgcctcccaggctcaagcaattctcctgctaagcctcccgagtagctgggactacaggcacacaccacagtgtgtggccaatttttgtattttctgtaaagacaaggtctcgccatgttgcccagggtggtctcaaactcctgagctcaggtgatccacctgcttcggcctcccaaaatgctgggattataggcacgagccaccacgcccggcctcgatgtttgatttttcctaaaacctggaagcatttgctggttttttttctctccacaaaacattttactagagcaaaaataaaatgcattttattccaaaaaataattgggtacaatgaagttctaccttaattgagccattaggaaataaaaacacctttgaatgtccccaatgttgaattttctgtcattcatactagggagacaggctctgtcaacatgtttctttgtttgcacttaacaacaatacaagtgtgtgtgctgctttagaattaattttccgaaagtttcccatattttgtggtttctctaaaatagttatcttttagaatagacatgaaaatggaggcataatctgtgagtttgcaaagaaactgtttattctttctgtggccattgctgaccatgggatttttgcagttaaaactatcatcagccaaagagaactttttcttctaccagtgatgagaccctagaaacaaattgcttgcattactatttgtaatcaactatgtatgctcaaattgttgccaaagccaggcatggtggctcacacctgtaatcccagcactttgggaggctaaggatggattacctgaggtcaggagttcgagaccagcctgggtaacatggcaaaaccccatccctgctaaaaaaaaaaaaaaacacaaaagttagccaggtgtggtggtgggcacctgtaatcccagctacttgggaggctgaggcaggagaattacttgaactcgggagacggaggttgcagtgaactgagatcacgccattgtactccagtctgggcgacaagagtgaaactctgtctcaaaaaaaaaaaattgtcgccaaagtcacaagaaactgaacgataatgtaatatgtgacacggacaaaaataaggtcaagtttctttgttataagaaaaaactccacaatccactgtaatggaaaatatttaatgagacaggtcattcattcagtcaacagctaattgttcaatgcctcttagctaccaggtactatcgaggtatggtattctttctctccccctgatctcccttctcctccttcattttctctttgtgcttctcctactcctctttttctcccttagaaatttggcaagggataaagctattacagtcataatgtgctcctattctcctggtagttggtaggaaaaaaaaagattttttgtttctatggagagacaaatctcactttcctcatcctccaacctgcctgctcactgcagctaccatcttgtatagggcctacaggaagaaagaatctatggtaaagagagaactttaatatatcaatcagctgtggtggtgagaatggatcttgaggctcagaaaaaagaaaaacgaatggagctttgaaatatctggaagttattccaagacccctggtagggatttcagataacgaaatggatgacgccagtggtgggagggcacccaagcatttatccactcaagatgcccccttcatattttatccttggtgtcgtggcagcagtgctaataggacatgagccttcttgccccagtaatggcccattacggcttcaggaaaagccatcatgtttccgcagcatttatctgtcagcaggagactattatgagagcacaaactcacattgtattagcgttatcagttaattatgatccttgggaccagtgccagccaatgggctagcagtctgctgaccatcactcagggatataactccacacccccaaattcaagcatgtaagaagacagcaggtccgcagagaggtgtggtcagggacatttcccctggccgggagcccatggagcactgtcctcagagatgcgcaggttaggctcactgtctaggccaggcccaccttagtcactgtggactggcaatggaagctcttcctggacacacctgccctagccctcaccctggggtggaagagaaatgagcttggcttgcaactcagaccattccacggaggcatcctccccttcctgggctggtggtaagaagtggctacatactgtgggtgtttctgaaggtatcattcccacctggaagcttggcttcaggaaaatggggatgggtgagggacagggatggcataaacaaacagttagcattcctacactcactggatttagagagcatgtggcagattctccaaaaatgcctgttgggtcttgtcttttagtgaggaagccgtcaagtcctctactctcctggggaccaagctggctccaccagcttctgctaagttgcctggcttgaaaggtggaggaagtatcctcctattgttggtcctaggggagcatatggcagggaggggatttgaggacctaagagacactgcttgctgctgcctcatttgtgcaaaaatggctggtgtctggggaggctgcctcaagagagggaagatactaccaagactggattccattaagagtggagattttcacccgacctctggcaagagttgctgtgctgggttagactgcatatatcatgacgagactgctctagtgacccttgagatctgggccttggagtaggatggcataccctgaggacttaggcaggctggggtgggaaagggcgggtggttagtgggaacctgtgtttgtctagatctctgacatactcagtgctttttgtacccagggaaatagaggcatgggggacagagtgggctaggctgtgtgtgaaaatttttcctaattatctgccacctggagcattgcttactgtaggacagcagcctatgacatcggcatccacaaaccagtgcttcctttttccct

SEQ ID NO: 6558 - DNA, 6000 bp, Homo sapiens
gcttgaacccgggaggtggaggttgcaatgaaccaagactgcgccactgtactccagcctaggcgacagagcgagactccatctcaaacaaacaaacaaaaaattcaagacaagccaggcagagtggctcatacctacattcctagctacttggaaggccgaggtgggaggattgcttgagcccgggagttcgaggtcagcctgggaaacacagcaagaccccatctcttaaaacaaaaatctggggccggatgcagtggctcacacctgtgagtcccagaactttgggaggccaaggcaggaggatcgcttgagcccaggagtttgaaaccagcctaggcaatatagtgagacccccatctttacaaaaaatgaaaaatttagcctagtgtagtgatgcatacctgttgtctcagctacttgggaggctgaggtgggaggattgcttgagtccaggaggtcggggctgcattgagccatgaccttgccactgcattctagcctaggtgactgacaccatgtctcaaaacaaaaaacaaaaaagacaagcaaaaagtgtttttttcaagacaaatctgtcagtgactagggtggaggaggaagtggtgggcagcggcggcacggtgggcaaacgcggagtggcagagcggcacgggacaggcatggcatttcatcatggaaaggaacccatgtcaagcagcctggaatctgcaggcgcacagcgacagaggaagaattaaatgaaggaaaaacactggaaacaaccttcaaaaccacaataataggggattttaacatggttctctgaaatttgacagactgattaggaaaaaaaagactaagggacgacttaagacacatcaccatagactcaatctgacaaggatgttctaaattctgtaccccatggagtcatcatgcttctccagtgtctgtgggacagttatgaaaatgaccaggtatgatagaacaaagaaaccctcaatatatttcaggtaacagcacataggacatgccatttgaccccaagtgcaaaaaaaaaaaaactaaaaatgagcaaaaacaagtagtcccctcacctccaaacgctgttagaaattaaagttcaatccttcaggtaactttattaactcaagcgctttgtgtatttaaggcagcaatgggtcaggcgtggtggctcacacctgtaatcctagcactttgggaggccgaggcaggtggattgcctgagctcagaagtttgaaaccagcccgggcaacacagcgaaaccccgtctctactaaaaaatacaaaaaattagccgggcatggtggcaagtgcctgtaatcccagctactcaggagactgagacaggagaatcacttgaacctgggaggtggaggttgcagtgagctgagatcgtgccactgcactccagcctgagtgacagagcaagactccatctcaaaaaaaataaataaataaataaaggaagcaatgaaattaatgaactaaaataacagaaaactaaaaattaacaaaattaattatttaaagtaggcaaagggactaataagaaaaagaagcaaataaattaccactgtcaagaaaagaattaaaaagtccaacagccagtatggtgctgacataaagacagacctacagaccaacagaacagaacaggacaggacaggacaggacaggacagcacagggccagaaatgacaatgacagacagatgaccttcaacaagggtgacaagaacttcttgcacaatggggaaaggatggtctcttcaatatgcagcgctgggaaaactggatatccacttgcaaataaagatagacccttaccttacatcatacacaaaaactaactcaaaaccgatgcaagacccaaacacagacttgaaactgtaaaacccttagaagaaaacaaagggaaagacttcacgacattggtcttggcaatgatttcttgaacatgacaccaacagcaagggcaacgaaagtaaaaatagacaaatgggatgacctcaaactaaaaagtttctgcacagcaaaggaatctattaacagaaatgatatcctatagaatggaagagactatgtgcaaaccatctatctcataaggggttaacagcctgaatatacaaaaaactccaactcaggaacaaaatcgattaaaaatgggcaaactgcacttttgtaatcccagctctttgggaggctgaggcacaagaatcgcttgaacctggaaggcggatgttgcagtgcaccctcaccaccgcactccagcctgggcaacggagtaagactctgtctcaaaaaaaaaaggcaaagcccttgaacagacgtttctccaaacacgccatgcaaatagccaacaagcacatgagtagatggtcaacatcattatttatcagggacatgcaaatcaaaaccacatgacactacctcatgtccattaggatgaccattatcacaaacaaaaaagaataggctgggcgcggtggctcacacctgtaatcccagcactttgggaggcctaggcaggtagatcacttgaggccaggagtttaagaccagcctggtcaacggagtctcgctctgtcatccaggctggagtgcagtagcatgatctcagctcactgcaacctccgcctccctggttcgagccattctccttccttggcctcccgaatagctgggattacaggtgcccgttaatttttgtatttttagtagagatggggtttcaccatgttggccaggctggtctcaaactcctgacctcaagtgatccgcccaccttggcctcccaaagtgctgggattacaggcgtgagccaccgcgcccaacctacactgtaacatatttaaaaatcaaagtgcaaagggtggtttctttctaaggatgaaaattattattcacatgctccacaccaccatgcagatcaagacgctgactacctctggcggctcagcaattctatcctggcacccccggagacagctgtcgcccaggtcttgtgtgctgctgtaagttattccttctcactgcattccccaaatggacccaccacaacctgctgatcctttctgttgctgatggacatgtaggctgtctccactctggccatttgtatttctcctggaaactgcttatgcccgttacctttttctatggaaacagacggctgggacagaaaccacggccacagcagccagcgtgtctttgccagtggggtcccacactatgaaatcgcagctgtggcctcggtgggtgtgtccttggcgggtgcatccacacactttctctcggaactttccggactctcatgcatatgctacagctttccaaacggcttggccgtgcggagttacgcacccacctgcagcaggtgatctccagctgctctgcattccaccaacactacgtgacaagtctcaagttcagccgcctgggggctcgggcaccccattcctgggagaaatgatgatttgtgcactctgggccattgcatggtgtctgttcacgtcctttgcccgttttttaaaaaactgggttgtcagccttttccttcctgacttgtagttgctcctccatcctggagagtcctttgttgaaaataccgcaaatatcttctgaagaggactctcccagggaacattcactacaactgtaacgaccacagagacacagagctcctgttcactgtttagcccaggactgcggtgacaggtgcacccatgacccgagatgctggctgcgtcctgtggggtttcctgcatatggaagttttaaaagtctaaagcctggcggtccaggaggttgcgtgtgtgtcctcggggaggaaccctcctgacagccaggcctctggagcttcgtctgcacgcgagcttggcatgcaccagctgtgcggcccaggccaggtgacacggcctctgaagtctggtctcctcatcagcaaagccagtgccccatgccacgcacctcccaggattagccccaggccgggaggctagaggccccacaaggagcgagcctgcgactgcgatccacaggcagagccacagaggcagggcgcgccctggggcccaagctccagggctgcaggcccagggccagatcctgacttgcccacccgccggctgtgtgaccttcagcgcgcgactaacctctctgtgcctatttcctcgaggaaaatgccgggaaatagcagcgcctgcccctgtaaagccctcagagcagagtggaccgcgctctctgcaagcgctggctgctggcgtccgtagcaagctaaatcgcgaagcatctgaacgaacgaggaagcccaacgaccatcccacaggccgcggccagaggcagactccggaatgcaaatggccaaacaagcaggtccacctgcgttcctaaccaaaagatcgctaactgaagaacgggcgcaagcacctgcgcatggcactgcgggtctgggggcggccgcctgccagcgccgggagccgccttccacggctacctctgcacagcgcgcggctcgcgccggttgctgggcagaagctcgagcagcttcgaggatgtcgggcctgggggcggggccgcgaggcagcgacgtcgcgcggggcgcggccctgacgcagcgtgacgcaccggcgccgcggcgggtacgggctcgggcgggcgggcgggcgggacggcgccccccgcggccgggcctggccgggctgcgctaggctgggctcgggcagggtcgcaggggcgggggtggcaggggagcgggtggcagccccgcgggtcacagcgccgccgccgcccatgctgctgcccctagcctgcctgcacggccgcgtcgctcagtgcctgacctccttgcttttgcttgcagagccgctcccgaggccccggcgcggcgcgagggcgcggggcgcggcgtccacaggcgccgaggctgcccccgccgccccgcccgcgaagatggcggcggaactctacgctcccgccagcgccgcggccgcggacctagccaacagcaacgccggcgccgccgtgggcaggaaggccgggccgcgcagcccgcccagcgcccccgcgccagcgccgccgccgcccgcgcccgcgccgcccacactcggcaacaaccaccaggagagccccggctggcggtgctgccgccccacgctgcgcgagaggtgagcccgtgccccgcggcccccgcgcccgcgcgcgcccacgcccccagcccgtgcctctacctttgcaggaacgcgctcatgttcaacaacgagctcatggccgacgtgcacttcgtcgtggggcccccgggggcgaccaggacggtgcccgcccacaaggtgggtagcggcggcccctctcggaacgcgtgccccgtccgccccgtccgccgtgtggctgacacgcagcctgcgggagagccaggctcacggcggcgctttctcctcccagtacgtcttggctgtcggcagctccgtcttctatgccatgttctacggagacctggcggaagtcaaatctgaaattcacattccagacgtggagcccgcagcctttctgatcctcttaaagtaagtccactctactggggagggacgggtgggtccgttttaggcggcctccggaggcttctgaagggaagcacacaggagctgatggactcctctcccaggcccagccccgcgatgggtgcttgggagccagcccctgacgcgggccctgcctcgcctaggtacatgtacagtgatgagatcgatctggaagccgacacggtgctggccactctgtacgctgctaagaagtacatcgtcccagcattggcaaaagcctgtgtcaactttctggagacaagtttggaagccaagaacgcctgcgtcctgctgtcccagagccggctgtttgaggagcccgagctgacgcagcgctgctgggaggtcattgacgcacaggccgagatggccctacggtccgaaggcttctgtgagatagaccggcagacgctggaga

SEQ ID NO: 6559 - DNA, 6000 bp, Homo sapiens; identical to SEQ ID NO: 2790

SEQ ID NO: 6560 - DNA, 6000 bp, Homo sapiens
ttgcgtcaaaaagttgccagagaggcgctttctcagcaaatctccctgagagcgggaccggcctcagctccaacacagcctccactgtgattaaaaataaaaattgctagagcagccctcactcgccacatctactttgtatgtattgcagaggggcccacgcgtgtttagaactctagccgccttcctcattttcgttctttaaaaaaaattttttttggttgtgtttgacttttcatggaagggtgaagactgcaaggtttctaactcaatactcttgatttcttttaggatagctggctatttggaatttaaaggatatttgactttttctaacctcccatgaggctgtaaggtaagtgtccgtctgtcttgtctatatccatatctacgtgtccccgtgtctgtcggccatcaccccagtacctccaatagaccgaccgatgcccctctgcgaacgtggagttctgtaggcggatgtattttttctcttacaaattttgaggtgtaataacgatcgttgcaaaaagaaaaatgtgatctagagatgagagcggtagtgggagagaggcagagagcgtgctcctgggggtcgtcgcttctgcaaaacgtcgtcgaaacgctgcgaatgtaatctggggtgttttggaaggttttgtttgtggttttgtttttatgtcaacgccgttctgggcttctcccgcgatctttgcgttttggcccccagatttggttggggtcgtttggatggatcccagggacctttttagagtccgagacaaaaagatgcagatgtaactagatggatggattgaaacaacaataataaaaagccaggcgcctccttgggcccgcgcgccggaagctcggttcgcttgcgggtcggcctgggccgggggccgccgctcgagcccctgtcggcccctgttgaacgtgagcggaaaccggagcggataaccgaggaggctgggagcgctggcttctcgtccgccccggcgctcactgctcgctctctttggcctcctctccctcagcctagcacagctcggttgtctgtttctcccaaaagcttccagatctcctttttgtttttaaatatccaccaccccccaaaatccaaaccaccctgggttgtaattacgcagcctcccaacccccggttgtcgtggtccccgaccctggtcaccaggccgagcgaacgtgaagagtgttttttcaacatgactttgccgggtcgcggcccgccccacgtagccctccgcgcgcacctggggcgggcagaagtggcagctagtggcccctgctccgcccaaggccgcggccgggccagggaccggaatcctcccgctgggaccgcggcccctcagctgttctctggcggggagaggcagggctcgcccgcgcgctcgcgcacccccttcccaggctccaggacaatgaggtgtcgtggctcggggccgggcgggggccgaggggttcgccgaggcccagcctgtgccatggatcggcccagtaagaaccatccgaaggtccctgccagcgccgggcgcgggcgacgggtcgctctgcaaactcccaagaagtcttcgcgttgttgcgttcaagtgactcttgaaatcgatgcccgatttcgggacatatttttggaaacccaagtcccctgtcaggattccaccgagttggcttttgcttccttcacagatagaactggtgcgcggggagcgaaggccgagcggcgccgaccctgcggtggtggattgcttggggaggggacggggaagtcgctcctagaaattctcccctccatcctagagcttcggggtcaggatttctcctgctcagctcgggactttttacaggcaccaaaagttattagcaacagaggggagtaggagagggaactcctccccccagagtaaggtagacacccagacctcagcgctaacaccggggctttctcccaacgataattaatagtcaaggccaacccttttggcacgtttcttcctccctccctcgcgggtggcagagttatttgattccccgaggccagaaactttcactcgagttcgccggagagaggccagcgccggccgttttccgcggtgcccacacgtctcctttttctttctttcctcctcttcgtcgtcttcccagccgcaggccagtcgccagtccgcgtagttttgtttcctttccatcatgcagaaaattaatcagcccggacgagaagcagagaggagcatggcggcctgtaattaagggacgtgtgcccctcggattatctcgttagtttatcaagaaaacatttattataattaattctcggacgaggtaattattgttgagcgaggacacagcaactggtagatgggcttcttggaagaaaaaaaaaacaaggcgtgggggagggagaagcgacagattgcacgaattgaccgttagatataaggctgcgcggggggcgcgggcagtggagcgggacctcgggcgccaggcctgcggggctgcggggctgcggggctgcggggctgcggggctgccgggcaggaacgcgggacccaggcactcgcgcccggaggtgcggtcgccgaccggctgccggaactcgccgcgcgaccgcggtcagcttctaggtatgagttctccagaggccacctcgtgagcagtcatagtgaggcgtggatttttcaaaagttatttcttttccccgttctggaccctgcttcgagaggaaaagagctttgaaagttagattgaagggcccatgccttctatgcagagtgcatacctaggccggttgtggagagaatctcttagttttgggttttggttttcctcttttccttttaaaggtggatccaggagcaaaagtgaaaatagtctattttgagaattttagccattttgcaatggtaagggcaaaggagcccctggaaggatctcggccctggtgctttctgtgtgttactggctttttatgttggaatgtgctactttattgtatgatgtgtcaggcatttctaattgggtgagagctctacatgtaagaacatttccatatttctcaagggtacatctgatatgattttacgattctctatagcactgtagttcagaattttgcaaggtagtacgattaaacaaaaaatctccaatctccagtttagaggctgtttaaacacatatacaactgtattttaaagctgtcgcatatgtgtttaaacagcctctaagctggagatttttgtttattttcgcagcctccaaagaacagcattttgaaaagaaaagacaatacaaaaacataaagtctgtattgtaggggcaactaaattagttgtactgaggataatacaaactcctccaagaaagacatttataaaattatattaagttagatcttagggtagaaaagcatgacttttgtgctctgaatttaaatcagaaagaagttgcagttactaagtttcatttatggacttttgtgccttgctgtcttaagcaacgtaaatatgaaaacccggagtcctttaaagtcagtgagacctttatcttgtatccgccattttgaagcaatctctcatggtgtcaaagtttcaaagtagagatccttgcatataagtgccacattttaggaaaataaaggccagacttgcaaactgccagtctatattaacatctactttgaatctctttgctggggtggaggcggggagctcagctgaagaaagtaaataacttttctttttcttcctttcttttcccccttgagctctttttcttataggattgtaggaaacttgaaaggtagggagaaattctactagtttcacaactttgggtgtttgtgtatctactttcttcaaaactaaaatgtgcaaaaggcagttagagttaacaggaaactctgctgcagctgccgaggacccaaatgtctgaaaatttgcctcccgcaggatctgcagcctccacacatcaaaatcaacatggaagcagcttgcactacaaatgtggggtcccgtcattatctgattggtgggattctaactttacttcacaatttctggcaagccctgtgccaatcttgaagacttttttggaatatgcttaaatatttgatgggtgtctattaaaagttaaatacttgtttgtttagctttcgttccttagacacatataatcaagattctccaaaaccctaataaatctgttacttacctcgaaatctaattacccagactactaattaggtgaaaatgattaccggaaatgacttcaaatgtggaataatagtggttgagcggtttttccaagtttgtggtttagtgagttggtattttagatgttaaacgcactgacattttaggttcgcagcagttgaaagtggtaaaaagctaagataattaaaatctctgccatggaaaggcaacagtctggggagaggtagatttcttgaattgtttctttgtttctcaccaatgggctttgttatcagcattatttatttagccaaagagttctttgtctctgcaaatggccccaatcaagttttgtttgagacaattagctagtgccagccaatgagtcctatgcaaatgtagggataggaatgcaatgtgtgcatttgaaggcacgggtttttgttcttggggaaggcagattgtaattgctttcttcgggtactttttttttttttttaagtttagggtgggggtggggaagacaggtttatctggtctccttccatcccctctagttccagagcagctgggggtgggggtggggatgggggtggggggagtgtctgcaagtcctttaaaagcctctgcctcgcctagtccgtgctctttttaagttagtgctggaacgtggaagagctgctgcctccgaagcagtaaaccagcccctctgtttgtttgtttgctttgcccttagttccactgctccaaacccacccaccaaggactctgaacctgtccaccccgggcgcatcaagatcttccagctgggtacccccgatttgggccgactttgcacctccaaacaaccttagcatgatgtcttatcttaagcaaccgccttacgcagtcaatgggctgagtctgaccacttcgggtatggacttgctgcacccctccgtgggctacccgggtaagtgagccctgctgcactcccgcacccctcttccccatgcccaccctccggggatgcaacaccctgttcccatggaacacgggggttggcagtcacactgtccccacccagcttcaggcttggtctcctctaggtttgccttctgaggaagcagtcccagggcatttactgaccaagcagagaacaggggttgggaaaagtgagtaggtgggtctgcaaccgttacaatcacatcactttattcttaattcgagtaaataaggattggcatcagagtgggatgaggaaggttactgtccttgtcatttgggcaaaagacccctacccatatctcaatgaccaattcctcagaagtgtcctcttggagaagctgagttttccctccgtaagtccttagcactctcgggcttcgcagttgttccctccatgcccaggccttcccctatgacctccagagcctgctttaatcccaagaggcgtgacttcctccaaatgcgggtgctttcctttccaatcagatatgtttaaaaatcctcccaggagtatgaactatgtccccattttaaagatggaggaacaaaggcccatggtgtgctaaaaaccatgggaacaggatccagatttcccccatcaattcgagctgccagtctgtcctcggagatcctttgacttcttggaatagcctttttgtgttgtggtttgggggttgatcttggagaacttttttgtgtgtcttttaaaaaatgtttcatttgttaactttccaagtgatgctctgattggagcaatctcaacaccaagaagagtagggaaagaagcagcgtgtgtcctgggtccccgggg

SEQ ID NO: 6561 - DNA, 6000 bp, Homo sapiens
tgaaatcagacagtcttatctatggtctcaagccatgtctgtctgtaccttttttttttttatctcatttcagggaatattacactggctgacttattaatatcttctgagccagaaaatgtaaggaagctgcattttcagaattgcatttgagtcatttgtgaaattgcatattacaatttgccgccatttctaacagtcctataacttttttttttttttttcttaactgggtgttcacattcatgccaatgacctctaggggctagtttctcttctagctcaagagaattgctgcagagttggaagtaaggacaaaaatgtgtatgcttcatgtttgatttcaaatgcatagaaaattagaaacttaaggtatgcaagggatttgtgtggaatttaagtacctttgaggggcagtggacaggacaaaaagttattttttacctgtttgtttacaaatagcaaagatcaagactgaaacacatgagtgtgatttagaaagagttggctgcaggtgctgcttgctcaggtggttcatttaaactgcaggtcagagcaaccttgtctcatggtcctggtgcccaggtatcaggttgggtctgtcttgctgcttatgtccttgttaccctctgagggccccagtccaacgcagatcaataaagaataagttacataaatatgctcataggtggtcattcctagacaagaaattgacaacatttcattcaacagtatctgggctctacaggacagacatgcctccatttatgcaacaaataagaacagcatctcatgacagtggagaaaacatgggatgtgcaggtaggtaggtaaagttgggtggaaactttcaccctaccaaatgcacatgggtgactttataaaataaatgttagctctctgagcctcagttttcccatctgtaaaatagacagtcccagggaattttcaaggattaaatgaaataaaagtgaatcaacctatgcaagcctgcctactgtggtgtccaggctagaaaaatgctcaataaatattaggtttgtttttatttctacaaaagatgtgatcctaaagagctctatccaaattcaagtttcaaatgtcaaatcacattttgtgaactttatgttcagttgagatgatctctgacatattaattagtaatcctatctttttcattcatcaccaccaaaaaaaggtgttattgcacgttcaattaatctttcccctttattaattccataagtgtagggttttatctctcagattctcttaaaacagaccaatttatacccacataatataaataagcttgttcctataacactctggagcagataactatcccagaacccaaatcctcctacttggcttcaagctcagagaataaagcaacaatccaaaggcaccctttggcatgacacccttctagacatctgtagcattcctcctttccctccacttttcctattagcttttgctttcttgccttttacagggttttgttttgcctcttggtagtttctttcctacggaaaattctccctctgatctttccaagtcaaaggcttcagcaaacatttgttgaacgcgtggattgtgctaggtgggtgttatggaccatggagaatgctagagatgtaagacatgcgctgtccaatcgcagcgcaggttgtgttgacaggtaagatgagggctgtgggggagccaatgtgcacgttccactgggctaatgtgctcttcaccttatttaggctcttggctttgggatgtgtaagactttgctagacagagaaggggtggggtgagaagatgaggaaggtgcaccttttatggagaggctttccttcctcttcacagcaaaccatacctgtactacattgacttcctttgctttcccaggtgacatctagctcatgctgcaagctcatcttgttaatcataaatgctagtaagttaatattacccatcatatataacatgacttaattttaacaattcaatgctttatccccaaaagatgacttaatggtgacaatttcaatccccattgtaggatattttggagacaggcagtcctttcaatgtcatatgtgggtgcttccttaggcaggtcaggggtgaggtggaaatgaggctgggaccctgctcacttatatagcaggcatcgttctcaataccaggcttcagggggctttttggtctagccattggtatgaactgcctcaagaataatcccttcatcattgtggtcacaattcaggtagaattggaataatcatcctctccactctgcattaaaccaggcaaagtttccatctctgggtaccattgtctttcttgatggacagggtgagtcagaaggaaacttactcactcccattcattttctgcttattatttcctgcagtgaggtttccttgtataataaacagcttctgtgggtgtttgagctgctctgaaaagagaacatgctgttcctgtgtgtagaatgccttctgaaggaagcatcacagtgaacacagagcagaagcttggcacacaggtggcagaagtttgtctgcagtgttctgcatagagcagagagtcaagccattttcattctgattgattggaggcatggtatggaggtaaatgggtccttggcctctctcctggattcaagtccttcttagccactgataggtcatgtgaccatagggaggttgtttaaccttcctgaacattcattttctcaagtataaaatgggggtaatagaatttgccttataggcttgcgtataaaataagaattattgagagaaagcggggcataaatgtccaataagcggtagctgtctatgaagccactgttgttactgggttcctttctcactaggtggcttcaggtagctgacagaagctctgtgagcctcaatttcctcactggaaaagtggagtcaatatctcactgagctggtgtgaggattaaatgagatgctgtgcaggtgcttagcacagcgtcaggtatgatgttaatattgatagatgcattttcttcaccctcacctatctttttctgcctgttggcttatggttgaaattccttcatgacggtttccatttccagagatatcttgttaacaagtatataccaccaaatgaagctgatttttttttttttttttttttttgagacagagtctcgctctgtcgcccaggctggaatgcagtggcgcgatcttggctcactgcaacctccgcctcccatgttcaagcgattctcctgcctcagcctcctgagtagctgggattactggcatgtgccaccacgtccagccaatttttgtatttttagtagagacgaggtttcaccatgttggtcaggctggtctcaaactcctgacctcgtgatccacctgcctcggcctcccaaagtgctgagattataggtgtgagccaccatgcctggccatgaagctgatttttttaaaccatcatttaacattttctccataaggtggcaaggaggaagagcatatggggactgggtactttgagagaccccaggacaggagacagggaggctgagattggcatgttgtctgctgcagttatttgccagcgacacactcttcccgtccaaactaacttctctgcctcaaggacagggagactctgcctttcaacctgagagaaaccaggactctcagctttaatgaaaattggacttagggtggggcagtggagacttttcacagctattgtttagctgatgaagcagatgcttctccatctttggagcctgtcttcattacctgtggacctcatctttatcaacccagagcacacttgcgtctctctattttggctaaacaccaaacagctgaggctggtactgtaaaactttccctccaaatgccccccctcgtcttcctctattagagatctggatcacaaccctcaaaaaccatgtcccttatgccacctgagtagatggtttgatgattaattaggcacagatgtgacactggggggttctcacaatggcctgtgggtcacatgctactttccttttcattttcatcagcaacagctgccttaaagccagttaagactgtggtcctagtctcgcaccctggggctcctgctggggtgggtgaggggaacaccccattaagctgggggaactggggctgccaccagggggcgcgaggggccttcgcccgagaagaggggtgggcaggtgcctccagcggagaagggcgccgtggccggaggcacaggtctccccggtgccacttcaagtgagttcgaggaagtacctgggatctttgatctaacgcgaaaggccttcccagtgacctcttgagagctgagaacccactccctccacctctagtccacggctttgccactccagggcccgaggttacgtttgctgctggggatttgacaaacccaaagcctctctggtttcaccactggctccttagaatcagacatctgttctgaatgacacttatgtgagtcaggggctgaggacgtgatcctcgaagtgtggtccccagactggctgtatcagtgtcggcatcccccaggacctggttggaaatgcatattctcaggccctactccagacctcttaaatctgagactggggctgcggggagcgccatctgtgcgccactatccttgtgggtggaccaggagtcggttcgagggtgctcccacttagaggtcacgcgcggcgtcgggcgttcctgagaccgtcgggctccctggctcggtcacgtgggctcaggcactactcccctctaccctcctctcggtctttaaaaggaagaaggggcttatcgttaagtcgcttgtgatcttttcagtttctccagctgctggctttttggacacccactcccccgccaggaggcagttgcaagcgcggaggctgcgagaaataactgcctcttgaaacttgcagggcgaagagcaggcggcgagcgctgggccggggagggaccacccgagctgcgacgggctctggggctgcggggcagggctggcgcccggagcctgagctgcaggaggtgcgctcgctttcctcaacaggtggcggcggggcgcgcgccgggagaccccccctaatgcgggaaaagcacgtgtccgcattttagagaaggcaaggccggtgtgtttatctgcaaggtaagcgccccttcgctcgaggtgtggtttaattgtctcattttgtttgaaatcctgcggtgagaaaccagtcgtgttgagaacaataaaagaccaaaaaacgatcaccaaaaccaactgtcctgaaagctactggaaagttggaaaatgcatgctttgattaaatgtcttcattcaagacactggcaagttaacttatttagtttgtgccgtgagctctgggttgattgtgctaatatgaataactgaaaaacattttatttccctatggttttcctcgatggacttccccactatgggtgaaatgacaatggagttgaatacactttctgattgaactttgagggcctgggaagatgtacacgtctcaggcaagatgataggggttttaaaatgtattaattggcattccttagccatgtcagcaagctgcgttcctcctttcctgggcagaccaagctaagctctaactggtctcctttatttgctgaagaggagtccaacaactgccctctaacaccctgcgtgttattcttattggaaggacaatattaagtcaagtgaatgtcatttttgtgaaaaaactttgagtggacttctatttaggaagataaggttgatttaattttactcgctgtttaaaaagcaggattgtgttttggtgtggtaggcaacattttggaggacagactttgccttattttgttatatttctagtatttacatgggcattccattagaaagttttacttttgctctaagtttcgtaactcggtgtctagtgaggggaaacatgtttgtaatttaaaaagtgaa

SEQ ID NO: 6562 - DNA, 6000 bp, Homo sapiens; identical to SEQ ID NO: 1826

SEQ ID NO: 6563 - DNA, 6000 bp, Homo sapiens
gaaacttaagtgtgatgggcatactcatttgatcacagtgatggtttaaggggttatacatatgtcaaaactgataaaaattatacactttaagtatgctctatatattctatgccaattatacttcagtaaatatatctaaaaaaaccctacaactcagatgtcagattttgaagacggtggaaaagatgcagaatggaaatttcagttaaaggcctcagtgatgtttgtgagttatccaagtattcaaggaatccatgcttcctccatctagctgagactcggcagagtttaatgagcaatctcaatactattctccagaaatggtgtcatccaccatactatggctgttttcaggaagagaatgacctaatcagtataaaatgaactccatgtcttgtgagagatttataattaaacacataatccacatttacaaacatttttaaagggcttttctacctgtaggagaggattaatattgagagtgaactttttgcaagttttccaacacactagtttatctctaagagcctcagtttcctcatctataaaataccataagaaataagaaaaaacaggaaactaaaaagagcaggctttgccagagctattaattattcttttttgggcagagccaaaactcaagaaatggaagtctctcttccatttctagacttttttagagagatccatgaggaagttcccctccatagctttggccgaccatcacaccggtcaagaaggcatccagcctctcccaggctcagcctgtgacggaaaaccacactgatttactaggatagccttgagctctctcattagccctcacgtgttctgaacgttagagctaactttccagaccctcattatttgttgaaaggctggatggggaaaatctcaaccagatctccatgcctacttgcaaggagaggtagtttttgcagggtggcctgtgttctccagatgcagagccatacagggccttgcttctttacgggagatacaaaaactcggccctaataaacagaaatagtggttgagcccacaaactagcattaagttgtcctaactgtaatttccagctccgtcacttgctgtgtgggaccttattatctccaaaacccaattttttcaacttcacaatggaattaaaacaatctaatttttcaaaatggggttaacttccactgtaagttacagtatattggccaataattaacttgaacactaaagctggcatttaacagatcaattcaactgttttctaagtaaatacttaaacgcttaaaaaaccgtaatttactgagaaaacaaagctttctttctaggttaagaatttgagaaaacaagacccagaagcaaactaaaatcaagtcctaaaatggtacaaacctcaaaaagccaatcaggtttgccaataaagctccgcctccgtgcaaactctgcccacttccggcttccccacccaccttctaccagtggaaccccgcccctctctgcgaggtcccgccccccacacctgatcctggttcccattgggcgaatctggatgctgtatacacagccgacacacgcacattaggctggggcgtcttcgcgcctgcgcagctgcgctgtcaggcggctgaaaacgggggggttggggggaggggggcggaggtcgtgccgaatcttcctccgtaataagaagcgacgtgtcccactgtcctggctccgtgggtccagtgagattgggcctgggcgctggagctgctgtggctcccgccgcggcggctgccatggaggccatgccagagcccagaactcacgccgggggaggccgagacagccggcggtactcatagatgaggcagcggcggcggcggcggcggcggcagcccgggctctccatgagcaggcggcggcggcgacgggtgcggcggcaccggcagttttcggtccccagggaggtacgaggagtttgcttcctggtggacggagactggccggtgtgggaacgccttccgcggcccggccctccagcctatttgtccgcagttctgagcactcggcggggcactgcccgggcagaggcgggggcgcccagccgactcgcgggcccctaactcggggacccgcccgcctcggtgccaggcctcccgggcgcggctgcccagggccagggtgggcgtggccggaacgtgggggctccccgggggcgcacgcctagcgtccgccttgtccctgtcccgaagtcccgcgctgctgggagcggtagcgcgtggctgtacaggcgtattttaggcgctgatttgagaggggacttttagaatccctgagtccttagggagtctggcgttcaatgccttgggcatgtggtggggtcctcacggctagcttggggtaccaatttcctcccttggaagtcaccacgaaagaaagatgttttgtcaaagaaatagaggtcaggagagttttccaggtttattcaaattggagggcccgtagagcctggagaataaagccagcggaatacatcctccagtccttctaattacagttcctagctaaacagctaagacaattttaagtaaagctcttcacagctatctttccatcatttttccccacccctcatttttattgcaatttactttggaacaaatcaccaaattcatgatgaaactagtatcctctagttcttccaaaccttccctcctcccgttttttccagagaaagactaaagtttcatgccacatatgtcattatagtttaattctcttagagtgtaagggtagttacacttcatttggtcatgtctgaagataatgtgaagaaaatatcctagagatttatgcttccttcccaatgcactattttaggaatccgaactcaggctctttaagcaatcttaaaccttgctacaaagttctttaaaattcaacggaaataaatcaaaccataaagttattttcgtttttaaagtatttgaatgcataactgttttttaaaatctttgtaaacaaaacgaatcagtatctattacgaagaaactgagtttgtgttttcctaggctgcagatttgccacaccctcttcttcctaagtggatgactagaatcaatgtgttggccaactagatataaacatccactcttcatactaaatatagttactggatattttagagtccacagtatcttgcttcaaactgaaaacactgtgttcatgtgtgtttaatatattgcagaagtgaatttttactcgcgttgcagaatgttttggacttagtttcttacacaaataaaacacgtaggactgcagctttattaagtgttgagttcatgttgtgtttgggaggatgcagcacttggaaaagatggtcaaaataagacactgatctcagtcactcatttctctgtttccactcctcagatgcctcccttttttcataacaatacttctccataaaagtaacctcggaaaacaatatgatgttgttagtttatttgcttgtcccaagtaaagtgaaggagttttttcaatacaattgtaaaaagaactcattctttcaaaagtatgtgcgctatataacatacatataacacaacatatttattaaaatacttactgtggctttaaaaacaaagtgcctagtggtcctcaaggttggggaagagtgccagtttgaaaagggaggatgctttgcttcattctgaaaacatgcatagggaataatcaggatatttatcaagttctgaatcagatcttcatagtatagcctctgtagttaaaaattatagtatatctaaattgcacaatagcacaattctcagttgcaaataaaaatcccaaagtgattagcaatattagctatgctactattcacttaagattgattttcatgattactcctcatgctgtctttcaaagctaaatgtcagaattagtcttagtctatatagcaacaggagtttttttttttacatagtttttctctacaacaaataaaatatgtagtatagttaatataaagattatgtaatggctattattctgtacccccaattaaggatcccattatattagtttcttaagtggaatcacccatattaacaagaaaatgaagcaagcacagcctgtattttggaaagatgaggaggtttacattaggaatatgcctaaccaaagttaatgtttttaatagctttattttcatttaggaattttttttttttttttttttttttttgagatggagtttcactcgttgcccaggctggaatgagatggcgtgatctcggctcaccgcaacctccgcctcccaggttcaagcgattctcctgcctcagcctcccgagtagctgggattacaggcatgcgccaccacgcccagctaattttgtatttttaatagagagagggtttctccatgttggtcaggctggtctcgaacgcccgacctcaggtgatcgcccgcctcagcctcccaaagtactgggattacaggtgtgagccaccgtgcccagcctcaggattttttttattacagggtttccctctgtcacagataaaatctgcaatgtaattaatataaagcctatcaaatggccatctgtacctcaaaaaaagactgcagcttcttaaatggtctttccagagagcatgcatagtgcgcgaaaagtggctcatttaaatttttttgctatgttgggaggcctaataaccacatttgatttgagtctttagatggatttattttcgtttaaacatattatgcatttaatatacaaagttacaattttatgtgttctgttttaaacttttaaaatgtaggatgaagacactgtttgaagagatcaaagcatcaattaaaaataactataaccaagatcgatcattttgtaggcctgttcttccttgggggggtgtttttactatcaaagctggccgcaaagcagtatcctgtacaccactctatgttgaaataagactgaaaaatacctgcaccatagatggattcttgatgttattatatgtcattcttaatgaaaatgaaaacttccctagggaactctctcttcattttggtagagagtttgtagactgttttctttacttaatggacacctacagttttacaactgtgaagctactttggatttgggacaagatggaaaaacagcaatacaaatctgaagtccataaagcttcattaataattgatttgtttgggaatgagcatgataattttacaaaaaatcttgaaaatctcatgtctaccattcaagagagttactgttccaactggcgatgcccaactcgagtgcaggaggatcagcagcgcacaattaatataaagtaagttggtctaacgtctgttttgtcacttttactttttttaatgaatgttgctttagatatgtagtcgtgtaccccataatgacatttgggtcaacaaaggaccacatatgccatgctggtttgtaggatactgtatatttagtatacctttctatgtttaggtacacaaagacttaccattttgttaaaattgcctacagaattaagtatagtaacatgttgtatggatttgtagcctaggagcaataggctttaccatatagcctcggtgtgtaaaaggttataccatctagttttgtgtaagcacattctaggatgtttacacactatgaaatcatctaaggatacatttctcagaatgtgtccccattggatgacaaatgacaatattgccaaagtatttgttaaagtacagagcctttataattacttaggcatgaagcagtcacagaaatgcaagattcttctgcaggtcccctgaaaacagtgttacagcctattacatccaaacatcttataattactttacaaaaccagctgataaccttgtcagtagcaaagtaatgaattattcagtatgaaaaatatattactcttacttgaatttactaatatgactatagatgattcttagtgtcacaaatgtaacctctt

SEQ ID NO: 6564 - DNA, 6000 bp, Homo sapiens
tccatattccatgtttctatagacgtattctttttttttctttgttttttgagacggggtcacgctctgttgcctaggctggaatgcagtggtgtgatctcggctcactgcaacctccgcctcccgggttcaagcagttctcctgccttagcctcctgagtagctgggattacaggcgcacaccacaacgcccggttaatttttgtatttttagtagagacagggtttcaccatgttggtcaggctattgtcgaattcctgacctcgtgatccacccacctcggcctcccaaagtgctgggattacaggcgtgagccactgtgcccggcctgtatagacatgttattggccaggtgcagtggctcacgcctattatcccagcactttgggaggccaaggaaggtggatcacttgagcccaggagttcaagaccagcctgggcaacatggcgaaacctgtctctaccaaaaaagtagccaggcgtggtggtgtgtgcctgtagtcccaactactcaggaggctgagcagggaggatcctttgagcctgggagccagagattgtagtgagacaagattgtgtgccactgcactgcctaggtggcagagtaagaccttgtctcaaaaaaaaaaaaaattttttttctttgaccacaaatgtctgctcattgtctactacatcatgccctttcctacctccatattttatttcttccttagagtgtccttttactatccctatttgtcacttctgtgctccctttaagacccagctcctgggctcattgcttcctctggaatttttaccatgtgagactttgctgtatacatacacaactgcatacattcctaagcacatttgtattatttatttctacctttattttaatataaagacttgtctaatagctcttatgggattttaaatcagtcattgtcaatatatttattgtctattatatattaaatagcattgaggaaaattttcatggtatgaatgagtattgtacaggaaagaaaatataagttacgacagaaactcacacttagcaattagaagtcagtataaaagtactcaaacgaaaaatttgataacttcatctttgataactgcttcatatgtagttattaccaacttctggtgattctgcctccaaaatatatcccaaagccattcatgttttgtcatcctcactgttagcaccctggtctaaacctaaactactatagtaacttttttcctaacaagtctctccacttctacttttgcttcccaagtcattttttatatttcagtcacagtgatctatttaaaacacaaatctggctgggcactgtggctcacgcctgtaatcccaacactttgggaggctgaagcaggcagatcacctgaggtcaggaattcgagaccagcctggccaacatgtgaaactccacctgcactaaaaatacaaaaattagccaagtgtggtggttcatgcctgtagtcccagctgctggggaggctgaggcaggagaattgcttgaactcgggaaacagaggttgcagtgagccgagatcacaccactgcactccagcctgggcaacagagtgagactcggtctcagaaataaataaataaaataaacacagatccgattctgtaacttctcttatttaaaactctaaattggctaatgtcctaaagataaaaacccagattctaacatgtcctacgtatttttctagccgtatttcatgccattctccctttcattgctcccttacagacagtaatatttttatacttttgaaatattattaagcaggcacagtggctcctgcctgtaatccagcactttgggagactgaggcaggtggactgctagagcctataagtgagccgtgatcacactactgtaaaatatctcagtattttacagtggtatgatcactccagcctcagcaacactgaaaccctgtctcttaaaaaaagaaaaaaaaatatatatatataattttttttttaagacagagttttactcttgtcacccaggctggaattcagtggcacaattttggctcactgcaacctctgcctcctggattcaagtgattctcctgcttcagccccctaaatagctgggatttcaggcgcctgccaccatgcccagctaatttttgtatttttagtagagatgagggtttcaccatgttggccaggttggtcccgaactcctgacctcaggtgatcaacccttctgggcctcccaaagtgctgggtttacaggtgtgagtaactgcgcccagctgattgaaagatttctatgctgtatgcacctgctctactgagaaggtcatggaaaagacaagagttcaaaggctgatagaattctggaacttcagggagggatagattaagatcctgcatggtttaggcctttggacacaaaactataagcagtaattgttaatatcactctagcagttgagtagaggactgactcaaggtgtcagagataaacacaatcggacattaaagtggtgaaaacagattttattcagcctactgacagtaggggaaagagctaaactccagtctgatttgtggaggggtaactgggccttttaaaagaatgagggggctgggcctggtggctcacgcttgtaatcccagcactttgggaggccgaggcgggcagatcacgaggtcaggagatggagaccatcctggctaacatggtgaaaccccgtctctactaaaaatacaaacaaaaattagctgggtgtggtggcgggcgcctgtactcccagctactttgggaggctgaggcgggagaatggcgtgaacccgggaggcagagcttgcaatgagccgagatcatgccactgcactccagcctaggtgacacagcaagactccatctgaaaaaaaaaaaaaaaaaaaaaaaaaaaaaaggagtagagagggatttaagcagagttagagaagtgaaaaattacataaagtaggaagtggggttggtccatatgaaacccatctgagtttgccaactggcgcttatcaaaatcaggctcccacagagacagagacaggggtcctatcttcatcttgaggcgttggctggaacaaacagtaaattttttttggcagccttaagttttcttaggcggacactttaaggagggatcaggtcctcctaggaataaggccttgagctatttgaaacttgtgtttgttcaaatctttatagtccaaggttgaaggcttgtgaagaagaggtctcagaggaccctagctagggtttggtcagggagagaatcttttgcccaagaggtagactatttgcaaggagatcagacttttttttttttttttttagatggagccttgctctgtcgcccagtggtgccatcttggctcactgcaacctccgcctcctggattcaagtgattctcctgactctacctcccgagtagctgggattacaggcacacgccaccacatccacctaatttttgtatttttaatagagatggggttttaccatgttggccaggctgatctcaaactcttgacctcaagtgatccacccaccttggcctcccaaagtgctgagattacaggtgtgagccaccgcacccagcacagatatttttacttacaagttttggaaaaggataaaaccttcagctagggaaatgaaagtgaataaaaatttgcataacttgaccaattagaaatagatcaggaataggccaggcgcggtggctcacacttgtaatcccaacactttgggaggccgaggcgggcggatcacgaggtctggagttcgagaccatcctggccaacatggtgaaaccgtgtctctactaaaaatccaaaaaatgagctgggcgtggtggcaggcgcctgtagtcccagctactcgggagactgaggcaggagaatcacttgaacccaggaggcagaggttgttgcagtgagccgagatcacaccgctgcactccagcctggcgacagagtgagactccatctcagaaaaaaaaagaaataggtcaggaataaagaaaacacttttctcttgcttttcaaactcaggaactaatagatatgaattattggatatccaagcacacctttgttatttattttatgaaatttagaaaccaaatatagatttggataatgcagatccctctgaatttggtctgaattcagaaaccaaatagatttaggtaaggatacttttaaattcggtacacttcttcttttttttaattaactccctaagattcttgacagttcctctgtctgctttcctctcatatatgaattgctattgattagattaatatgtaaccttttttgtagaagaccctgataatcctactttgttctaggaaatatgcctgttatagcaatttctttaggtaatttcatccattgtgtgaatttattttccaaatcggggacagaggcaatatcactgtattcattctaattggttattataaaaacacctagtaatatcaattattgctgctaaaacagttcaaatctttgtgggggggaagtcaccatcccttattttaatgccttatgatttcataggaattaaatagtaatgattttttttaactttaggaaataactgaaatcatgttatggtttggtgaattattaacagaatcttattagaagaatttaggcttccaaagaagctggaagttatttgaaattaaattatagatgtgtaagttactaatagtcacatcacagccttgaaattagatactgagggttttgtttgtttatttattaccaaatccatcaaactctttaaactgactttggtcattgttggctattgtttgtcattcttttaaaggacacaaattaataactctgtgtgtgtgtgttgttttttgtttttagggtccaccaaaatatactaaatctgttctgaaaaagggagataaaaccaactttcccaaaaagggagatgttgttcactgctggtatacaggaacactacaagatgggactgtttttgatactaatattcaaacaagtaagtctaaatggaatcttatgtttttggcttaaagagattctaaatacttgggtggcagacagatgagtagttagcagtacctttttcctgactgtcacctactttcatccagacatactttcccccaagatctacttggaagaggtcttcagttcactgattattggctggctaaagacctcttgttctttggaaagcaaaagataaggaatctcagtctaaacctggttaatgtcccaaagtaaggcattagtatttgaatagaaaaggcaggatagtatgctgttttgtgatataagtataggtcctacccctctaccctttgttaagaatgtaattatttttacagccagaattttattgatggatgatctttgtaaattttttccttcttttaaaatacatagtattgtaattctgaaatcaaaccactatatttttccactggaatttaataatttccaatggaaatttcttaataataaattagagtatatcattaatgataaggaaaatctgttttacaggtgcaaagaagaagaaaaatgccaagcctttaagttttaaggtcggagtaggcaaagttatcagaggagtaagtaaagaatgccaatgaatcagtagatattctggcatatgctgcttctggtatggtgctgtaaagaattaggtttggggatataatacaaaggaaacagactttggagtctgacagattgggtataatcattgttagctgatcttgcacaagttatctcggtctcagtttcgctacatataaaatgaggacagtactgcctacctcaaggtttttagaagattaaatgagcataacttgaagtacctaatacagtaggggcttaaatattagtcccttccatgtgtacccattttattatttttcttcataaagtaagtctttgtcagaatgtttggccctctaa

SEQ ID NO: 6565 - DNA, 6000 bp, Homo sapiens
atgcatgccagcttcctgcgtctaccactctgcagctcaaacaagaagctcagagctgccccttccacttcctccccaaaagggatgaagaaaaccctgtggtagaaccaaaccacccaaggccagcccttaagcctgcctccaccttcctggtgcatgacaaaatatttcttttgtctcagaggactttgatgcttcaatatttaatgatgaatccgccacactccattttccctcctctgaagctcccaacaactctgacagggtcagatctctttaaagcatcttcaggaggcggttgccacggagactggatattggtcccagggacaggctgtgctacctactgggtggtggggagggaagcttctggccatgcttgggcattcagaccaaccatcattaatgttaatagaggaaatgcagcaacgtcaaaagcaaggcaggttggttaattagatctggggcccgatgacctccctttcccactgctacagcccttttgacttcccccagcaggaagcgctgtctgtgcggctgagtctgggccacttgcttaattgcatttctggcagggaaggagaggagggatggagaagctctgctcgctgcttccacctcaccgtgtgtcctcccctcccctcccttcctctcctccccacaggcggaattgctttcttctgagccgggtgggctctcctgcagggagaatgcaggggtctgtgcttggctcttagcaaagcaggtggcccacagtgacctccaggaggtggctgattttcctttgtgccttcttatttctcagtaggaacttggaagggaagagctctgaaggagccagaggggcagccaccttgcatgagggtgaggaaggagaagcccagccagcctctacccatccctccctcccaattaggctgcactggggccgaacgcttccctgggctcccactgccttctaaggagccaaggagaattccctgcccactttctgttcctccatgcccaaactggcagatgcttctctgggagcaaggccacatgggctgatgcagctttgagtgctcaggttctgttttctggaagttgctggagaagggctgtcagggtgcttctatgaatatgggcttcagctgtagcacttggcagaaacgtgatgtgtcccacaaactgctggtggaggaagaagatgttcgtcagccaattcaacctccagccagcttcttgagcctatttggtttaaaaaaaaaaagtcttctaatcagaagccactgattttataataaataacacttgttttgaatgccttgttgtccttgtacttaattgaatccgacttgccctctgctcccagaaaggcctccctgagaagaatgttttgagtgcaggaaccaccccgtgtgtcatgtctgaggctgatctaattccagcagaagacctgggctgggcaggtgagcctgattactccaggaggcatttggatctccccatgtgtacagttacttgagtaatgttggtcgtcattttggtatatttaaactgattccaaaataagtaggaagctggacctctgatttgtcctcttttaacctgttcacatggcatagaaaggagtgcaagaagaagttgtccccttcccagacagccgagtatcccagtgctgtagcaacttgccattctgcctaacagaggtccccatcttgacaggtgtctcctgttatcaggagtgatgcttaggagctgaaggcagcaggagctgacctgagtgttggacagaggatgggggaggggagtagcactgtgctgtggaactggggggcttctgggctgcctagccaccctctggtaggggctggtggggagagaggggcatgtggatcttcaggaggtggaacatgcctacgacaggcagtttaggaaggggccaagtcactcttccttgagtggcacagcttagtttacaaagtctcaacacatctctgacatttaatcctcataaaggcccagtgaagtcaatgatgtttttgttcccattctacccatgagagattaaatgacttgtcttaaggtcccacaacaagtaaatagtagagccaggactcagtgccaagtttgggtttttctgcctctctagtcttgtcctgggactagaggcaccttcccagaacagctgcagccctagataccctggggagaaggcctgagcactcagcccgaggtccctgacgcagcaccttcccgtgggccttctgcttaatgcatcagcagccgctcatctagggcccaggttttcctggctcccccaggtgcacccagatcagtgtgtgctggtagatgtttaacaacaggtgttctgggaggaaaaactggtgtgtatagcatttgccaatttccatggtgtaaatattcccaacatgttcttttttaagctaccaacttgatgtcactgaatgagaagttggaaagagatgcatacagttggttcttgaaagccatatgaaagctggctccagcacaccgctgaaccagacccagtgaccatggcttggtctgaattatggctggggctcttggccacagcccattaaagcaagggaggcatggaggcctacaggatgggccagagagacctgaggtcaaatcctggccccaccgcttattacctatgtgagcttgggctagttacttaacctctttgcctccatttcctcagctgtaaaacgagggtatgataaatagcacctacttcgtagttattgtgaggatgaaaagaggaaatgaagtaaggtgcccggaacactgtctagacataaatgccagctctgtattattaatgatacatgaacctcaatgaccagcactggctctgggacagtacttgaattctcctctaggttcttacctcctgggcggatgacccacagggaggagactcctgtgacttttactgagcccctcaaatgtgggcttggacccttggtctactgatgggaatacatcactctcatcgcttaggcccatccagattctcaggcctttcttgaagggagcagggatagagtgcacttaccttggcttatcttagcacatatctcctggctctaggaagacaaagagtgaagccatggtttgagtactgactctacttactagctagggccgttaactcccactacctcatcagactccagaccctggccagaggagagaggaagcaagatgggtcctaagtatagattgctggcaagaagcgtgagctgggtagagtggggtacctgagaccagccaggtggcctgcacagagcactgagcatctgggcactgaatagtgaaggtcaccaatgacacgtgtccttgccctgtgacctgctgcacctggctgcaggtccacgggaccccaagctggaagtttagtcacgtcttgttccttcagccccaatcactttgtgttcttgcttggagacctcttggaccctaggacaccagcttttccaggctgccttatagccttgctctcctgctccagcccagagatttgtgaggaaatgggaaatagaataggggttaccacaaactcctgagtccttggaagagggagaacagctagatgatttcctggggcatggctaggagtaggaaagaaaagttctgctgaggcactcagttctgattcagggccagaaggagaaattttaaagaccaggactcgccactccatgtctagcacagggctgggcatggagccccagctgttcataaccaggggctcaagaacacccaccttctacccatggaactaaaggaggtggactaaaaggtcccagagacctcaccacccaacccctttgctgcacaactgaggaaacagggccagagaggcgtggacagacagaggagataggctcggagacccctgagggaataatgagagagaaataaaggtgaaaacgggcttgctctcccaaacctgggccaccagcactgggctggggcttgaggaactttctgcttgaaagagaaaagtttagttgtaattggcaggtggccaattgcacaccctgagtggggagcatggattctattatctgaacttctattgaaaaaattaaacagtacttccgttaaaaaaaaaaaaaaaaggccgggcgcagtggttcacgcctgtaatccccagcactttgggaggccgaggtgggcggatcatgaggtcaggagatcgagaccatcctgtctaacacggtgaaaccccgtctctactcaaaatacaaaaaatcagcctggcgtggtggcgggcgcctgtagtcccagctactcgggaggctgaggcaggagaatggcgtgaacccgggaggcggagcttgcagtgagccgagatcacgctattgcactccagcctgggcgacagagtgagactccgtctcaaacaaacaaacaaaaagatgaaaaatcatggaagtggggaaggcccagggagggaagaggtgaaaaattaaaattaaaattaaaattaaatcatggaacggtagaatgttagagctgaactccctcaagattccaccctggccaagcagagctgggattagaactggatctcacggctttctaaagatggagtctcaaaaaaacccaggcctggctgggaatggctgtggtcttggccctgtccctacggctgaaagccctggtggcccccaacgtgtgctggtgccctagtcagaccgagaactaggcccctaggccgcctccccaggcctgacctgcaggccaggtgggtggcaaactcaaatgcctctggcaatgcgtgagttgaggggcctgtggagagggggcgcatgcagcgcctacctgaggcgaccaaattcaacacagtgccctcggggctcgggaggagaaactgaggcccagagagcctccgcgatgtcagttacgttctgcaggccgggcctttcccaggccaccatagcggctggcggagggagcgcgcgccttgctggcctggagggggcgggggccgtggcggctttaaagcgcccagcccaggcgtcgcggggtggggcggctctggcggctgcggggcgcagggcgcagcggccaagcggggtccccggaagcacagctggggtgtctccacctacgactggccgcgcgccttttctctcccgcgccagggaaggagcggctgcggcccccgccgggcggaggcacggggggcgtacgaggggcggaggggaccgcgtcgcggaggagatggcgcggcacgtgcggtgacggcacccgagccctgagggtcccagccccgcgctccgcgtccccgggacagcatggagcgcccggagcccgagctgatccggcagagctggcgggcagtgagccgcagcccgctggagcacggcaccgtcctgtttgccaggtgagggctacacgagcgcccggggatgcgggtggaggctgcctcggcgggaaaggggtcacgcggcaggaccggccccgaaggagggaaaactggccgctgccggggcgctggggcgcctgccagatgtgcgccagaggagcggggcgcggcgacgggtggcacagcccctctgcctctctctcgaccgtgggcgcctgttgccaaccagcgccgcacaccactctcccagcggggctcaccgggccgggcgggatcccctcccgcggatctccccacatctgggcgggtggacctccgtccctgcgcggcgcctccaccccgccttgtgcctcctgcgtcttccttaggtagcgactgcaggggtgcaccccgctgccggtatcagggtactggggtgccccgagagccggggaagggagatgtgtggggcgagctcctgcgcccgcgtgtgagcggtctggctccaggtgtgtggatccctgacaaccaacaagacaaacctttccgaggaaagagccagagagcagccggggaaggggtgacagatgcgggagcctcaccgcaggggagaggggtggggggtgtgc

SEQ ID NO: 6566 - DNA, 6000 bp, Homo sapiens
caagcttcagcgccatgcgcagagcagaggccacatggcacataggtatggaaagcctcttttcaggcagcagtactgaaagcccagggtgtgtccaaagaaacagaagcccatggcccctgtgctggggaatttatggccaaggtggggcagtgagaagtcaacacagtgaaaatgtttaaggatatttacaaagctatatccaaaagagacaaacaacccaatccaaagaaagcttctacagaacaaaagcggcttctccagtgttggcaaacaggagcgatgctttgtggatggctctggcgaattctccagggcaggtgcagcctctggtcaccattggcacagtggcagcctctgtagacaaggctcctctctgcaccttgctgggaagagggtgggcaagtcaaactgccagcaagtaccagctgtgccaggcccacctcagattccagcctcctccagaagtcgtttatcaactcaccctcagctcacgcagaaaggtgccccaaacatgggcaagagctcgcctcggaggtcagaaacctgcagtattagtccttctcagccacccgcgaccttaaacaagtcatttactttctggccccatgaccggaggagtaaaagggaggggattatcccaggcatgacacttcctttctgctggcttcagagcaccttccgcttagggagccactaaagaaaagctggtcagctcagcattcgctcagtccagcagttgccaaaggcctggaccatgaccctccagcaatattgacatagacaaaatctctctgtagatggagacaccccctcagcctctttcactcccaccaccaggctagggcgtaagggctggaaagagctaagagctgagcgggctggtctggcttgagccacatgctccccactgtcctatcccacccattctgcatctgcccctctctcccctgtagtgcagaatcaggctagcctgagacttggagtgcctgtgtccttgcctcctcctccaaggccaacccagcactgggggcatctttgctgattttttccatcccatacacaggctaattaaagcgccccaaagtagggctccatctttcatttaggaaaccgcaatagtcagttgccccactgcacacacacctcacagatccacatgcagacaacactttccagtgtcagagccacaggctcatgttgcttaaaggccactggggcggaggatgagtgtgccagggcacccctccatctaaatcagactttcagacagagttctgggaatgccaggctgcagccttggcagagcccccagggcactgcagcctggatgggcagcatgcctgtggacccagcaggccctgggccctgccccagcaggaaaggggttgggcactgctctgcaagagggacagctaggccagagtcccctccagaggtgatggcctcaggatgatcctgggaaacaagggctaaggagcgtggatgtagaaaggcatatgaaagaccgggtgcggtggctcatgcctgtaatcccaacactttgggagaccgaggtaggtggatcactaggtcaagagatcgagacaatcctggccaacacggtgaaaccctgtctctactaaaaatacaaaaattagctgggcgtggtggcacgcacctgtagtcccagttgttcgggaggctgagacaggagaatcgctcaaacccgagaggtggaggttgcagtgagccaagattgcaccactgtactccagcctgggtgacagagcaaaactccatctccaaaaaaaaaaaaagaaagaaagaaagaaaagaaaaaaaaaaggcacatgaaaggcagagacataggagcaagtgggcttggagggagaaagtcctggcctccagggcttcagtggagagaggagacagggacaggagctatgcaagaatgccttttcctgcagcttctcctctctctcatccccagctgaagagagtgcccccaaccacagctgccagagtcccagcccagcctcccaagatggggaagaggagaaggaggggaccctcttcccagagaggacacttccagctaggaatgccaaggtgagagctggcaagatgggtgggggaggcactttgatgaggcaaagggactaactgacccagcatcttccttcctctgccagctacaggaccccgctctagctccatggcctcccaagccagtggctgtgcccaggggccgccagcctccccaggagccaggggtcagggaggaggctgaggctggagatgcagctccaggagtcaacaaaccccggctgaggctgagctcacagcaagaccaagaggagcccgaagtccaaggtctgccaccctggctgagtggggggctcagggcacctctaggactttgctgtccacatcaggtcctcttccagagcatggaatgagtgacaaccaggagtcacagcctggatgagcatcccagcatgagccccactcctgtgttaggcctgccttgattgttatttcagggccccctgatccaggccggcggactgcccccctgaagcccaagaggacacggcgggcacagtcctgtgacaagctggaacctgatagaagacggcctcctgaccccacaggtgctggtggtgagagggcaggtccccccttcccacctatctgtccaacatgacaccccccgaagccccaacaccaggtggctggctgtccctgcccaggaaacagggctccctggatttgtccccagcaggaaccagtgagccaggaacagactgacaactgccacaacaccctcctcagccctcgacatgtgcctcgcaaggactcagacccctatccacccccagtccccagggccccctgccagcccctgtcctacaggggcaagacggcaggaccaggcatgggggagctggaggcagggactagaacagagggagccacctggagagacggaggctgtcagtgcctgcctcgatacctctctctgcagagagcttctgggtgggggcttatctcctcccccaggagggtggatctctgtccctctatccccagggactctctcccctcttgtatagaataaaaaaacaaaatcatcgcctgcctcgagtctctgctatcttccccattcactgcctccacaatctgctctcttcccacaaaccctcagagcttggccacagtggagaaaaatgagaaacattccacagggatagacttggggttctgagaggagcaggagaaaaaaacagagaactgccgagggaaggggactgataagtccccaagccaagatgggtgttatgcccagggtcagggctgagcttcctggagaaagaaccaaaaggacagaaaccaacacaaagtctgtccagcttttgggggtgtaatgggattggaagccccagtgtaccagagggacacgggagcagtgtgtgtgtgtgtgtgtgtgtgcatgcatgcacactaatgggggaattacatgatgttgtgtcgtcctgggggcaccctcactagtcagaagtctcaatagcagagtggcttgcaggtgaacagaagtctctgtggcatgaggtcagcaactaaagtagctgtctcccatggtgttctagcaaatactatcttggcattcaagatcccactcaaaagccccttcctctgtgaagtccttcctgatgccttccccactcatccatattgcaccctgctttaatgtgctcccactgcatcctgagcaggtccataacattgcacctgtcacgcttcattgcgtatgcgtattggcttatcctctctctgtctgcctgtctttctgttccatatacatctgcctcccccaggggcagaggctgtgtcttaatcacctgtgtagccccagcacctggcacagtgcctgacacccaggagatgctcaataaatggctgctatattaatacatgagcagcttaaggggatggagggcgaaggtaaatgctcttgcgtactcatcgcagaccacaatgtgcccaaatgtcttcatgtgtggtttgcagctccccaggcaactgcttacttcccttacttactgatttcaccaggaattacttgttttgtttccttaagatctgtgcatggcacagcccctcccacaagggtaaggccatatgggttgaatcttggggggtgttgggtacattgtggcaccgggaagaagccttgggagtcagtccttcagcagatgccctcatgtgaccaggatatgaggttgggtgtccttaagcaattatgtccatttcctgtgtctccttataaaatggtggctagggaactggacatcattctcaaagctatgacgttcagcaaggtatgtgatggcttttaaggagcacgggaagatcacatcctgctgtattccgggttagtttgagtgagtacatgtgtgacaaggacagcccagtgttcctgtatatgtgactgcagatatccttagctagtgtaacaatgttgaaagtgatgtgagaaggggtatgtttcccaatgtgtatccgccgggggctgtaactgtcgtggtgtcacagtgagtttatgtactggcgcctgtgtgtgtcaagatatgtgtgagcctgtgagtcgtgggtgcatgtgtcgccatcatttctctgtttgaatgtgtatgtgcatgccactgcaatgtgcgcatctctgcgattctgggtgtgggtgtagtgtgaaggggaagatgtgtgtcactgtgtctgtgggggtcctgcctctaagccacccccagcctgccctcctcccccggttctgtggctccctcccaggctgtggccctgccccttccctcttctccctcccaatccatccacgcggggggagctggtgctgcgcccccccccacccctccccatccaggccccataaatagcagcagagccggagctggagccggcgccagcggctggagcagcaagggagtcagggccagggccagagagccggagagaggagcccccgaccgagagcccaggtgagcccacccttcctccccagcccagccccagcccagcccagcttggcccagtctccataacaacatctcctggagcccgcagagagatcccagccctgcccaatcccttcaccaccacaagcccctgcctatctcggggacccccaagaactgggagacttgtggctggaaggcagagacccccctcccccagcccagaccctccctcacatatccagaaaggcacacactgtggggaggtagatacccagccagagaaaggtcccacttctgagggaggtacaggaactgtcacaccctcctggaaacggacacacgacatggggggacagacacggagggtggggcactcagacacaccaatgcacactcactcggggaagcatgacatgggatcagacagcctcaccctgagatctgtacagacacagatagatggactgaccggccatgaactctggccggcatacccctgcctgcttcagcccgaggcttggtaccactgctgggggaaggtggcatgcgtgcatcccacgggcagcatggagggagccacgactccccaaaaatcctgtcgctaagagacggtgccagtgctgccaagaagtgtgaaaacaggggaggtggggagggatgtgaggcttgtcacagttagagctcctgccaggagcctgaaggagctttcagcagagccctggtcctgcctcccagcccaccaccactccttttccatcagctagccagaaggggaatgggggtagggagtggatagggatagcccagcaggggactttccaacctgtctcctgcccactgcagactccacttctgagacccatcctcttcagaactccagaggcctctccaccccctgccccacccccttgccctagtttagctccctcgtgccaagactgagtgcagcgctggcacaacaccagtcgggaaatagcagaaggtgctgagg

SEQ ID NO: 6567 - DNA, 6000 bp, Homo sapiens; identical to SEQ ID NO: 1804

SEQ ID NO: 6568 - DNA, 6000 bp, Homo sapiens
gagacaggtgaacagaacaatagtcatagatgaatgctggaggacagttgcaggccaagctaaccacggaggctgaaagagacatctttctctacaactcacttaatctcaagttaacaccaatgaatggtttaacagataattttcttaagctttttatggaaaagttcatacctacacaaagttagacaaaatagttcaatgaagccccacatatacatcacccagcttcactaattatcaactcacagcaaatcttgcttcttctatactctatttcatcccctcctgtattatattattttgatgcaaatcttaaacaccacattatttcatctgtaaatatttcaatgttatttctaaaaggcatctctaaaaacacacactaccattatagttaaaaaaactaacacaaaattttttacatcacctaatattcactttaaaacttttaggaaaaaataggacaaaatcttgggacttagagttgacatcaaaaacatgatccataaaagaaaaaaaactgataaaatggacttcatcaaaacataaaacttttgctctgcaaaaagactctgttaagaggataaaaaaactaagaaattggaaaaaaatactagtaactgcatatctcccaaaggactcatacataaaagaactctcaaaacaagccatttagaacgtaggcaggccgggtgcgatggctcacgcctttaatcccagcactttgggaggccaaggcgggcggatcacctgacgtcaggagtttgagaccagccatgccaacatggagaaaccccatctctactaaaaagacaaaattggctgggcatggtggcgcatgcctgtaatcccagctactcgggaggctgaggcaggagaattgcttgaacccaggaggcctctgcggtgagccgagaccgcgccactgcgctccagcctgggcaacaaggcgaaactccatctcagaaaaaaaaaaaaaaaaaaagtgggcaaaagatatgaacaaatatttcatcaaagaggacagatacacagatggcaaagaagcacatgaaaagatgttcaacaccattagtcaatgcattgttcaaacatcattgcatcagagaaatgtaaataaaaaccacaatgagatatcactacgtctctatcagaatggctaaaatttaaaaagtgatcaccccaaatgctggtgagaatgaagggaaactggattactcacacatagctggtgggaatgtaaaatagtacagccactctggaaaagagtatggcagtttcttaaaaagaaactaaacatggacttactacatgactcagtaactgcagtcttgggcatttattccagagaaatgaaacttatgttcatacaaaaacctgaacatgaatgttcatagtagctttattcgtaatagccaaaaactggaagcagcttggatgttcttcaacccatggtaaacggttaaacaaattgtgatgtatccataccatggaattctattcaacaattttgaaaaacctgctatcaatacaggcgacgccttgcatggatcttaaggatagtatgctgtgtgaaaaaaagccaatctccaaaggcttgttttgagagttctttatgtattttgtgtattagtcctttgggagatatgcagttgctggtatttttttcccacgtcttggtagttttttcattctcttaacagtcttttgcagagcaaaagtttttcattttgatgaagtccattttgtcaatttttttcttttagagatcatgcttttgatgtcatctctatgtccaaagatcttgtcctttttctaaaagttttatactgaatatttggtgatataaaaaatttcaggccgggtgcagtggctcatgcctgtaatcccaatactttgggaggctgaggcgggtggatcacctgaggtcaggagtttgagaccagcctggccaacacggtgaaaccctatctctactcaaaatacaaaatcagctgggcgtggtggcacatgcctgtaatcccagctactcaggaggctgaggcaggagaatcccttcaacctaggagacagaggttgcagtgagccaagatcatgccactgtactccagcctgggtgacaaagcgagacttcgtgttaaaaaaaaaaaaaaatttagattcacagttgccaagagttaggaagaatggagaggaaggtgtgaatataaagagataggtaacacaacagataaccttgtggcaatagaatatttttataccacccttttttttttttttaagagagtcttgctctgttgtccaggcttcagcgcggcggtgtaatcacaggtcaccacaccttcaacctcctgggctcaagcgatcctcctgcctcagccccacaagtggctgggactacaggagcaagccaccacacctggctaattattttttaatttttttgtagagcaggggttttgccgtctccctttgttgcccaggctggtctccaactctgaggctcaacctatcctcccacctcggcctcccaaagtgctgagattataggcatgagccagcatgcctggccacattttcatatcttaattgaggtggtagttacacaaattaatacatatgattaaactgcatagaactaaacacacacacacacacgaatatatgtaaaactgatgaaagctgaacaatgtccgtggattttgccaatatcaatttcctagttttgatattgtactatagttatataagatgttttcattggggtaaatggggtgaagggtacatgggatctctttgtactgtttatttatttttattttttattttgtagagaagggatcttatattttgcccaggctggtctcaaacttctgggctcaagtgatcctcctgcctcagcctcccaaagcactgggattacaggcctgagtcaccacgcttggcctgtactatttttgcaatttccaatggatctataattacttcaaaataaaagtataggccaggcacggtggctcacacctgtaatctcagcactttgggtggctgaagagggaggttcacttgaggccaggggttcgagaccaccctgggcaacgtctctacaaaaaaataggaaaataattagctgcctgtggtcccagctcctggaggacaggaagcattggggaggggggctgaggagggaggatcgcttgagcccaggagggtggaggctgcagtgagctatgattgtgccactgcactccagccttggcaacacagtgagaccctgactccaaaaattttttaaaaaaacattttaagtataaacaaaactttcactagccctacttttctttccttaagaaaagcttcccaaaagaactgtccacatgccccataacaaatcacaatcgctattactggtatcccactctactccccctatccaccaacacgcagcagccagagtcaacttttagaacatcaacatttaattattagcctcttctttttttcttttcttttctttttttttttttttttttttttgcgagacagagtcttgctctgtcgcccaggctggagtgcaatggtgcgatctcagcttactgcaatctccgcctcccaggttcaagcgattctcctaaggctccggagtagttgggattacaggcgcccaccaccacgccaggctaatttttttgtatttttagtagagacggggtttcaccatgttggttaggctggtctccaacttctgacctcaggcgatccgcccgcctcggcctcctaaagcgtagcctcttcttaaaacccttttaaatagcttcccgtggctcttagaataaaagtcaacgtgtggttaaaataaactaaaaaccttgctgtgatgtagtccttctgggtcattccacaccatatgtcttccactaaacttcagtcacactcatatggcccaccttctagtcgtcaaaatagccaaaacctctccaagccttacagccttcacacaaactgtttcttctacagaggacagagaaagacaatggtttcgaatgtgacgtccaaactataaatcacaggacactgaattctgcgggctttcattagcataagagctgcctccgacgggggcaacactatgcggggtgtgccaggaactgatttaagactgtattcagatcttccaagcaacgccaaagactccagcttataaagagcatatttgattgcttatactgtgtgctaggtccttttatccttcaaatgaccacctacaggagagactaaggtccaattcacaactgagcctttaaggaggttaagtaactagcccagagttcaacagaaagtggacgggttgttcaaagccagagctactcccgacctctactctatacactgcctttcctccggcccgtaaatacaacgaatgaacctgcaggttggtagctcctgggatccgaggttggagtgccacaggaccccaacctgctctcaccccgggacagggaaatacgaacaggggcacaggtccaccaccaggtgcctccgcgaggggcagcagcgcaggcggcggggaggaccagcggccactcacctggtgctggcgctgcggctacctccacacagcggtcttggcctcccagacgcgaacccgcacgccccaggggagccaccggcgaaaagcccgcgggcccgtccgcaggcaccaaccaaataacgcagcgctggcaccatcccctacgcacgctcccctccctcagcgctcagaagaagccacttgaccctccacggccgaggacccgcgctctttagccccgcccctcacgcgggggccaatgaagtggcgcgccttcgccccatgtgggagaggctgcggtggccaataggcgcgcgcgtcggagggcgaagggccggccagggtgccgcagacgcggggacgctggctcgctccctccctccctccctccgacgctgtgagtagagaagctaggccccgagccgggcgggactagggtggtggttgtgttctgccctcgcccgtcgccaacgctgggctgactgaaaacctggccctttgggtcgcgcgtcttcgaccttcaccgccatgcggacatggggccgtgggagaaactctgggcgggattacggtgaaaattcttgtttgggcgggccctgcggcttctttcttccggctcgccctcggccccgcccccgccccgcccccgctccagctccagccgggtcctcgctcggccccgcacgcggcccgcggtagacggagggcctgggcacccaccgtctccatcccggccccagcccagtcgagcgtccactagaagggcgctccctgtccggccctaatcctcgctcctcacggaggctctttgtcacagcgaagactgacagcccgcagtcttctggacttcttttatggggctcctggcggtgctattcattcagtcattgattcgtcttgtaaatatggagcgcctgctctgtactcgacccggcactgggtaccggaagaaccagacagctcggtttttgccaccatttataagtctgtgtccttttcttgagtactgaaccgagatacagttttaaatgtgctgtgcggtctctgagcagcgactcacctgtgcaggtcacttcacctgattccctttatgtaaaaatgagggcgatgggctgtgtaatctctaaaggaccttctaactctttaaaattgtcactgtgccggtgttgctaacactcattctgtatgcttgatggcagtttttaatttttagggttaggacagctgaacataacaaatagaattatacagatttattaccagaaggacttcgtgtgcctctaagaatcttggttccagtctttggtcaggtagctccaggaaatcacttcacctctttgcctcagaccctcctcagtgaactaggaatgatagcagtgtctccctagtcttagggccgttgagcggattacacgagataaggtcag

SEQ ID NO: 6569 - DNA, 6000 bp, Homo sapiens
tactgggtggtggggagggaagcttctggccatgcttgggcattcagaccaaccatcattaatgttaatagaggaaatgcagcaacgtcaaaagcaaggcaggttggttaattagatctggggcccgatgacctccctttcccactgctacagcccttttgacttcccccagcaggaagcgctgtctgtgcggctgagtctgggccacttgcttaattgcatttctggcagggaaggagaggagggatggagaagctctgctcgctgcttccacctcaccgtgtgtcctcccctcccctcccttcctctcctccccacaggcggaattgctttcttctgagccgggtgggctctcctgcagggagaatgcaggggtctgtgcttggctcttagcaaagcaggtggcccacagtgacctccaggaggtggctgattttcctttgtgccttcttatttctcagtaggaacttggaagggaagagctctgaaggagccagaggggcagccaccttgcatgagggtgaggaaggagaagcccagccagcctctacccatccctccctcccaattaggctgcactggggccgaacgcttccctgggctcccactgccttctaaggagccaaggagaattccctgcccactttctgttcctccatgcccaaactggcagatgcttctctgggagcaaggccacatgggctgatgcagctttgagtgctcaggttctgttttctggaagttgctggagaagggctgtcagggtgcttctatgaatatgggcttcagctgtagcacttggcagaaacgtgatgtgtcccacaaactgctggtggaggaagaagatgttcgtcagccaattcaacctccagccagcttcttgagcctatttggtttaaaaaaaaaaagtcttctaatcagaagccactgattttataataaataacacttgttttgaatgccttgttgtccttgtacttaattgaatccgacttgccctctgctcccagaaaggcctccctgagaagaatgttttgagtgcaggaaccaccccgtgtgtcatgtctgaggctgatctaattccagcagaagacctgggctgggcaggtgagcctgattactccaggaggcatttggatctccccatgtgtacagttacttgagtaatgttggtcgtcattttggtatatttaaactgattccaaaataagtaggaagctggacctctgatttgtcctcttttaacctgttcacatggcatagaaaggagtgcaagaagaagttgtccccttcccagacagccgagtatcccagtgctgtagcaacttgccattctgcctaacagaggtccccatcttgacaggtgtctcctgttatcaggagtgatgcttaggagctgaaggcagcaggagctgacctgagtgttggacagaggatgggggaggggagtagcactgtgctgtggaactggggggcttctgggctgcctagccaccctctggtaggggctggtggggagagaggggcatgtggatcttcaggaggtggaacatgcctacgacaggcagtttaggaaggggccaagtcactcttccttgagtggcacagcttagtttacaaagtctcaacacatctctgacatttaatcctcataaaggcccagtgaagtcaatgatgtttttgttcccattctacccatgagagattaaatgacttgtcttaaggtcccacaacaagtaaatagtagagccaggactcagtgccaagtttgggtttttctgcctctctagtcttgtcctgggactagaggcaccttcccagaacagctgcagccctagataccctggggagaaggcctgagcactcagcccgaggtccctgacgcagcaccttcccgtgggccttctgcttaatgcatcagcagccgctcatctagggcccaggttttcctggctcccccaggtgcacccagatcagtgtgtgctggtagatgtttaacaacaggtgttctgggaggaaaaactggtgtgtatagcatttgccaatttccatggtgtaaatattcccaacatgttcttttttaagctaccaacttgatgtcactgaatgagaagttggaaagagatgcatacagttggttcttgaaagccatatgaaagctggctccagcacaccgctgaaccagacccagtgaccatggcttggtctgaattatggctggggctcttggccacagcccattaaagcaagggaggcatggaggcctacaggatgggccagagagacctgaggtcaaatcctggccccaccgcttattacctatgtgagcttgggctagttacttaacctctttgcctccatttcctcagctgtaaaacgagggtatgataaatagcacctacttcgtagttattgtgaggatgaaaagaggaaatgaagtaaggtgcccggaacactgtctagacataaatgccagctctgtattattaatgatacatgaacctcaatgaccagcactggctctgggacagtacttgaattctcctctaggttcttacctcctgggcggatgacccacagggaggagactcctgtgacttttactgagcccctcaaatgtgggcttggacccttggtctactgatgggaatacatcactctcatcgcttaggcccatccagattctcaggcctttcttgaagggagcagggatagagtgcacttaccttggcttatcttagcacatatctcctggctctaggaagacaaagagtgaagccatggtttgagtactgactctacttactagctagggccgttaactcccactacctcatcagactccagaccctggccagaggagagaggaagcaagatgggtcctaagtatagattgctggcaagaagcgtgagctgggtagagtggggtacctgagaccagccaggtggcctgcacagagcactgagcatctgggcactgaatagtgaaggtcaccaatgacacgtgtccttgccctgtgacctgctgcacctggctgcaggtccacgggaccccaagctggaagtttagtcacgtcttgttccttcagccccaatcactttgtgttcttgcttggagacctcttggaccctaggacaccagcttttccaggctgccttatagccttgctctcctgctccagcccagagatttgtgaggaaatgggaaatagaataggggttaccacaaactcctgagtccttggaagagggagaacagctagatgatttcctggggcatggctaggagtaggaaagaaaagttctgctgaggcactcagttctgattcagggccagaaggagaaattttaaagaccaggactcgccactccatgtctagcacagggctgggcatggagccccagctgttcataaccaggggctcaagaacacccaccttctacccatggaactaaaggaggtggactaaaaggtcccagagacctcaccacccaacccctttgctgcacaactgaggaaacagggccagagaggcgtggacagacagaggagataggctcggagacccctgagggaataatgagagagaaataaaggtgaaaacgggcttgctctcccaaacctgggccaccagcactgggctggggcttgaggaactttctgcttgaaagagaaaagtttagttgtaattggcaggtggccaattgcacaccctgagtggggagcatggattctattatctgaacttctattgaaaaaattaaacagtacttccgttaaaaaaaaaaaaaaaaggccgggcgcagtggttcacgcctgtaatccccagcactttgggaggccgaggtgggcggatcatgaggtcaggagatcgagaccatcctgtctaacacggtgaaaccccgtctctactcaaaatacaaaaaatcagcctggcgtggtggcgggcgcctgtagtcccagctactcgggaggctgaggcaggagaatggcgtgaacccgggaggcggagcttgcagtgagccgagatcacgctattgcactccagcctgggcgacagagtgagactccgtctcaaacaaacaaacaaaaagatgaaaaatcatggaagtggggaaggcccagggagggaagaggtgaaaaattaaaattaaaattaaaattaaatcatggaacggtagaatgttagagctgaactccctcaagattccaccctggccaagcagagctgggattagaactggatctcacggctttctaaagatggagtctcaaaaaaacccaggcctggctgggaatggctgtggtcttggccctgtccctacggctgaaagccctggtggcccccaacgtgtgctggtgccctagtcagaccgagaactaggcccctaggccgcctccccaggcctgacctgcaggccaggtgggtggcaaactcaaatgcctctggcaatgcgtgagttgaggggcctgtggagagggggcgcatgcagcgcctacctgaggcgaccaaattcaacacagtgccctcggggctcgggaggagaaactgaggcccagagagcctccgcgatgtcagttacgttctgcaggccgggcctttcccaggccaccatagcggctggcggagggagcgcgcgccttgctggcctggagggggcgggggccgtggcggctttaaagcgcccagcccaggcgtcgcggggtggggcggctctggcggctgcggggcgcagggcgcagcggccaagcggggtccccggaagcacagctggggtgtctccacctacgactggccgcgcgccttttctctcccgcgccagggaaggagcggctgcggcccccgccgggcggaggcacggggggcgtacgaggggcggaggggaccgcgtcgcggaggagatggcgcggcacgtgcggtgacggcacccgagccctgagggtcccagccccgcgctccgcgtccccgggacagcatggagcgcccggagcccgagctgatccggcagagctggcgggcagtgagccgcagcccgctggagcacggcaccgtcctgtttgccaggtgagggctacacgagcgcccggggatgcgggtggaggctgcctcggcgggaaaggggtcacgcggcaggaccggccccgaaggagggaaaactggccgctgccggggcgctggggcgcctgccagatgtgcgccagaggagcggggcgcggcgacgggtggcacagcccctctgcctctctctcgaccgtgggcgcctgttgccaaccagcgccgcacaccactctcccagcggggctcaccgggccgggcgggatcccctcccgcggatctccccacatctgggcgggtggacctccgtccctgcgcggcgcctccaccccgccttgtgcctcctgcgtcttccttaggtagcgactgcaggggtgcaccccgctgccggtatcagggtactggggtgccccgagagccggggaagggagatgtgtggggcgagctcctgcgcccgcgtgtgagcggtctggctccaggtgtgtggatccctgacaaccaacaagacaaacctttccgaggaaagagccagagagcagccggggaaggggtgacagatgcgggagcctcaccgcaggggagaggggtggggggtgtgcaggccgggtgggaagggaaggccagtctccaacctcagctcgcagttttggtaacccttccgctatcaccaaccgggcactgcttccctcaccgtggtgttacctatccttggcacccttggacagtccagaacttctacccaggcttccgcaaaaccacccccaagacaaaaggggaaaacattcagttacccggtgagacctcccaaatgccgaggagggcctctgcttctgcctccggactccccccagctcacttttttctcaggcacccgctgtggctgcactacatccaagctgtgtgaccttaggcgagttctagcctccccgggcttctgttttct

SEQ ID NO: 6570 - DNA, 6000 bp, Homo sapiens
ttctttactgtaaaatgaggggttataaaaatacttacctctagagctctgtttcccaaacaatggtgacttgattataacctttgcgactgatttttacctgaattattacttacatagtatttttatttaaattaactcacctttttttaacttaggctagacctagacattatctttaaaatcgcaggctttttgaatgagtcgtgtttttttctactacatgtaaaatacatatgtaactataaagatggaagtatactcatttgtgtaagccatttcttgtgcccctggggaggtatgggtgccactctttgggaaacagttttaagtgtctagggactaatgacatgagaatgacatggagatgctagagcagaagccctttgtcagctgcagtcctgccacagaggagactttcttacaacctgacccactgttctttcagggcccaggcccagaccaggagggcagcacccaggcctggcagaaacggcgctcttcagacgacgcaggtaagaacagtcacattcaaagcccttttggacccctctctcaggggtcaaatttaccttttccctttctcctctctttctcatcccctctctctactccagggcctggatcctggaagcccccaccaccgccccaaagcaccaaaccaagcttcagcgccatgcgcagagcagaggccacatggcacataggtatggaaagcctcttttcaggcagcagtactgaaagcccagggtgtgtccaaagaaacagaagcccatggcccctgtgctggggaatttatggccaaggtggggcagtgagaagtcaacacagtgaaaatgtttaaggatatttacaaagctatatccaaaagagacaaacaacccaatccaaagaaagcttctacagaacaaaagcggcttctccagtgttggcaaacaggagcgatgctttgtggatggctctggcgaattctccagggcaggtgcagcctctggtcaccattggcacagtggcagcctctgtagacaaggctcctctctgcaccttgctgggaagagggtgggcaagtcaaactgccagcaagtaccagctgtgccaggcccacctcagattccagcctcctccagaagtcgtttatcaactcaccctcagctcacgcagaaaggtgccccaaacatgggcaagagctcgcctcggaggtcagaaacctgcagtattagtccttctcagccacccgcgaccttaaacaagtcatttactttctggccccatgaccggaggagtaaaagggaggggattatcccaggcatgacacttcctttctgctggcttcagagcaccttccgcttagggagccactaaagaaaagctggtcagctcagcattcgctcagtccagcagttgccaaaggcctggaccatgaccctccagcaatattgacatagacaaaatctctctgtagatggagacaccccctcagcctctttcactcccaccaccaggctagggcgtaagggctggaaagagctaagagctgagcgggctggtctggcttgagccacatgctccccactgtcctatcccacccattctgcatctgcccctctctcccctgtagtgcagaatcaggctagcctgagacttggagtgcctgtgtccttgcctcctcctccaaggccaacccagcactgggggcatctttgctgattttttccatcccatacacaggctaattaaagcgccccaaagtagggctccatctttcatttaggaaaccgcaatagtcagttgccccactgcacacacacctcacagatccacatgcagacaacactttccagtgtcagagccacaggctcatgttgcttaaaggccactggggcggaggatgagtgtgccagggcacccctccatctaaatcagactttcagacagagttctgggaatgccaggctgcagccttggcagagcccccagggcactgcagcctggatgggcagcatgcctgtggacccagcaggccctgggccctgccccagcaggaaaggggttgggcactgctctgcaagagggacagctaggccagagtcccctccagaggtgatggcctcaggatgatcctgggaaacaagggctaaggagcgtggatgtagaaaggcatatgaaagaccgggtgcggtggctcatgcctgtaatcccaacactttgggagaccgaggtaggtggatcactaggtcaagagatcgagacaatcctggccaacacggtgaaaccctgtctctactaaaaatacaaaaattagctgggcgtggtggcacgcacctgtagtcccagttgttcgggaggctgagacaggagaatcgctcaaacccgagaggtggaggttgcagtgagccaagattgcaccactgtactccagcctgggtgacagagcaaaactccatctccaaaaaaaaaaaaagaaagaaagaaagaaaagaaaaaaaaaaggcacatgaaaggcagagacataggagcaagtgggcttggagggagaaagtcctggcctccagggcttcagtggagagaggagacagggacaggagctatgcaagaatgccttttcctgcagcttctcctctctctcatccccagctgaagagagtgcccccaaccacagctgccagagtcccagcccagcctcccaagatggggaagaggagaaggaggggaccctcttcccagagaggacacttccagctaggaatgccaaggtgagagctggcaagatgggtgggggaggcactttgatgaggcaaagggactaactgacccagcatcttccttcctctgccagctacaggaccccgctctagctccatggcctcccaagccagtggctgtgcccaggggccgccagcctccccaggagccaggggtcagggaggaggctgaggctggagatgcagctccaggagtcaacaaaccccggctgaggctgagctcacagcaagaccaagaggagcccgaagtccaaggtctgccaccctggctgagtggggggctcagggcacctctaggactttgctgtccacatcaggtcctcttccagagcatggaatgagtgacaaccaggagtcacagcctggatgagcatcccagcatgagccccactcctgtgttaggcctgccttgattgttatttcagggccccctgatccaggccggcggactgcccccctgaagcccaagaggacacggcgggcacagtcctgtgacaagctggaacctgatagaagacggcctcctgaccccacaggtgctggtggtgagagggcaggtccccccttcccacctatctgtccaacatgacaccccccgaagccccaacaccaggtggctggctgtccctgcccaggaaacagggctccctggatttgtccccagcaggaaccagtgagccaggaacagactgacaactgccacaacaccctcctcagccctcgacatgtgcctcgcaaggactcagacccctatccacccccagtccccagggccccctgccagcccctgtcctacaggggcaagacggcaggaccaggcatgggggagctggaggcagggactagaacagagggagccacctggagagacggaggctgtcagtgcctgcctcgatacctctctctgcagagagcttctgggtgggggcttatctcctcccccaggagggtggatctctgtccctctatccccagggactctctcccctcttgtatagaataaaaaaacaaaatcatcgcctgcctcgagtctctgctatcttccccattcactgcctccacaatctgctctcttcccacaaaccctcagagcttggccacagtggagaaaaatgagaaacattccacagggatagacttggggttctgagaggagcaggagaaaaaaacagagaactgccgagggaaggggactgataagtccccaagccaagatgggtgttatgcccagggtcagggctgagcttcctggagaaagaaccaaaaggacagaaaccaacacaaagtctgtccagcttttgggggtgtaatgggattggaagccccagtgtaccagagggacacgggagcagtgtgtgtgtgtgtgtgtgtgtgcatgcatgcacactaatgggggaattacatgatgttgtgtcgtcctgggggcaccctcactagtcagaagtctcaatagcagagtggcttgcaggtgaacagaagtctctgtggcatgaggtcagcaactaaagtagctgtctcccatggtgttctagcaaatactatcttggcattcaagatcccactcaaaagccccttcctctgtgaagtccttcctgatgccttccccactcatccatattgcaccctgctttaatgtgctcccactgcatcctgagcaggtccataacattgcacctgtcacgcttcattgcgtatgcgtattggcttatcctctctctgtctgcctgtctttctgttccatatacatctgcctcccccaggggcagaggctgtgtcttaatcacctgtgtagccccagcacctggcacagtgcctgacacccaggagatgctcaataaatggctgctatattaatacatgagcagcttaaggggatggagggcgaaggtaaatgctcttgcgtactcatcgcagaccacaatgtgcccaaatgtcttcatgtgtggtttgcagctccccaggcaactgcttacttcccttacttactgatttcaccaggaattacttgttttgtttccttaagatctgtgcatggcacagcccctcccacaagggtaaggccatatgggttgaatcttggggggtgttgggtacattgtggcaccgggaagaagccttgggagtcagtccttcagcagatgccctcatgtgaccaggatatgaggttgggtgtccttaagcaattatgtccatttcctgtgtctccttataaaatggtggctagggaactggacatcattctcaaagctatgacgttcagcaaggtatgtgatggcttttaaggagcacgggaagatcacatcctgctgtattccgggttagtttgagtgagtacatgtgtgacaaggacagcccagtgttcctgtatatgtgactgcagatatccttagctagtgtaacaatgttgaaagtgatgtgagaaggggtatgtttcccaatgtgtatccgccgggggctgtaactgtcgtggtgtcacagtgagtttatgtactggcgcctgtgtgtgtcaagatatgtgtgagcctgtgagtcgtgggtgcatgtgtcgccatcatttctctgtttgaatgtgtatgtgcatgccactgcaatgtgcgcatctctgcgattctgggtgtgggtgtagtgtgaaggggaagatgtgtgtcactgtgtctgtgggggtcctgcctctaagccacccccagcctgccctcctcccccggttctgtggctccctcccaggctgtggccctgccccttccctcttctccctcccaatccatccacgcggggggagctggtgctgcgcccccccccacccctccccatccaggccccataaatagcagcagagccggagctggagccggcgccagcggctggagcagcaagggagtcagggccagggccagagagccggagagaggagcccccgaccgagagcccaggtgagcccacccttcctccccagcccagccccagcccagcccagcttggcccagtctccataacaacatctcctggagcccgcagagagatcccagccctgcccaatcccttcaccaccacaagcccctgcctatctcggggacccccaagaactgggagacttgtggctggaaggcagagacccccctcccccagcccagaccctccctcacatatccagaaaggcacacactgtggggaggtagatacccagccagagaaaggtcccacttctgagggaggtacaggaactgtcacaccctcctgg

SEQ ID NO: 6571 - DNA, 6000 bp, Homo sapiens; identical to SEQ ID NO: 1806

SEQ ID NO: 6572 - DNA, 6000 bp, Homo sapiens
gttcattctcatctccccatttggtcaccataaaaattaaattcctaatagaccagagtttcaaatggagaacttcttggtttgctgggttatgcaccctgctgagacaggctgggagaatcaccattgtcttcgatgatggaagattctttgctctccccacgagcaaagcattccttgacacagagccaaaatgatgaagaaaataaagttggtcccataataacatttaggctgcaggaaagaagctcaacaaaaacaagttatcccctggtactcccaaactttgttttaatttcccacagtggcacagaaagtctggccacaagttacctatcatcttaatttctccttcttagagggtttgtgtttggtttttgtccttaatgagacatatttgccaaagaggcattcaaaaggcattttttactcttgcggaagagtaattaggtcggtacctctttccctgccagcattagccgctctaaagagaaccctgcccagtatttaatgcccaaacacaagaagcatcatttccactaattggtcttgaagttccgatgttcccaaagggtccctttattttgcaaggatcagaaaggacatacgtaaaatgtgatattgtcatcgctgacttttatctctctcatctgcactattacagtggtcctctcttatgtttttgcaagcaacatcaacacaacaccaacaaaggaggtaaataaaggatttgcatttttacaacagaagacatctccgggccaagttcaaatgttggaatggaaatctttataaatatgaacatgaacataaacatatagcatatataaaaatttgattcccttgatgatgttcagtgttcagtgcatggggaaaaaggaaatgctgctttagcatgtggactgtgaaatgcagggcaagggggagaaaagaaccattcatcaagtagaagcagaaaatacagcatatactactaaccttgtttcttgttttgggattttatttctttttcttttccacagcctgagaaagccttgtggacaatatatcacataatctcataacagaaactaaagcaaattataaaaatgaagggtgggtgtgtggtagcagaattttcacacatactacttgctatccaaagccctgaaaatggctttattaactatcaggaagtttcaaattctttgacataatgaccaggctacatcaatgtccttagaaacatggccaaactatcattaagaagagatttaaccatttatattcagattggccaaataaatcagagttgaagaataggctacgtactccttcctctgagctcaattcccttttagctattctctttttaatttgtaccttgaaaatgtagctctaagctctatcattccccaatgttttatccaagtgatggacaagctctggctgtggcctgctttgtgttcttttgggactgtttctctcttaaaagggccattttccattgtggaaactagtgtcaaaggcttgaggtgaatgaagaggaggaggagaatgttaaagagaccctttcaaaaccaaaattatatgttcaaatgaatatgttttctgtacctctgcaatattaaccgtgcagaagctaaactgcctgtcagcatctatactgtgtgtttacttttacacttcatttaggtaagagccaggctcccagacagagcaatttgcttattggttgcatgtttttagtctctgagcgccagcacaaggatatactgttcagatgcaatgacgctgactaaagaaacttaaataacaaacaccttttattcacctcagggtctctcaccagtgtctatagactttcctttcaatcaaaattgtacacagaatccatctcttactaaactcacattatctttaaaggcttctccataaagttaattcaaatccctttcaaccttttaagaaagggtttatttaaaaaaaaaagaaaagaaaatattttgttctttctttatttctgtgttgccccttgtggaggcaaaacacagggataatacttttactccactttctctacatatctttccaggcatctgacatgcagcaacaaggagaattaataacagtaaatcacatgtgtagttgtatcacatgagcacacacccctctcatcctggaaaacttcacttctggggatgggtagcctcaaaataatgcaagtcagggttatgaaatagtgtgatgccatctcaaacagaacctcttacaacgtctctggaaatgactacacccaaagacagtggcacaaatgacaagagcattcagagaagtgattcaacctggttgagagattctgagtgaccctcaaatgccaccacagaaaccaccacccttgccatacttgaagacagaaaagagaccatcattcagttgcagctgtgttcataatgtttccatttatcacacacccagtccagtcttgtttctggatatgtgggtcctggggttgcttctgcacatggtagctattacataaatcatcaaaagcaaacataataacatcagtcgtgaacttggtcactaatcaaatcagtaggcagggacaaagaaatacagaataggaatatacaaaccatatgcaaaaagaaaaaacaaatcactcatccttcccaatttcctagaataggaataacaacatattgcaacataatggaacactatacattggtgaaaaaaacaataaactttattgaagacgtatttgtttgcttttccattttatgttcaataagctgcttaatgggagaaacaacctcacttaatatttgtgggtaacattacagcccccattgtttatatgagagatgactgtttttcatgtttttcttaatgaaacatgacatttatataagaaatatatgtatataagtaaaattcttccaataagtttttttttttttactttataggcaaaaggcaattgtccttccaaaaagtaagagtttaatatactgagatcaaatcactgatatttccatggtatctgctaacacgtataaaatatgatgttgaagagggaacttcctaattaataatatgtctgatatacttgtgtactcctccacctgcctccaaattgccttccactaaaacaaaccattaaaaacttcccattcaatgtatacttttgtggaaatgaaataatcaattcaatatctacttttctagatctcccgtcctcactgacatgcacaatataaatgagtttttactgttagaactttgagcaccaattcatattctcataaaagaatttccatctactaataagagctcttactattcacatttttaacaacaataaacacaaaccctctttgggttactatcaataataaagacgtgcattgtggtaaaatttccctagttcacaacagatattttcttcttgaacatctgattttcagaagaacaatcctgtcctgaattctttgtaattttacaagttacttcttctcttttcttggcgcatggttttagttttctagtgtttatttatggaggatgcattcccttgcgtctctattatttcgagttccccgtctctggttctaaggtgctgcctgcctaaaacacaccacttcactgaacacctggcttctatattcctctaaaatacagatgtacagttgctttttctggcatcttgggcaaggtcccacaacacttttagggaaaccaagattgtctattttgataactacttttgccaaaatagttcattcttctcaagcctggttgagggggtggaggggacctttagaagtcatatgggcatagcaggtgggggaaaactgacaaaagaccagggcgaaaatcatcctctgtgcccctgaagatcttagttgaaaatgctctactaacatctctcaccagcaaaaagcctggaacacagtatttttcacttagaaactaagatcactacctctgattttgagagagcagcccctgggcactacctgagcaggtaagggagaccactgctctaatgctcataacagctctgagatttaatgaatcacagacccatcatctctttctagggcaacgtattttatttttgagaaacaaagtaaaggaggcttcccttacaaatgctggatttctgacagctagttttcagacttttctttcgcaagttgatatctagtaactcaggatcactgcctgaaaatcgcttccaaagggttcaaatttgaatcaatgtagaggaggtggcacacagctgcttgctttcattaactcttacctctaccagaaaccaagcagctatgatgcccaatcacaatttctatgaccactttcttatcttgtcaactctctgagagttctgagtagcatttctcatttcttgcttttcagtacccacccctcgaacatacttcctcagtgtacctcagcctcccatcaagcaaaaaatcaaaattccagtttatggcaagagcagaataaatgcagcagtctcctcttctccatcattttctgacttttcccaagttatcgtaccagcacaatgccttctactcccaaatcacagcaagatattaataacccttagtagaaagattccttattaggtcacacagagtcattatggcttaatagctgtcaccctcccaagctaacctgtgcaacaggtgtggaaagtaaacttagaggctcacttggcaaccccacaaatagggcttcacagctctccccccaatgctcccaatggcctctggtccccagcatatgagcccctgcccctgtagacctagggagaagcccttctcagctcagctcacctgtttgtaggcatcgaggaggaagctcttccagacgcagcgcagtccctctgaggtcagcatgcgccgccactctccgcgagtggacttggagcggctcaacagcagcaccacgtgcttgagcagaatgaccgagtcatagagagccaggaagaggcagttggagaaaaaaactggcagaatttgcagtgtgatcagcaagtctacgctgaggatgcccatcttctctgcctcctgagtcagttcccttgtgcgctctggttccccttcaccctcttatttaaaaggggggtggtgataaagggggtgggggaggtaagggggaaggttgggggttgggggagaaggggaaaaaaaactaaattaaaaggaagcccaagttgtctcctctttcaaagaagcagaaatggcaagactaagtccagtctctccagcccagcagttggagtgtgcccatcaattcattcaattcggagctgctgcctttttttttttttttttttttttttcaggatttaagatgttaaaaaaaaaaaaaaaaaaaaaaaaaaaaagctggcgtactcgtccctaatccagttacctctgtcagagtccgttaaagacaggcagttctactttcatttccaagcacctatgagactgtggcagagattttaaaattttctttagcctttcattgtctctatgctctttaaacgtagcctgtttctttcttgaattgccagagttttttttttttttaaatgtgctttaagggtagttttttttttttctttctttactccgttttacacacactttctgtgcttctctttctcccagtctcactctctcccttccccaggagcgactgactcctcttttttctcactctctgtctttcccttcttgctatctgtctgtggtgcaaagtgcctctctctgcagcccagtgagtctccctgacgccttttatacattccctggctaattgctgcaatagagaagtgaaagcctaatcttggtaaagatcttgacgtcattgagaaagagggctttactttggccaggattgcagtgaatagaaaagcaaaactcgacaactttttttttttagaaggggttggggagagacagtggaattttgctttgtgatttaaagagagaaaaaaactaatacccttga

SEQ ID NO: 6573 - DNA, 6000 bp, Homo sapiens
tctggggacagggcctccgctcaggcctgtggtcttgaggacagggactccgctcaggcctgtggtctggggacagtgacctcactcagatctggggtctggggacagggaccctgcttaggcctcaggtctgcagacagggaccctgctcagtcctgggacctggggacagggacccagctcaggcctggggcctgaggataggggccccactcaggcctggggtctagggacagggactccaatcaggcctagggtctggggacagggaccccgctcaggcctggggtctggggatagcgactgtggctggggcctgggattgcagatccttgtcttcctgcccccactccaccaccagcagcagctcaggccgaagcctggctccacaagcaccccttcactggcctagcttgctcccctcataaagacaccatggagcagcccaggagggcccctgagagcagcagtcccctcccacccaggcctgccgcctgctccccaacccgcccctccacctcccagccttcctatcgtgctgcggctttgacccttcagcccaccctcagggaccagcgacaaacccccagcccactctccaatcctccctggccaagggcagtcctccctggctccaatggtccccgtgttgcctgggcactgaatgccccaccctgcccccataccaaagctttgaaccagacccccaatgtacaaggcggacatgccctgagttctccccagggctctgggccccagggccatggcaggaggaacagaccgatgcccacccaacacaggaacccagatgcccacattccataccagaccagccagctctcctggtccctactgggaaggtgtgggaaggaggggggtggtccccagtgtgcagacaggatcccctgaaggtagggtggggaggccagggccctgtcatccccagcccaagctcagaaaaaacaggaagcagagtggtgctgaacctcacacctgccacgagcagcttaggtagctccaggcacagacctcagcctggcccaccttgagccctagggcggctggatgcagggggtgggctctgtaaaaaccttcctccctagggggcaaaggagagggtagggaaggctgggaaggggaggaactggacaggtctgggagccgggctgggggcacaagcagagcccgagctgggagtccagcagccccatctgacttcgtgagacctgcaatgaaaaagcggcagtgtgcccctttcacaggtgagaaaagctcagcccttctgatggcccaggacctcaggcctcctgagctgatagacgcagggtcagccccaggcccacctcctgtatctacagggccttcacccatcccgttctcctcataagcccagatctgtcacggggaccatgctccagccacaccaccccgcacagctgccctggagcccagcacacacatgccaagacagaacaagaaagaccctcgctggcaggcaggctcctgggctcctggctccagagatgggccagccaggcaggcacgacttccagctgcacctctgagggtggggccctggctgcccaggtcacggccaactgccaccaccctgctcctccctcagccagcaggtgtcccctgggcctgccacctaccaggccccagagcaaagctccctgctgcccccagcatgacactactcctccccaaacctccatcaccacctgccatgcctacagagcacccggggtgcgtgcacacacgcagctgggagaatgtggcctcaccctgccagctacaagccaggcaccagaaccaacccaggctgacaccggcctcctggggacgtctgggggtggagccaggagaggaggggcagccaggcagcctgctggcatgtggtccaccacctctccacattcaagaccctgggcccacccactgagggaagctgagcccgagaccagcacagatccatgactaatagcacacagaccccggccacaagaagccaggccagggggcagagggccacccagccaggcctgggtcaacagcagagaccacaaggtgggagagtcactcagggggcagggggtggagggagcgaatgcagagcccagactcccccactcctcttccacaaggccctctcattccctttactccaaggagcccaaaagccccacgggcctgggcaggatgccaccctagcctccaggctgaaacccctcctcaggtcccagggagcctgaactcggtccttgccttcccatcacagccaagtacacctcagctcaccgcacagagctggacctcagcaagccagggcagcatggccagggactgccgccgcccgagtgcaaataccagggtgctggcatcacggcacagctcccgcccggcagccaggccacatggcaggagaccagggctgcccccaaacacgcagctatgactctgccctggcccccaacccagagacaggccgcctgccccctcctggggcattcgaggaaccggctggaagcaagaggcagggaggtgagctggccccgaaacccagtgcccggactccaaggaaggcaagggcctacccggtcccatcccacacctgaccggctggcccgcggggcgaagagccagggcggacacgcgatagcccgccacattcctccaagacctccctgcccccacacccactgctgccaactcgagcagaaaacacatcctcaggtagcgatgtggggccacgctggctcaggcccaggtgcagatgacaggctgcgggccctgctcagacctgcctgctgcaccgccgtgggggcgaggggctgggcttctcacaactgcctgggccctcccatgcccgcccctgccttttccatctgggggacactttcccctctctggggcccccctggtcaagggatactcggcggggtgctcacgggttgaggacatggccagaggagactgtggccagcttccacgggtgggagctcaggaagcggtgaggatgggggcagcaggcaaggctgccagccagggctgcaaaggtacagcacaggactgggagccacacacggcaggcccaactggcgtgagctcggcagggattgccctcaactcacaatcacttcagggcccaggataccaggtgggcacactccggtgcctcctgctgactggagccacttcctggctcccagatccatctactccctgatcacaggtctgcatggtgctctcattcccgcactcacccagttccaggcccccagcacaatgaccaagcagggaaggacctctgggcaccagggcaaggccgtgctccaggcaatgaggtaaggcgcccgaggcctgggcctgcccacctaccactacccacctgccagcccactgggatgagtacctgtttcccagtgacactggacccctaccacccctcctcccagcacgcccaggccagggctcctgcctgactggccacctgccaggggagaccagacagccccgactcagcttctgcccctccagaataacaaaaccaaaaaaacccacaaacagggcagtgccacagaaggtcactgcaccaggatccactatctctgtctctgaacgatcttgggtcaccatcgggggcttctgccgacataagcgttaggcgttaggctctcccgggcctaggtcccacggcgcccgcccgtgccccccaggcatccaggaaactgcagggcaggcgcaggctggccacgggcccggggcggctcagtcagggcctgccctagaccagccccagcacgcgctgcgcacatgccaccgcggcctgcccgggaccggggcgcctcgcctcgcctccccacccagacagacacgcgcagggcgacgcaggcacacgccgcacaccgccgcgcacgcgggacgccgccgccccgcccccgccgcgaccccgctcccggtggccccggggccccggcgcgcccacgtggccaggcgcggaccaagtccccagagcacgcgccccctgccggccccgccccgcctgggcgcgcgcggctcgcacgcagacccggccgcaggtgttgggggtcgcgaagcgcgcggggccggggcgcggagagagagggaagggctggagcacgagggatggagcgcacgtaccggccaggcgaactggaaggggatgacgacgaggcccgggtcctggtcgccgccggcccgggcccgcgcccgcgctcggtcccccgcagcgcccgccggcggcaggtagaaggagttgccgcccagcacgggcgtggcgccgtggccgtagctgcagggccccgtgggcgtcaccttggcctggtactccttaaggcacacgcgcacgtacgtgtcgcactcgtcgtggccgcagccccccgcgcgcgttgtccggccgtcgccgtcacagcaggcgccgctcagcagctccccgttcacgttccgcagcgcgctcagctgcagctcgaaatagcccatgggccgcgccgcctaaaaataaggcagcgggagagcggagggaggcgcgggccggggtcggcgggccgggcgccaggggtgggggaacaggccccgccgccccgcccccacccagccgcgcccgcccggagccccagccgccgcgcgcagcctcgagggcttccgaaccacggcggccccaggcagtgcccgcccggcccctaggggcggcccggtgtgccccgtccgcgacccccgccgcccccgccgccccgctcacctgcacccagagcgccagcagcagcagcagccgccggggaaggcgcccccggccctgcgcccgcattgcccccgcgacccgcccgcccggccccgccgccgccgcccgcgcccggctcccagccgccgcgccggcctcccagcgcccgcccgccctccgagcgcccgcagaggcagcggcagcggcagaggcggcggcggcggcggcgcgggcggggtcgagcgcagcgccgcggcgcgcgggcctgggcggcgggcgtgcaggggcggcggcagctccggctcgctggcggccgcgctccggctgcccggcccggctcccacccggcggcgacggcggcggcggtgaaggcagcgggtcccggcctcggctctgcgcgcccgcgctcccggcaccgcagccaacaagttcggaacgagactgacagctcgctcgcccattcgtcacccgcgcacctgcatatgcatgagggggcggggccgcgccgcggggtggggccgggggggggtccgggggcgccccaggctttaaaggcggtggagggcgtcgcctgccagcgccccggcccggcgcgcgccccccagggcgcccgggcggcgggggcacggggcctcggggtcagcgcgggccgcgggggccccgctcacacctccgcgtgagtcggcgaggcgtgcgccggcgccgcaaagctgcctcccctcctccgcctgggctcctgccgggtgtcagaaaccgggggtggggcgccccgaggttgccgtgtggtcccctcccatcagtgcgccaccgccgcgctcctcgcagtcccagaggagatgccgcctcctactctgatcagggctcggcccccacgcggggtggcgcggccctggggccagagccgggcccagcccctactgcgcgccccccacctcctccgagaatctccccttctccgcgccgctcctaccgcctccacgccggctgcagggggcgctgcgcccctccgacgcccctgccttcccctctgcgaggcgcgctggtcaagcagccagtcaacaaatgctccagggtgcagactgctcagctcggcgctggcgtcgaggtagccaggccatgccctcaggaaatgctcaggccacattccccgtttcccgcctctcgccccccaaactcaggtctgggcttggggggcgagaggcgggaaatggggaacaaaagtcggcagtgcctgtccctgaaggctaccccgagagagg

SEQ ID NO: 6574 - DNA, 6000 bp, Homo sapiens
tagccaaaaggtggaaacaacccaaatttcaaacaagtggtgaatgcataaacaaaacttggtatatctatacaatggaacacaatttatcaacaacaacaacaaaatgaagtactgatgcatgctacaaatggattaattttgccgggcaggttggctcacacccgtaatctcagtactttgggaggcccaggtgggatgatctcttgagcccaggagttggagaccagtgtgagcataatgagatcctgtctctacaaaaaaataataaattagccaggtgtggtggtgcatgcccgtagtcccagagttactcaggaggctgaggcaggaggatctcttgagcctaggagtttgaaattatagtgagccatgatcgcaccactgcactccagcctggatagattccgtctccaaaaaaacaaaacaacaacaaaagacatggcatggtaggttccacctcgctgtctctcagatcacttgtttttggggaaaccagctgcctgtcatgagaatgctcaagccacgctatggagaggcccacatggcaaggaacctgccaacatgtgagtaagccatctcggaaggggaatcactagacccagacaagtcttcaggtgactgcagtcctggccaacaccttgacttcaacttcatgagggtccctgagttagaatcaagaagcttcctgtgttaattcacttaggattaaaaaaaagaaccaataagctaagccactcctaaattcctgacccacacaaatcatgttgtttaagccactaaggtttggaataatttgttacaccacaatacataaacttcctcgaccttctcctcaatgttaggctctctctcctaataacaggcatctaagtaaatgtcttcccagcaactcctcctcttcttagagtttagttttatccctatccatgtttacagaaattgctgccatgttacaaaaacatgatcccatcccctggctttaggtgaatgatccaaaagtggatacctcaccaaaggcaggccaaaaaagtccttccctgagatctttataactgaagctgagaaggcggcggtgtcttttcagtagtggaagctgtaggatgtaaaacttgcagtctatcaacagcatgatctttcccatgtgggaaaagtggcacagtagtggggaagaataaagccatcacatagtgacaagcagagattcaaggtggacaaaatacagacaatgctaagtttctgcttccaatggttcctgatgcaacccagttcttccagtggacagaccatacatgtcctatcatccaagcatctaaaatcgcacccagtatgtaagaggaaataaaatacttactaaataagtgggtaagataacccaatctccttccaataatatcctttttgttattgttgttgaagatttgattatttgaaagctaaaagtcctaacccattctttgctaactttatacttgaatatccctttactgttatacttaaggcagtattatctttttttttttttttttttttttttttttggagatgggagtcttgctctgttgtcaggctggcgtgcaatggcatgatctcggctcactgcaacctccgcctcctgggttcaagagaacctcctgcctcagcctcccgagtagctgggactacaggtacgtgccaccatgcccagctaattttttgtatttttagtagagatggggtttcaccaggttgtccaggatggtctccatctcttgacctcgtgatccacccgcctcagcctcccaaggcagtattatcttaattactggtttatatggcctcctcccctactactagagggcgggacattttcttagacatacattcaagaaatgtatgtttaagtgatctgttcaatcctatactctgcattcttcagcttttacagtcactgtcatccacttatcaaccacctaacatctgcaaggcactggtaatacaataaacttactagacttgctcctggattctcatgcattcagtgaatccattcaacaaatattaagtacctactatatgccaggggctgcaaataaacaaaggacatggtgtctgcctgcctgcctgccctcaaggaccttacagtctaatctgtattagactgtaatacaagtaaatggactattatagtaccgtgtgttaactgttactgaagagatccacacaggctgctgagcagccgcaaagattatggcgaatttacactctacatgagaagactggacatatacagaaaaagataacagccaggcaatgtgacataggctaaacactaaatgagtgatttgtttcccaaattacactggattaattcacacacttcaagataagatactattatggaatgatttttatatatacattcaaccaacatttcctaagggcccactatatgccaagcaacccgcttagcacttttccaacagtgtctcattcaattctcacattttatagattaaagatgtgaatctgaaagggtgaagtgacttgccgatgtctacatattaagctgcagagacgggatttagaatcatgtcttccaactccatgtcctttcatgggacgttttttgctttttcattcatcctatggaatacaataaagtgttctgcacaaatgagccaccaccaactgccagcctgatataactagatgcttatctacattctgagacgggaccatatcagatcaaattactctggtgcctattatagatcatgtgctgaaagaagtgcagttggctgaagatgagcaactctttcaagttatattttaacagtgtttttgaccactatatccggtcagttgttccagtgttcagtaataaatcaaaatgattgttcgtttcctttgacagttaacagtactaatgaattcagtataatctcaccatccatcagaaaaatttctaaaatgcgaacttgaagctgatgattcacacagttagaagagagggggaaataaagcagtactcattgttttctacaaaactagcattgtttgcaaaatccagaaaccaagcagttggttaactactaataacaagcaggttgctccttggtcatttagcaaaaagctgcttgttgcaccacagtcgatggctgagaagcatatgacttcaagtagcttttgctgtacagtaggattccatacatataaatcagtggatcgttatgtaagacaagaaaaaaattcaaaatcttcacaccagaaagcacctgacactgagtgtggcacaaatccgaataaatgtatactgagtaaaccatgtcagggtcttttgaaaatatcagttgtctatgaaattgagagaagaaaaaccaaatcacctgaattcatacaggttatgttaggaactcaaaaatatggaacagctggctcaagatgtataacagattcacaatgaccaaaaaaacaatgtttacaaatgttgaattaagaagcatgaatttgacatctctcttgaattaagtcaccacactggcacccaatggaatgcttataggcaatctcagtagaaataacaaaaactgaaagaactgacggacagagctaactttccaatctgttcaaaacagaaacaagatgtactagtggacacctgaatcctgccgtttaagcttttgtgccttcacaattaaataataacccggccgggcacggtggctcacgcctgtaatcccagcactttgggaggccgaggcgggcggatcacttgaggtcgggagttcgcgaccagcctgaccaacgtggagaggaccgccccccccaccccgcccccacaaaaaatacaaaattagccgggcatggtggcgcatgcctgtaatcctagctactccggaggctgaggcaggagaatcgcttgaacccgggaggcggaggctgcggtgagccgagatcatgccactgcactccagcctgagcaacaagagcgaaactctgtctgaaaaaaaaaaaaaaaaatcccaatatgccaaagcagctctgtcaaaaaccttcaacgctcacaaacatatctagtaataacgaacgactcattaaaatgtactatctgttcagagaaaaaagtattaatatatctacaatacgagactgggctccaagaatataaatccaaattgtactgattggtctgaataagcattttccaaaatgaacaacctgaacctacaccacgaatacatttaattagttataaagcttaggacaacgctagtgatctcaaacattagaacgtaagcgctgaagcctgctcgttagttccttttacctggagctttaaatttctaaagccatcatctccagggacctctgaaggaaattcaaggccaagtatagtatttcatgataagtgagaataaaggcactcaatccctggagccggcgattcctgttcctgtctctagactggactcggtaaaagcccgaggcgaaacctcccgtttatctcctacaggaccccagcaccttaggggatggctccacagagccccaccgggaccccccatcgcggggaccagaggggcggaggagggagacactctccaaaacaaagcgccgctcgccccacgcggaggcaggcgcacctttcgccctgacaggacgcagacacacgtgtgtcacctgtgcgggaagggggagcagcgacatcctcggaggtgcgtgccacgggcagcggtcggcggctgcgctggccccgatgcctggtgcccgccgctcattcccgggctggggaaaactttcggccgcctcccccaaggcgcgcccccacctcccgggacccccggggcacgcgccccgaccgcgacgccccgccccaggcccgcccctccgcgcccacggctgcggccccgcgcccccagccccgcgcgggcacccgcgtgccctcaggcgcgcccccgcgccgggcccggccggcagagggcggggtcgctcaccagtccgcagctcgtgcttgacagtgaggagctgctctcctccgtcgccgccgtccgcgctggtccccgcggcgccgccgctgctgccaccctcctcctccatcttctcctttttttccgatcccgcgggtcgctacgaggggaacccaggagacagcggacgcccgtcccctcgcagccgctgccgcggccccaggagtcggggtgcggcggctccagaactcggacgcaaagacgagtctctttcccgctctggccgcacggctcgctcctcgcctcctcccccttcggcgggcaccgctagtaccgcgcaaccaaaccgccccctgctccaccgccgcctcctcaggccgctccgcccacagccagcaaggtaagggagccattcgagccgccttcgctgattggacacagggcgcgcgcgtctgccaacgccggttcccattgggcagtacgctgtgacgtttcacgagcctccccgcctcgctcctcgaattgttgttgcttggcggggaggcaggagagggaggagcgccgccactccgattggtgagacccaaagctctgccccgcccatttcctctggtgcgcactcgcagtcaagaccttcccttccctgacctccccagaacggtcacaccccttattccccagcttcgatctgttagtaaacagtgtctagtagtcaggaggcgctcggggtctctgattggctactgccgaaagaggcggggagggatgattggaacgtttggtccgccaatcaccgtggacagaggaggggcctggagggtagcgcttatcacccacgtgtttgcagacaaacctaagggtcccggcagcgatccatgcgtgtgtgacaaccagcgagacggcgtgccctaaaaaggtcttactcgctctagtgaaccctaaacaagttaagcagagtgtttgttcttaaataacagatagttcttaaacgttacaaaaattcacagtcccagctcccgatgaggaattttacgaaggagagacatttctg

SEQ ID NO: 6575 - DNA, 6000 bp, Homo sapiens
acagtcccgtgggcaactcagcctggccctggtctaccagtgtcctcctacctctaccttaaatggcatttccagagccaagggtttcctctgcctgcagcaaggacaaacacagccaccatggaagaaagccatgctcccaaagatctcggagcagctcgggggtaaattgctgttacagcacagaaataaaagacctgcagaagcatgagcagcaccctaaagctagtcccgtgcccttggacctctggccttccaggaaggtaactctcgggctgccagccctcctccccacccccagtcttagttccctctgggctgaccccatgtcccagaggcaggtctcgaaatggcccaggaacagaccccattgacaggaaatcaggccctttatatctgaacatttttggctgggcgcagtggctcacgcctgtaatcccagcactttgggaggccaaggtgggaggatccccttgagtccagaagtttgagaccaacctggacaacatggaaagaccctgtctctacaaaaatatataaaaatcaaccaggtgtggtggcacacacttgtagtcctagctattcaggatgctgaggcaggggaatcgcttgagcccaggaggtgaaggttgcagtgaatcatgactgtgccactgcactccagcctgggtgacagagtgagaccctgtgtccaaaaaaaaaaagaaagaaaaagaaaagagaaaataaaaaaagaaaagaaagaaaagaaaaaaatctgaacattttgacaaagggaattgtgggtgtttgtgcttcttcctcctcactctctttctcaagtgtggtacctaaaccaattaaatacaaaatcactttctgttattatatttaggcaaatcatattcccacagttccaaaatgcacacattataaataaaatataaattattttagatcttattaaagcatccgctctctgagaacactaccagaaaagccatcatttgcatccccttctgctaggtaagtgggggcttcctgcgaggcctcaagggttcctgtgggaccttccactgacaggagcatgttcctccataagcagaaacttcacaacacctttcaggagaactcccccttaaagccatgtatttacatctagaaatggagctatcatctgcttatctcaggatcaacaaaccttgcaaatcatttaactcaatttcagccgacaaaataaccaaggtccagagatgttaagtattgtgtccatggtcattcagtagtatcccaatttcaggctaagaaactccggtttaagaaattcttgcctaaatctttcacagttctaaataggagactgttgacacaaatgagtgcacctataccgaaaatgagtagtctttttaaaaaatgtaaagtgaaattccatataacaccttagcctcccacccatgcctgttagtgaactggcatatggaaaacctaagtcccaaaccaaaacaaccacaaatgttctcgccaactgtgaggactgaagactcaaggccggctgtgtcagccctgcctcccagtttggctgctgtcctgtcccagcgtgcatcagtgtagattcaaggggatgtccccaaatctactgcctcgctgcatcgggtacagcatggaaaaatcacaaaccttgccgcatcgtaagcagccatatagggatggaatcagtatctccctttagctttacagattccatagccaaatttttcacatcaaaattggtgacacttgggccgacagcaggacagaatattaaaaatcaggaccttcttgagaaatctggccatacggttgccatgccgacaccctgtaatgccaaacaggcatctccaaggtccagaagcaacttggctggcttcaaatagtccagacattgtgaaagcagagctgcctccaggtccaggcgcttctgcagaccctccctttcccagctcagctctctgattccccaagggagcaatgatgacgcctgtctgaatttgccagcctctgacagcagggctagccacatcattctctaagaatctgaaaatccacatgcagcatcctggcccaactagacagagaaatgtttctgaataagcggttaccacaaattgcagggagaaagtaaatcctcagctgcacctgccccttttaagttgaacaaagcattcaatgcctgcagaagcttgaacgtacatcccccacctccttacttagagccacctccttacttagaggttacagttgataataaaatattaaggagatatgaatataatacaataatattagggggatgtgaagcattgactgcccccagaaatgggtgagaatcctatttcactcctttaagaagccttgctgtgcactttaggaggctgaggtgaatggatcacatgaggtcaggagtttgagaccagcctgggcaacatgatgaaaccccatctctactaaaaatacaaaaattagctgagagtggtggcgcatgcctgtaatcccagctgctcgagaggctgaggcatgagaatcgcttgaacccgggaggtggaggttacagtgagccgagatcatgccacctcactccagcctgggtgacagagtgagactccatctcaaaaaaaaaaaaaagaaaaaaagaaatcttgctgtgtgcatcaatgtggggatgcaaggagcttccagcacagttcccgcatgcatcacttacattcagctgcaaatcacatggaagaaataactggaagagaggaatacaatgaaacaatgcaaggcagttgtcaaaagtggtgcctgacgggggggtcagtgctggtggaacaggcatctaaagcttaagaacaaagagggagctggctgtgcccctaagtggccacagaaggctctgccactcccagggacttccattctccctttcttcctgcaccttcacttcccagctcccaggtatctccctgatactccttcatactttaaacttagcttcccgctctgagaccttttcttacctgcagcaagtcaaaccctgtgggaataagcagggacaagaggatgtttactggtgattctcatgacctccaattcccacccctcaaaatgagtgctgaatccttccagcaggtcccctacaccattctgggactcttgagaaatgtgagcggccctcccagtgcatcttacaggactctggaaggagcaggagagaggtgcatgggccaggtcagggttcaggttccgggttccaaagcagaggctctgagcagcagtctcctgtgctctcttccctcctctcctccctgcccagcctctttctccgccccttccaactcagaccctcttctcatcgcctcaccagaaagagggacagagcatctggccagcctgccttgcctgagactagggctcttcctgccactgagtatgaatgtggcagcctgggctcctggagaggaagctccctggggtctggaggccactgctggtttggacagttccagctccaacctgtccctctgctcagatcacaacactctggggcctcagcacaggaggcttttccttatcagttttctgtccaaagggcgacaagtgctttggaaacagtgtcctgggagaacagcccagaagggaacagtgcacctaatcaggcttgcccccagagagttcacccagactggtatctaggacaaaacccacaacctcacccccccgccccaggtctcctcaggcaaagccctgaaataatgtttcctttgcaggggactcggaatctggggcaggatgggaatatgaggggacactctccaatgaacttcccgatattcctggggttcagatccgcgtctggatgcgtttctcggattcggctccacacaagcctcagccctccggaccttgcacctcccccgcggatctcctcacccctccacccccaggcccagatctttccttgtcggaatcgccacgcttcctcactcctttacccccgccccactcggctctcctcttcctggtcctcatccggccaggctgccccgccctggtagttcccgagggtcgtccgaggctctcgtccaccaaccgcccccgtctggaagaatgcgcccgctcgagcgcactctcggcgggtgccaaagcctcccgcctcaacaggtgcccctgcctggccacgcacagctctgtcacctggggctcggacggagacggcgacaggatcgccccctgcagggcggctgcggctccgcacgcccccgcccgggtccccagagcgccaagggcccccgcagccccgccgccgcccccgctgtgccacactgcctttgtttccctgcccgcttagatgtcgcgaggctgacttcatgcaagggtatcgccaagttcgggcgctgacactgcccacctacccgtggtggcggaccctaaggttgggagtgagagacgcgtacagtgcgagacctctcctcaacccagagaactccggggaagctgggtgtccgcgccgaagaagcgggttcaagttgacccggctcagaagggggttcgaagccaggcgcagcgcctagagagccttcccctacccacgcccccacccgatgtcctctgcccccagaaggctggagaggggctgcgcactgccacctacgcgctcggctgcgagtggttcccaccgcccgctcgccgcgcgctgggcccggcagccttccggggcacacgaggctcccgcagcccccagactcccggccccggcagcgcagagccgggagagccgccacgttcccagccgcgcgcgcacgccgggcccaccaaacttgcagcactttctcccagcccccaccctctgtcaccctcccttagtcggtgcgccccagccccgccgcccggcagaggttgccataacaacgggcaggaatgctccaacatatacaaagccggcccggcgcagcgggcactcagccctggccgggccccgcgccctcggccgccgcgcagggtctggacgcgcgccgcggctccctagccggccggccgacgctcggggcgtactcacaatgagcgggatggtgcggtcctcgcggagctgctccgacctcctgcctgccctctgcgcgccccggccgccggaggatgctgcgtgggctcggttgtcctgccataagtagtagaaagtgcccaggatccaggctacggtcaggatggcgatggcattggcgcggatcttcctcatggtgggcagacgggcgccccaggtgggggactgggccggcgtgctctcggggccggggcgggggcgctcgcagccccagctgtttgttttcgctcgcgcctagctgctcagtcctgcagagcagaaaaaggagagaggtgggggggcgggggggtgatagggagagacaggatcgcggagcgatcctcacggtcctaatgcccttcagccccgagcgcgcgcgtcccccgggcgcccattcattcgtgcgcagggccggccccgcgctccagccgccgccggctgacccaccaggccactgcgcactgggagagaagcgcgccgagtgggaagcggcgcgggccttcctcccgcgcccgggaacccggcgagacagacgcccgcggcggaatggcgactggccaaagccagcctcggctcccaccgctaggtgaccgaacgcccggcagctgcccccgcgcggccctggtcggtcctgccgacccacacccacccccggaccgagcggccttgagtcaccgactggagacgcgcgacccccgacctgggcccgcgccgcgagctgcagttccgggctgcgctctggcgcgggattcaaggtgtgttcggcgagtccttgtgtaggggcggctgggcgggggagagtcctgagtttgtactggaatctgcagctgagattagccagaccgggcccgcccagaggagggattggaagctggtgcacttgacattcgaagagcgcgaaggggaaacgacgctgcctcaca

SEQ ID NO: 6576 - DNA, 6000 bp, Homo sapiens
cacagcaagatcctatctctaaaaaaaaatacaaaaattagccgggcatggtggtacatgcccctggtgccagctacttgggggtgctgagacaggaggatctcttgaacccaggaagtcaacgttgcagtgagctgtgatcacaccattatacttcagcctgggagatggagtgagaccctgtctcaaaaaataaaaaaataaataaaacattagctgggcatggtggcatatacctgtagtcccagctactggagaggctgaagtagtgagccatgaggcaggaggatcacttgagcccgggagttcaaggctgcagtgagctatgatcactgcaacacttctgagttgtctttatgacttgataattatttccattgattgatatttcaaattagcaatgcaggaaaatagacagtgtatttcagagaaatgtaagtttaacaaattagggtatgtgatatacatttccaaatgggaacgatctatcaggctgtttttctggaccatagggccaaatacctttctgccaaaaatgcatttgggtctgtttttcttccactggcaattatcccctttccagctcatgtcccttggaggctttaacgtttcccaacactccactagggcttgccaatttggactttgtccctatcatttaccaggtgggagatctgccttttctctgaaagccaaaaacactcatctggctccttgcacctttcctagtcaaaataaaagctgcttacatccacatccacatgtgagatgccaagttctgggtttctgtctataattatgtcttggccataatatgaaaggatgcttttaattttcttgttcatatggaactagccctcctgacagagacctattcaaagggtgaaacattccaaaacagtattaagcgctcttaaagaggttacatttgtgacactaagaatcatctatagtcatattagtaaattcaagtaagagtaatatatttttcatactgaataattcattactttgctactgacaaggttatcagctggttttgtaaagtaattataagatgtttggatgtaataggctgtaacactgttttcaggggacctgcagaagaatcttgcatttctgtgactgcttcatgcctaagtaattataaaggctctgtactttaacaaatactttggcaatattgtcatttgtcatccaatggggacacattctgagaaatgtatccttagatgatttcatagtgtgtaaacatcctagaatgtgcttacacaaaactagatggtataaccttttacacaccgaggctatatggtaaagcctattgctcctaggctacaaatccatacaacatgttactatacttaattctgtaggcaattttaacaaaatggtaagtctttgtgtacctaaacatagaaaggtatactaaatatacagtatcctacaaaccagcatggcatatgtggtcctttgttgacccaaatgtcattatggggtacacgactacatatctaaagcaacattcattaaaaaaagtaaaagtgacaaaacagacgttagaccaacttactttatattaattgtgcgctgctgatcctcctgcactcgagttgggcatcgccagttggaacagtaactctcttgaatggtagacatgagattttcaagattttttgtaaaattatcatgctcattcccaaacaaatcaattattaatgaagctttatggacttcagatttgtattgctgtttttccatcttgtcccaaatccaaagtagcttcacagttgtaaaactgtaggtgtccattaagtaaagaaaacagtctacaaactctctaccaaaatgaagagagagttccctagggaagttttcattttcattaagaatgacatataataacatcaagaatccatctatggtgcaggtatttttcagtcttatttcaacatagagtggtgtacaggatactgctttgcggccagctttgatagtaaaaacacccccccaaggaagaacaggcctacaaaatgatcgatcttggttatagttatttttaattgatgctttgatctcttcaaacagtgtcttcatcctacattttaaaagtttaaaacagaacacataaaattgtaactttgtatattaaatgcataatatgtttaaacgaaaataaatccatctaaagactcaaatcaaatgtggttattaggcctcccaacatagcaaaaaaatttaaatgagccacttttcgcgcactatgcatgctctctggaaagaccatttaagaagctgcagtctttttttgaggtacagatggccatttgataggctttatattaattacattgcagattttatctgtgacagagggaaaccctgtaataaaaaaaatcctgaggctgggcacggtggctcacacctgtaatcccagtactttgggaggctgaggcgggcgatcacctgaggtcgggcgttcgagaccagcctgaccaacatggagaaaccctctctctattaaaaatacaaaattagctgggcgtggtggcgcatgcctgtaatcccagctactcgggaggctgaggcaggagaatcgcttgaacctgggaggcggaggttgcggtgagccgagatcacgccatctcattccagcctgggcaacgagtgaaactccatctcaaaaaaaaaaaaaaaaaaaaaaaaaattcctaaatgaaaataaagctattaaaaacattaactttggttaggcatattcctaatgtaaacctcctcatctttccaaaatacaggctgtgcttgcttcattttcttgttaatatgggtgattccacttaagaaactaatataatgggatccttaattgggggtacagaataatagccattacataatctttatattaactatactacatattttatttgttgtagagaaaaactatgtaaaaaaaaaaactcctgttgctatatagactaagactaattctgacatttagctttgaaagacagcatgaggagtaatcatgaaaatcaatcttaagtgaatagtagcatagctaatattgctaatcactttgggatttttatttgcaactgagaattgtgctattgtgcaatttagatatactataatttttaactacagaggctatactatgaagatctgattcagaacttgataaatatcctgattattccctatgcatgttttcagaatgaagcaaagcatcctcccttttcaaactggcactcttccccaaccttgaggaccactaggcactttgtttttaaagccacagtaagtattttaataaatatgttgtgttatatgtatgttatatagcgcacatacttttgaaagaatgagttctttttacaattgtattgaaaaaactccttcactttacttgggacaagcaaataaactaacaacatcatattgttttccgaggttacttttatggagaagtattgttatgaaaaaagggaggcatctgaggagtggaaacagagaaatgagtgactgagatcagtgtcttattttgaccatcttttccaagtgctgcatcctcccaaacacaacatgaactcaacacttaataaagctgcagtcctacgtgttttatttgtgtaagaaactaagtccaaaacattctgcaacgcgagtaaaaattcacttctgcaatatattaaacacacatgaacacagtgttttcagtttgaagcaagatactgtggactctaaaatatccagtaactatatttagtatgaagagtggatgtttatatctagttggccaacacattgattctagtcatccacttaggaagaagagggtgtggcaaatctgcagcctaggaaaacacaaactcagtttcttcgtaatagatactgattcgttttgtttacaaagattttaaaaaacagttatgcattcaaatactttaaaaacgaaaataactttatggtttgatttatttccgttgaattttaaagaactttgtagcaaggtttaagattgcttaaagagcctgagttcggattcctaaaatagtgcattgggaaggaagcataaatctctaggatattttcttcacattatcttcagacatgaccaaatgaagtgtaactacccttacactctaagagaattaaactataatgacatatgtggcatgaaactttagtctttctctggaaaaaacgggaggagggaaggtttggaagaactagaggatactagtttcatcatgaatttggtgatttgttccaaagtaaattgcaataaaaatgaggggtggggaaaaatgatggaaagatagctgtgaagagctttacttaaaattgtcttagctgtttagctaggaactgtaattagaaggactggaggatgtattccgctggctttattctccaggctctacgggccctccaatttgaataaacctggaaaactctcctgacctctatttctttgacaaaacatctttctttcgtggtgacttccaagggaggaaattggtaccccaagctagccgtgaggaccccaccacatgcccaaggcattgaacgccagactccctaaggactcagggattctaaaagtcccctctcaaatcagcgcctaaaatacgcctgtacagccacgcgctaccgctcccagcagcgcgggacttcgggacagggacaaggcggacgctaggcgtgcgcccccggggagcccccacgttccggccacgcccaccctggccctgggcagccgcgcccgggaggcctggcaccgaggcgggcgggtccccgagttaggggcccgcgagtcggctgggcgcccccgcctctgcccgggcagtgccccgccgagtgctcagaactgcggacaaataggctggagggccgggccgcggaaggcgttcccacaccggccagtctccgtccaccaggaagcaaactcctcgtacctccctggggaccgaaaactgccggtgccgccgcacccgtcgccgccgccgcctgctcatggagagcccgggctgccgccgccgccgccgccgccgctgcctcatctatgagtaccgccggctgtctcggcctcccccggcgtgagttctgggctctggcatggcctccatggcagccgccgcggcgggagccacagcagctccagcgcccaggcccaatctcactggacccacggagccaggacagtgggacacgtcgcttcttattacggaggaagattcggcacgacctccgcccccctccccccaacccccccgttttcagccgcctgacagcgcagctgcgcaggcgcgaagacgccccagcctaatgtgcgtgtgtcggctgtgtatacagcatccagattcgcccaatgggaaccaggatcaggtgtggggggcgggacctcgcagagaggggcggggttccactggtagaaggtgggtggggaagccggaagtgggcagagtttgcacggaggcggagctttattggcaaacctgattggctttttgaggtttgtaccattttaggacttgattttagtttgcttctgggtcttgttttctcaaattcttaacctagaaagaaagctttgttttctcagtaaattacggttttttaagcgtttaagtatttacttagaaaacagttgaattgatctgttaaatgccagctttagtgttcaagttaattattggccaatatactgtaacttacagtggaagttaaccccattttgaaaaattagattgttttaattccattgtgaagttgaaaaaattgggttttggagataataaggtcccacacagcaagtgacggagctggaaattacagttaggacaacttaatgctagtttgtgggctcaaccactatttctgtttattagggccgagtttttgtatctcccgtaaagaagcaaggccctgtatggctctgcatctggagaacacaggccaccctgcaaaaactacctctccttgcaagtaggc

SEQ ID NO: 6577 - DNA, 6000 bp, Homo sapiens
gaaaaataagactgaaagctaaattgagggcatataacagggagtatgaaattcattcttctgtctggtcagcagtgaaaaccaagaaagatttcacttgcgcaatttggctttgaccttccccctctatagagtctttttttctcaaaggtcttctacacagtgcttctaaactttaaagtgcaaatcaatgacttggggcccttccaaaaacgcagattccgatatggtagtgaaactgccattgcaaaattgtaactgagacagtgaaataaatctgacctaagcaactccatcttgcttctaacctccaagctgtccttgttcattcctgggtataggccaaactaactttgggaggaacttcatttatagtttacagtttaaaacaaagatggtaacagccctttcccaagacagaaccccttcttgcctggagactagactgcctttgtgggactaacaaattagccaaaagattagaaattatggtttaggagtcatgcagctggaggttacaagattctgacccttcccaagtcgctcctggggataacatcactattgtgaagcctaagatcagggcttgagatattttgcagaccctgcgtttgatggatcagctggcatcacctagatctaactggttcttgtgatcttgtggcccccacccaggaactgactcagcataagacagcttcgactccctatgatttcatctccgacctgaccaatcagcactcctgactctctagctgcaccgctccccccaccccctaatgcttggggagactgatttgagtaacaataaaactccagtctcccacacagctggctctgagtgaattactctttctctattgcaattctcttgtcttgataaatccgctcggtctaggcagcaggcaaggtgaacctgctggggcagttacagtaggtgaggcctgggatcccacattttcaacaaacttccagatgctaccatactccttcctgcagctcatccatagaccatattttgagtaccaagggtctgatccagtaacctcttctcattctcatctttaacccctctgcaatgctggtctttgttgatcttcctgaagctctcatcattggtttctctgactctctcattattggcttctgtgattctctcacctgaatctttaaatttatatgtaaagaccaatcttcagatgtacgcatcagtttcttctgatgtgtaatgtattgtccaggctactgtcagtgcatcaatctcttcagtattttaaatgaaaatattacaaaccatcttcttataaaagacagacctatatcgttatagaaaatacctattgcccatttcatggtgtatctagtttctctggaaaataatctcccctgaggttccccacctcacccgccccaccaatctgcatagggattagctacagttgattggtacagaggtgggcccctactaatgctgggttatttttagtctttccccaggattttggactagaaccgaaaaaaaaagcaagttagtctctcactctctccaggaaaaagaagtcttggggatcacattctgatacacagactaaagaacaacaacaacaaaaaacccagcagtcaactgtgagaaagaggactgaggaggacaccaggggaacacaaggaaatagcttcacagtgtggcactctgacaaccttatatcttcacatagaccaagcaggcaaggttagaccataatctggcctgagtcttggcagaatgccctgtgatttctccaagtgaaagggtagataagcagcctggggaggagctgctatcttgtggaagactgccacacggccgcttctcatccctctccctagtttcagttgaacgcaagactttccaccttacccccatgtaggttacagctgcagatctcaacattaagtctataaaactacgtggctgtggtttagaggtagatccttaacagcagagtgacccactcatcccacctatcctctggtctcttctgttcagtgctgactgtggtgctatgggcacagggagctggcaccatgatgtcttgcttttgctgtctgtataactaataaactatctgactgcatttgggcctgcttactccttactaggcgagtgtctgtggaagtcttgcaagccatcccgaaaggtgtagtagtaatacttgtggccctattattacctgcctccctgctgccttaggaacacttgactactaaaagagaagagatggagagacttcacttcctgagttatcctcagcactccagccccttattccagtttgttccaggaatgcatcccagaccttgaattccacgagataccctggtatctctccaataaacctcccagtttcttttctttttcacctaagaaagccagaatgtatctttggcctttacaaacaaaaggtcataacacacacacacacacacacacacacagaagtgttgtattcatggacaataccagtgattagaactccagtgccagagattcaaatctattttgtttttattaaaattcttcctctcttgtgtattgatttctatctggcccttgaccaagtatatataatatgattagcccacatgtactacagtgcaataaagataaagttttatgaaaatgtttttggccaagtaaaagaaaatataattcttttttactattatgaaagtataagttactctaatcatttattaataactccatagtattaactatataaatcaactatgctattttttatcttataaatatcctaatttgcatttatattagttacatttataagaatatatgatggaatcacacatatttatgccaaatacttatcactcaacaaaacagcataagtaggatcagagtttgatctactttttttttttgagaccgagtctcgctctgtcgccaggttggagtgcagtggcacgatctcggctcactgcaacctccgcctcctgggttcaagcgattctcctgcctcagcctcccaagtagctgggactgtagccggacaccaccaagcccagctgatttttgtatttttagtagaaacggggtttcaccatgttggggaggatggtctcgatctcttgacctggtgatccgcctgcctccgcctcacaaagtcctgggattacaggcgtaagacaccgtgcctggccgagtatgatctacttttaacattctttgagtttagctgtgcctaatacatagtatgatcatataaattagcatacaggtgcttatgagtcatcagtcttagcttaggatgttaatcaattggcctcactttctctttggactagctgagttttctttcatcagggtcatagactacaaatcaacgagtcaggtacagaagacagaaccttaggcattgcggaatttgaccaaaaatggtaaataaattggtgcaaattcatcatcacaattggaaaactgaaagagcaagcagtggggccactgcaattataataacgggtggtggctcacgcctgtagtcccaccactttgggaggtcaagggggtcagattgcttgaacccaggcgttggagaccagcctggacaacatggtgaaaccctgactctacaaaaaaaaaaatccccttcccccacctccccaaaaaactagccgggcatggtggtgggctcctgtagtcccagctactctggaagctgcagtgagaggatcacttgagcccgggaggttgagaccagcctgggcaacatggcgaaagcccgtctctacaaaaaaaattaaaaaaaaaaatagccggcatggtgatgcgcatcggtaattccagctactcaggaggctgagatgggaggattgcttgaacccgggagttggagcagcgagccgagatcgcgccatggcaatccagctccggtgccttccagtctgggcaacagagagagactccatcgaaaagaaaaaggggggaggggaggggaggggaggggaggggtggggaggggaggggaaagattttacaatttcctgtaagcaatgaatggctctaatgtgatattgatgaaataccatctttaagaaagtgtacagattgtaagtgacacgtggctgcttacgttactcctgagatgcaagtagatcatgacataatgataaccagtcataatttgcagtaatcccttacaaaaagtccaaatttgtttgaaaatacagaaacttttactagtcgaagttaaacattaaacattttctagtcattgccttaacaggatttattagagttactataatttattgaaagaatggctagatttataaaatgttttctggttatgagccaattatggcaattattttaattatatatttataataaaaatgcatgactgtaagataaaattttaaaccaaatcataatttatattttaaaatagctttaaaatacttgcacataacacatgtcgtggttagtaactttctccagctacatttaaaagtatttctaagattaattacaacatttttttctaaaggtttattttttccccacagcataactctataaattaacgtgagcccattatatcaaaggtgtttatgtgtgttacatatgcatttaattttaatatccttatttaaggcacgaatatccccaagcaagcacagtatgcaataagaagtcctgtggagtcctgtaagtactttgatgaggaatgcaggatttatgtaagacctgagcgagcttgaagaaagactctacaattgataaaactaagtcagaccgaactggatcattttcaagtaaaataggtagcaaggcaaaaagaccgcctcaaagtcgctgcccttggggctctgccacttgctttacaggctaggaacggacaatgccgggaacccgagagcggccggcgcggacgccgaggcaactttacttggggcacccactactcgcaatcaactcccggcctcctctgctctcgcgcctctaggggctcaagcactgctccgggagcgctgaattttgaggaagagggcagaacttcagtaaggagacctgtctgggcaacggtttcaggacacgcggtggggaaagcgactagcctccggcggggcagggcgggctgtccttacctgcagaaccaccggccacgatctgccgagaagcctcgcgcactaagctgacttcaggcttggcggacatcttcgccaggcgggaggacaagggagtgggctgagatgcgtcaacgagctcgcagcctgcacagcctactgatccagagagccccggctgggctggtcctcaagcgcgttggctccctgtggagcagcaatccggcgactgctggaaagcgagggttcgaggcgcagattcgtcgcgcgatctccggcgcgtcggaacctgttcgcagcgctctcgcagaggcgccctcggctccgaaaatgtctctggaaagaagacccgcggatgggtttgggttggctcaccgcagcggctcaggctttgtctcctagattggcgcccacgcccttctctatcaggagcctccggtagtttgtcaaactagacggttgcctctgataactcaagtgaagtgacccaggcctggagcgccaagtacaaagcggggacgacacttgcacctcctggcaagccagagcacagtgaggttcaaaagaagggacaagtgaataaattcctcagttagttgtcctataattgtggtctgtagcaactaagtcaaagcaaatctaatttacacttaccttacaatagagctaaggtagtactttaccaaaaatggttttgatttaaggtaaaatcatacctcatcaacttgagttttatttacctaaggaccaaaagaagaaaaagcctggttacaaatagtttcttctatacccaggtcagtggttcttaaaagtggttttagtacccacagcatcagcataatttgtgaatgtgttaggaagtcaaattcgtgg

SEQ ID NO: 6578 - DNA, 6000 bp, Homo sapiens; identical to SEQ ID NO: 1805

SEQ ID NO: 6579 - DNA, 6000 bp, Homo sapiens
ggcgcctgtagtcctgactactcaggaggctgaggcaggagaatgacgtgaacccgggaggcagagcttgcagtgagcagagattgcaccactgcactccagcctgggcgacagagcaagactccgtctcaaaaacaaacaaactaaaacaaaaaaactgcacgcgttttgcacacatggctttttaaacgtgagtttccatgtaaaggccctttggagattcctcacttgcagtgttcaggtctcattgatccctgtgtctctgggacacaaggttggggggtgtggagtttgaggtgggcaggcagaggccagcagcagatcatggttctgctgtggcttaaagagagatggtgggatcaggacgatcaagatgcaggggcctggcaggaacccagcacaggggctggggcactcatacatgacatgcgtgagtcacacctagacacactgtatgcgtgtgtacacacatgcatgtctgcacactgcatgcggatgcacacacacactacatgtgctgacacgccccccagtttggtgagcagaccccagggatccctggaacccccagaaactgtgaggaggggaaattccttcagaaggcacactctgtgagccaccagcccttgtgatggagccctcggatataatggagaagatggaagctgcgccccactggggtggatggtgaccaggaggagctgctgtgggggcccagccctcccagcgggcagggtccctgatcagaggcatcccccacaagcgctgcctctggctcttgcctctgtctcttgcctctagcgcagacaggaccctttgtgtgcggtcccttaggtctcccagtaccctggagtcagcaagcacctggaagtgccactggcgggccaggacaaggggacttgtctaagggcccacgagccgggcttggtcaggcgagggaattctttgggggaggctagtggcagagggtcagactggccaagcctgtgaggcccgggggccccaggggcaagcctgggatgaagacagccaagtgtgggcagggctcttgcaggctccagtagggaccaggctattcccgctgtgcacctcatccacacctgccagcagacattgctctgaagtgtcctcccccagccagcagggctccttaggggtactcggcccacggcagggctgtgcacagggtctgcacacaggctagagtccttgttttgctgaggacaagcagcggtgctcccatcactgccagccctcggcgttgcccttctcggtctgggcctcacctccactgccctatggcagatagccgaggcaggggtgacaggatctgtgtggatttggacctaaggtaggaacagtgtggggggcaggggagtcactgaggaacacagatctcagtcccagcaagggggctgaggccaagacccctgggcccatcggaatctgggctggaggtgtggctggtgggagcacatgtggacagaactggttttgtgttcatgggtgtgcagttgtgaatgaaatgctgcgtgcaccgtgtgatgacgccctgggaggaaccttgcagtcaggttttcttctaagcagatgccatcattggcgagacggcagcacggcctaaagcagcggcttagaggaagaaggcagggccctgggagccccagcagccaagggaggccagccaggcttgcgggtgtggggtggctgctccacgggccatcggagtctttaaagactgcacaagagatgcattttaagagaaaaaaagcaaacatttccttaaataccaatgctgtttctggttgtgatctctccatctcaggtgaatgtgtacgtgcttggaaagacgtttcttctcttggcaagagagctctgcatcaatgcgccggccataggtaggcatctgggtgagatgctggggtgtccggcaggctgctgtagggaccagcgtgccaaatgtcctttgaacagtggagggaaatcctgtccaagcatgggacccctcaaggtaagaaatgtttcttaaagctgctaggagctcagtaatgtggggccttattttctaagacacagtctcgctgttgtccaggctggagtgcagtggcacaatcgtagctcactgcagcctcaaactcctggcctcaagtgatcctcgtgccttcgcctcccaaagcactgggattacaggcatgagaccgcacctggcctggggcttgctttctgctgcaaaaccagaaggcctgttgtcagtgcctgtcaggtggcaggaaggtgtagacagggaaacaagtgctgcgtgctgggagcatcttgtgtggacaaggtttaagggacacacctggctccaggtgcctctggacagatggggacagtggggcagctcctggttgtgctttccagccacagccctcttttgtggtttttctgccacttttgttctgtgttgtgtgcgagtttgtggaactcctgtatgcctttcttgatgtgtgttaggtgtagggtaagtcctgtctctccctcgaggcagcagcagtgttcatgcatgcagaatctaacctagcggaaaagtctagaaggaaaggatcaaaacagcactcactgcccgatggttctgacctaccctttctttaccaagcagatgactggtttccatggcccgcttagaggcccctttcttactttgcctgtttgcatctaggagcgtatgtcctttgggtagagaagcaccaggtggggctgggtcaccaacaggactgagcaacacgggctgcagcagcagaggggcaccggctgaggctatacactcggcccatgccctctcccaggtgccaagaggggccatccctcttttcgggggtcatacaggttttccagaaaacaactgcctacagggtatgcagagtgggaggagagagacaaggggtgggagagcctgtttcaccctatagtccactcctgcaacaggctgtcccgcagcagtgtcacagctagtgacagtccccagggtccagaacgctgggcccagcagaatgctcccccgacagtctgttcatagggtaggactctgaggtgctagtgatgcattaggacatagagacaaccaggcacctggtgtttcctagggtggcccagaagccagccagcaacccaggggacagatgggcttcactggggcgcagtttgctcctaaccacatagcatgttcagcatgacaggttttctcctcgggatgggagggagctgttctgttgcatgagaaagagaataccccactgtacaactgctgtagtcatttactgacacgtgggtgttattttaggcaacctttattacagaagtccactattttaagtgactttttgccaattttagatttgaagggaaggtctcaagttaagcttggaaccacttagaatccaagagggtagcaggaagatccaacccctcaaagcaggtggcatgggtgccactgggaggggatctggggcctgtcttgagccgtaaatcttcctccacctgagacgtgcaccccactgtaccagagatgcctaagactccaatccctgggttctggctgtgtggaaaatgtctctacacagtcaagcttcagctgactacatgtcaaagagagacaaagttaagagcagcctttcatggtgtcaagaagcagttagcatcttgacttcccctccactcactcgctgacctgctgcagcctccccgggcacctcaggcatagaaaatgagctcagggatctgcccaccctggaccccagtcccgttggtgctgtccgaggagcactggaactggaaggccacctttccacactgcacttccgtcatcccctcctgcccaaagtagctgagttcgctgccgtccaggacggcactggccgtgtagaaggtgtcttgttcaacctggaccgggtgttcaaaccagaccgggaaggtgttactggatccgtctgacatgaacttggtcaagttctgagccagaaccaccccgagccgcttgagctcaatcttcacgctgtactcagccttcccagagctggagccatacaggcccagccctgcaataaatacccttctgtccactgcaaactggatgctgtcgcagcgcccgcggtaccgccactggttgctgcggtaggcagaagactggaatcggtggcacctctgcggggcgaggcccttcctcttggtcaggggaaagtccaggcggggcttgttggtggccgtgtaccacaggaagatgctgtgggtctcctccagagtcaggatgtctgactgggcagcgccgttggcaaactcctctagggtcatggttggaattcggaccagatagagggctcgccccagaacatgcctcttgtttcgtggggtgattggcagcccctgcctcttgcactccgcctcggcccagttcaggacggcctcgaagaccaccgcctctttggtgttgagggcctcccgagtgacaatgatctccagcgtctgccggtctatctcacagaagccttcggaccgtagggccatctcggcctgtgcgtcaatgacctcccagcagcgctgcgtcagctcgggctcctcaaacagccggctctgggacagcaggacgcaggcgttcttggcttccaaacttgtctccagaaagttgacacaggcttttgccaatgctgggacgatgtacttcttagcagcgtacagagtggccagcaccgtgtcggcttccagatcgatctcatcactgtacatgtacctaggcgaggcagggcccgcgtcaggggctggctcccaagcacccatcgcggggctgggcctgggagaggagtccatcagctcctgtgtgcttcccttcagaagcctccggaggccgcctaaaacggacccacccgtccctccccagtagagtggacttactttaagaggatcagaaaggctgcgggctccacgtctggaatgtgaatttcagatttgacttccgccaggtctccgtagaacatggcatagaagacggagctgccgacagccaagacgtactgggaggagaaagcgccgccgtgagcctggctctcccgcaggctgcgtgtcagccacacggcggacggggcggacggggcacgcgttccgagaggggccgccgctacccaccttgtgggcgggcaccgtcctggtcgcccccgggggccccacgacgaagtgcacgtcggccatgagctcgttgttgaacatgagcgcgttcctgcaaaggtagaggcacgggctgggggcgtgggcgcgcgcgggcgcgggggccgcggggcacgggctcacctctcgcgcagcgtggggcggcagcaccgccagccggggctctcctggtggttgttgccgagtgtgggcggcgcgggcgcgggcggcggcggcgctggcgcgggggcgctgggcgggctgcgcggcccggccttcctgcccacggcggcgccggcgttgctgttggctaggtccgcggccgcggcgctggcgggagcgtagagttccgccgccatcttcgcgggcggggcggcgggggcagcctcggcgcctgtggacgccgcgccccgcgccctcgcgccgcgccggggcctcgggagcggctctgcaagcaaaagcaaggaggtcaggcactgagcgacgcggccgtgcaggcaggctaggggcagcagcatgggcggcggcggcgctgtgacccgcggggctgccacccgctcccctgccacccccgcccctgcgaccctgcccgagcccagcctagcgcagcccggccaggcccggccgcggggggcgccgtcccgcccgcccgcccgcccgagcccgtacccgccgcggcgccggtgcgtcacgctgcgtcagggccgcgccccgcgcgacgtcgctgcctcgcggccccgcccccaggcccgacatcctcgaagctgctcgagcttctgcccagcaaccggcgcgagccgcgcgctgtgcagaggtagccgtgga

SEQ ID NO: 6580 - DNA, 6000 bp, Homo sapiens
ttcctgcctagttgaagggcttaaaaaggcagcttacgaagctgttaattatgacaaacttagagaaactacccgaggtaaagacgaaaacccagcccagttcatggcccgcttggcagcaacccttagacgctttaccgccctagacccagaggggccggaaggcgccttattctcaatatgcattttatcacccagtcagctcctgatgttagaaaaaagcttcaaaaattggaatccggccctcaaaccccacaacaggaattaatcaacctcgccttcaaggtgtacaataataggaggtagccagacagtaacacatttctgagttacagctacttgcctctgctgtaagacagcccacaaccacgtctccagcatacaaaaccttcagaacatccaagccacagctcccaggggcaccttcaaaacatccttgtggaccttgcttcgaatgccagaagcctggccactgggcctcagaatgcccgcagcccgggattcctcctaagccgtgccatctgtgcgggcccccagtggaggtcggactgtccgactcacatcgcggccactcctaaagcccctggagcccaaacccaatgttccttggccaactccttcccagatctcctcggcttagcagctgaagactgacgctgcccaatcgcctcggaagccccctggaccgtcacagacactgagcttcaggtaactcttacagtggagggcaagtccatccccttcttaatcaatatggaggctaccaattccacattaccttcttttcaagggcctgtttcccttgcctccataactgttgtgggtattgacggccaggcttctaaacctcttaaaactccccagctctggtgccaacttggacaacattcctttatgcactcctttttagttatccccacctgcccagttcccttattaggtccgaggcattttaactaaattatatgcttccctgactattcctaggctacagccacacctcattcctgcccttttccccagttcaaagcctccttcgcgtcttcctctcgtatccccccaccttaacccacaagtatgggatacctctactttctccctggcaaccgatcacgagcccattactatcccattaaaatctaatcactcttaccccactcaacaccaatatcccatcccacagcatgctttaaaaggattaaagcctgttatcactcgcttgttacagcatggccttttaaagcctataaactctccctacaattccgccatttcacctgtccaaaaaccggacaagccttccaggttggttcaggatctgcgccttatcaaccaaattgtcttgtctatccagtccgtggtgccaaagccatatactctcctatcctcaatgcctccctccacaacccctccataaccgattattctgttctggatctcaaacatgctttctttactattcctttgcacccttcatcccagcctctcttcgctttcacttggactgaccctgatgcccatcagcctcagcaacttatctgggctgtactgccacaaggcttcaaggacagcgcccattacttcagtcaagcccaaacttcgtcttcatctgttacctatcttggcataattcttaatgaaaacaatgtgctctccctgctgatcgtgtccagctaatctcccaaaccccaacaccttctacaaaacaacttctttccttcctaggcatggttaggtacttccgcctttggatacctagttttaccatcctgactaaaccattttataaactcacaaaagcaaacctagctgaccccatagatcctaaatcctttcgccactcctctttccgttccttaaaaacagccctagaagctgcccccacacaagatctccctaactcatcccaacccttttcataacacacagccaaagtacagggctgtgccatcaaaattcttacacaacagccgggaccacaccctgtagcctttctgtccaaacaacttgaccttactgttttaggctggccatcatgtctccgtgtggcagccgccactgccctaatacttttagaggccctcaaaatcacaaactatgctcaactcactctctacagttctcataacttccaaaatctattttcttcctcacacctgatgcatatactttctgcccccctccactacctctcagcaagccaaactcattgccttaactcgagccctcactcttgcgaagggactacatgtcaatatttatactgactctaaataggccttccatatcctacaccaccatgctgttatatgggctgaaagaggtttcctcactatgcaagggtcctccatcattaatgcctccttaataaaaactcttctcaaggctgctttacttccaaaggaagctggagtcatacactgcaagggccatcaaaaggcatcagatctcatcactcagggcaatgcttatgctgatatggtagctaaagaagcagctagcattacaacttctgtccctcacggccagtttttctccttctcatcggtcactcccacctactctcccactgaaacttcaacctaccaatctcttcccacacaaggcaaacggttcttggaccaaggaaaatatctcctttcagcctcacaggcccattctattctgttgtcatttcataacctcttccatgtgggttcccgcctcttagaacctctcatttcctttccatcatggaaatctatcctaaaggaaatcacttctcagtgttccatttgctattctactactcctcagggattgttcaggccccctcccttccctacatatcaagcttggggatttgcccccgcccaggactggcaaattgactttactcacatgccccgagtcaggaaactaaaatacctcttggtctgggtagacactttcactggatgggtagaggcctttcccacagggtctgagaaggccactgcggtcatttcttcccttctgtcagacataattcctcagtttggccttcccacctctatacagtccaataacggaccagcctttactagtggaatcacccaagcagtttctcaggctcttggtattcagtaaaaccttcataccccttaccgtcctcaatcttcaagaaaggtagaatggactaacggtcttttaaaaacacacctcaccaagctcagcttcaaacttaaaaaagaggactctgtcaagaatagagcccaaaaactcaccaaacaaacaagtaattatgctaaatccccttggacccctttggacactctctaattagatgtcctaggtcctcccaattcttagtcctttaatacctgtttttctccttctctttttcagaccttgtgtcttccgtttagtttctcaattcatacaaaaccgcatccaggccatcaccaatcattctatacgaccaatgtttcttctaacaaccccacagtatcaccccttaccccaaaaccgttcttcagctgagtctctcccactgtaggttcccacgctgcccctaatcccgctcgaagcagtcctgagaaacatctcccattatctctccataccacccccaaaatttttcgctgctccaacacttcactattttgttttgcttttcttattaatataagaagacaggaatgtcaggcctctgagcccaagctaagccatcctatcccctgtgacctgcatgcttcaggcaatccagattgcctgaagcaactgaagatccacaaaaaaagtgaaaatagccttaactgatttcattccaccattgtgatttgtttcgccccaccctaattgatcaatgtactttgtaatttcccccacccttaagaaggctctttgtaattctccccacccttgagaatgtactttgagatccaccctgtctgaaaaacattgctcctaactccaccacctatcccaaaacctataagaactgatgataatccaccaccctttgctgactcctttttcagactcagcctgcttacacccaggtgaaataaacagccttgttgctcacacaaagcctgtttggtggtctcttcacatggacgtgtgagacaggattaccaatcctttgttaaacacacagccaggactgtacgtgcttggaaagatgcgagactgggaggcagtggtctggctaaaggacgtttgctttaaatattcccataaatatttgcttcgagtatttggagacggcattcaggttcacaacctgcccagctttctggatcataaccacattgagatgcaaagaatttgagcttctccttccaataagaaagaaagagaaaaagattaagacatgaactaccctttctaggccatggaaactcagagtgagatttctactccatcctgctggacttggctctaaatcccaggcaaggagtttggcacaaagcactgctcccactgtcctggcttcagctgtgtgtaaaacaaggtaaaagcagtgccaaacaccaccaggcatggctttgcaattctatgcagtagaggagatactgcactctaggaaagctggttggtccaactgaaagcactgccaagttctgatgacaccagaatagtctgatgcccaggggctgctgccagacagaagagcattcctgaaattacaggtctaagttggtggactgacacaggttcgagaacgacacagcgaaggtatagtatgttctagaagcatgcttttggctggggcaagagcaactgtggatgaaagagcaggtccccctgcttttgtttcccgcctctcttacagcatcacaatcactgcctgtcacacccagttactgtcacccagagtcacaaacactgttggacaatcagcaaattatagcctaccacacccaatagttaggtgcaatctaacacacgcccctgggaacattcacaaactgttctacctacctgattgccaaagacagccacggagcaggctgttgaaacctcattagccccgaaccagacggaagcgatgcgggagggcatgcccaggatgaaaacctgggccacagagcagatgagctggcccaccacggtgaccggaaagagatgcggcttcaggctgcccagcttcacccaggcccccaggcagttgagagccgagccagtgagagcaatggtgcgcaggccgaacttctccagcagccaagccactggcaggagcagagggatgtaagtcagcatgtagcacatggacagccagtcaatggcaaaggcactgacaccgtagaagtgcatgaagatgttattgatggagccgtactggatccactgaaaggagttgcacatggagtagcagctaaacaccaggaccacggcccaacggcgcctgctcaccttgatcacgctgaggtcctcagggcccgagctactggggtgagccaagccactgggttgggctaaggcactggggtgggccgaactgctggggtggacagagacgctggggttgatggagacgctgggatggaccgagacgctgggatggaccgagacgctggggtccgcttggagtgcggactccggcacaggggtgtcatcgctctcttcctggttgggaccttcattcaccatcgccacagtctcctctggaatcctggagaagtggtgaggactccggcagtcttaagggacagtggcctctgctggtctcttagagttgaaaggacacttgcctattccagaagaaacagagactagaggctgcgtaaaagcctcaagtggggcttcctgtgctcacctccaagctcctgctcccacttttgcttggggctctctgttgccacccgcggcgatcgctgtcccaaggccggccgcacacgccgcagccggctccggaccgctcctgccttgggtctccccacgaggcgttccttgtgcaggaaaagttctctccttgcgcagccacttcgcccgcagagtcctctcccgggccagcttggggcctcgcccagtcgg

SEQ ID NO: 6581 - DNA, 6000 bp, Homo sapiens
acaagcctgtgctcctagctactcaggagactgacatgggagaattgcttgaccccagaaggttaaggctgcagtgagtcatgattgcaccactgcactccagcctgggtgacatagtgagaccctgtcattcattaacaaataaataaacaaataattatctgtggtaacatatcttgtatataagtaaaacattgaatgttttaaatttttaaaaatttatctaaaagtgataagattaaatccttgaccgccaggatttcttaaaatgcccctgcagagatgtgaactagtcttaatatcacgagaaaatgtcaatttagtagaattctatatttgcagcacatgcaataaaaaagcaggatgaaagtaactcctggccaggtgtggtggctcaagcctgtaatctcagcactttgggaagccgaggcaggcagatcacttgaagtgaggagttcaagaccggcctggccaacatgggggtgaaaccctgtctctactaaaatacaaaaattagccgggcatggtggcaggcatctgtaatcccagctactcgggaggctgaggcaggagaattgcttgaacctgggaggcagagttgaagtgagacaagattgtgccactgcactccagcctgggcgacagagcaagactacctctcaaaaaaaaaaaaaaagaaagtaactcccataagaaacagtttggataataatatatttattcaggattctaaaggctatgtagaaacaaaatctaaagttgttcacttagactgatccacctataaagtaccatctgctataaggtgatctcaagaatgatttatgaagggaaacatggcctctaaggtaaacccgaataaagttatagatgaatttataaagtaaacccagttttggacctactagaagaaaaaagcagaagtactacccaccccccgcccccccttttttttttgagaaacagtcacaccattgctcaggctggaatacagtggcacggctcactgcagccatgatctccctgggctcaggtgatcctctgaactcagcctcctgagtagctggaactacaggtacatggccaccacacccagctaatttttgtattttttgtaaagacagggttttgccatgttgtccagactggtcttgaactcctgggcttaagcaatccgtctgccttggcctcccaaagtgttaggattacaggcatgaaccaccatgaccagccagaaattctatctattttgatacataatagttctaaattttatatatggcttgttggacaaaattaacatcacttggcaaaaaacagagaattaaattcaggaaaaaaagaaaaccaccattcaggaacatttgaaatacatttataaatttaagctagtggagatattaccttacatctggatacaagtcctacctaacagcaccataatgatcttgtctgtatgaggattcagccaagacactccacatttctttgttgaccaggaacaaggaaaactggacagaaaaagaattacaaaaccaagtcaacaaaacatgaagtggcttattccaagtttaaaagcattagtgttctaaacaatgaaacaaggaaaatttatttagtaataattcctggaacttcatagtaaaggcacctaccagtaactgtggaaggaaatgctaccagataaactactaaatagcaacttcctactctactatctgtactatcagttgttgctcaccagcagatgacagtaacaacatccagttctttggtagaaaatgaggggattcagaagaatgtagactctatatccacctctaccagagtatgaaatcttggcatttccctgagccatattcatgtcacaacagctttatctacaaaatcaaacttagtcaataaaaaatatatataatacaataaaataaactaggccaagtgtggcgactcatgcctgtaatcccagcactttgggaggccaaggcaggaggatcacctgagctcaggagttcaagaccagcctaggcaacatggcaaaaccctgtctctacaaaaaatacaaaattagccaggcatggtggtgcatgcctacagtcccagctatgccagaggctgaggtgggaggatcacttaagtccaggaggtcgaagctgtaatgagccatgatcctgccactgtactccagcatggttaagagtaagaccctatctcaaaaaaaccatcaaaaaacccaaaaaccaataaaagaaactataaagtactataactaaggtactacgcatacattaataatcttgttatagtcaaatttttatgttcatacattaatctgtaagcctatgttcaaatgaggagtcttggactgactttcatattataaagttaccaatttctagaataaattccaaatatacagcctgtgacagaagatgccctactctcttttctgcagcttatcaacagtgtgctttttcagaaccttacacatacaaaattaatggtaactttatagattttacatcagagataaactcttcaatatatggcgattccgcctatggactcacgggagtgtgaaagtataccagaaatacactcagaaaaagctatgatcggccaggcgtggtggctcacgcctgtaatcccagtactttggtaggccgaggcgggcggatcacctgaggttggaagttcgagactagcctgaccaaaatggagaaaccccgtgtctactaaaattacaaaagtagccgggcatggtggcgcatgcctggattcccagctactcgggaggctgaggcaggagaattgcttgaacctgggaggtggaggctgcggtgggccgagatcgtgctattgcactccagcctgggaaacaagagcgaaactccatctcaaaaaaaaagaaaagaaaaagccatgatcatgctggcagatggtatgtataataaggtttacgccagcctgaccaacatggagaaaccctgtctctactaaaaatacaaaattagccagggatggtggtgtgtgcctgtaatcccagctactcgggaggctgaggcaggagaatcgcttgaactgggaggtggaggttgcggtgagccgagatcgtgccattgcactccagcctgggcaacaagagcaaaactctgtctcaaaaaaaaaaaaaaaaaattttacagccgggggcggtggctcatgcctgtaaatctcaacactttgggagaccaaggcgggtggatcacctgaggccaggagttcaagaccagcctggctagcatggtgaaactctgtctctaccaaaaatacaaaaattagcctggcatggtggcacgcacctatagtctgttactggggaggctgaggcaggagaattgcttgaacccgggaggcagaggttgtggtgagccgagattgcgccattgcactccagcctaggcaacaagagcaaaactcttgtctcaaaaaaaaggtttacagccggggcggtggcccacgcctgtaatctcaacactttgggaggccgaggcaggtggatcacctgaggccaggagttcgagaccagcctggccagcatggtgaaactccatctctaccaaaaatacaaaaattagccgggtgtggtggcatgcacctgtagtcccacttactggggaggctgaggcaggagaatcgcttgaaccaaggaggtggaggttgcagggagccgagatgccccactgcactccagcctgggtgacagaagactctctctcagaaaaaaaaaaaaaaaagtttacaaggcttatcattaccaaatcggcatgttccctcagaagaaacagaaattcagaaacagaaactatgcaagtgggaaacaaggcggaggggagtaattagaggtcaaagacatcgggaaggagtgtacggattaagtcctccctagagaaatggtgacgaaggatctacaaccacatttaaaataaactttttaatttgaaatggagtataacagagcagagcttcaaccacaagtctcctaactattggcttggcactcagaataccgtaccttccttaatgactcactgactgactctcattgaaaaatgagaatacttgtgagtacactccttttcagaggtgtattcgggatttcaggagtcggggaggcaagttgaagagcttccaactttatgcaactttcaggaaagaaggctgcggaccggtattagcaaatggaaatccggggggcggtcgtgggcaggaagtatcggccacacaggacctagtgaggccgaggaccctgctcccgacctcggtggcagcactcccctccccgcccggctccctggcgtgccgctgctcttcggaggctggcagcctcgccctcaaccaccgccctcgggaaagtcctcgactgcctatcaaaaaacatttggcctgggacgtccgctggctgcactatcccttacagaatcagcaagggtgaaaagccaggaaagagatgcaacccaaaggagtaaggcagtgccgggagcggcagaagcggagcgggggcgagggcaaggtagccgcggccacgctggctgcggcatggagacacgggaggaacgggacccgcgggcggcacgggaaagggctgcggctcagaccactgcggcgggacgggcggatcagcggggatctaagtctcctgaggcaagggcgccccgaccgcagcgactcctgacacacccaggccgcaggacgaagcgctaccgcctggggctgccagctcccgcctcccgcccgcagagcccgggccccacgtagaggatccggcgccgccgacactcgcacactcaccgcgcgcgcgccacccttgcgcggcagcccgccgccctcggcgcgacctccgccccaccccgcgcgccgcggcgcctgggctacgtcacgggcgcgtgcgctctccgcgcgccgtcagcggcgcgggtggggcattgccagctcggcgtcccggttcccttggagacagagctggccagggcggccgcggctgggcaactacgacagcggagcccctggggaagccaagatgccgtcgaagggaaaggacaaaaagaaaggcaagagcaaaggcaaagacacgaagtaaggagaagccacccgagagtcccctctccctgggcctgcctgggatttcgggtctggggctggcaacctggcgccccccgcgccggcccactcggaccctctccccggctctcccggcttgtgaggattacagctcccatgtccatagtctggcagatctctactatgtgttcagattatcttaaacgtgtagaggatgtataaagtagttccttgggccttttcagagatctcttttggttcaaaggggacacctaaagtattttaccaagttggataattattgaggttttcccaaactgatcagagccactgaggtgggtaatgttctagcactaaccccttacaggcctggagttgctgctagattgctactagccctattgggggaccccggtggtttctggacacgttggagtcatacgtggtgtccagcaacaacaccatatatgggaacacagagttggcaccaaacttgagatgtttgtaaagtaacttaagagagtaattcatgctcaatacagaaagtttgggaaacatgggaagtaccaaaagaaaaaacaaaaatcacctgtagtctcattatccaaaaataaacactactatattttggagtattcttttttaataaaacgatagcccaatgtacatacttatatgtggcttttttcttcccatttgttaatgtaagtattcttttatggtattttttttttgtttttacataactgcacagttagtctagcccttaaagtgccaagggcttatcacattcctagaactcactaacatatgttttcagattttgaccatgcttctacagtacacatttgaacaatgaggaacactaagggtaagagaccttattccttggattttcca
